United States Patent Application Publication US 2011/0182862 A1 - sequence listing, part 23

SEQ ID NO: 33235 - protein, 2402 aa, Muscodor strobelii
  misc_feature: SGI Peptide ID NO. 571461
  misc_feature (579)..(913): Pfam Id: PF00698 Pfam Desc: Acyl transferase domain
  misc_feature (2142)..(2306): Pfam Id: PF00106 Pfam Desc: short chain dehydrogenase
  misc_feature (12)..(262): Pfam Id: PF00109 Pfam Desc: Beta-ketoacyl synthase, N-terminal domain
  misc_feature (270)..(424): Pfam Id: PF02801 Pfam Desc: Beta-ketoacyl synthase, C-terminal domain
  misc_feature (2143)..(2319): Pfam Id: PF08659 Pfam Desc: KR domain
  misc_feature (1444)..(1547): Pfam Id: PF08241 Pfam Desc: Methyltransferase domain
  misc_feature (1444)..(1545): Pfam Id: PF08242 Pfam Desc: Methyltransferase domain
  misc_feature (645)..(883): Pfam Id: PF00698 Pfam Desc: Acyl transferase domain
  misc_feature (579)..(613): Pfam Id: PF00698 Pfam Desc: Acyl transferase domain
  misc_feature (388)..(424): Pfam Id: PF02801 Pfam Desc: Beta-ketoacyl synthase, C-terminal domain
  misc_feature (270)..(310): Pfam Id: PF02801 Pfam Desc: Beta-ketoacyl synthase, C-terminal domain
  misc_feature (11)..(2396): NCBI GI: 212545767 Blast Desc: polyketide synthase, [Penicillium marneffei ATCC 18224] gi|210064557|gb|EEA18652.1| polyketide synthase, [Penicillium marneffei ATCC 18224]
  misc_feature (11)..(2392): NCBI GI: 242801931 Blast Desc: polyketide synthase, [Talaromyces stipitatus ATCC 10500] gi|218717216|gb|EED16637.1| polyketide synthase, [Talaromyces stipitatus ATCC 10500]
  misc_feature (6)..(2359): NCBI GI: 171679201 Blast Desc: protein product [Podospora anserina] gi|170937672|emb|CAP62330.1| protein product [Podospora anserina]
  misc_feature (4)..(2384): NCBI GI: 226294825 Blast Desc: lovastatin nonaketide synthase [Paracoccidioides brasiliensis Pb18]
  misc_feature (4)..(2384): NCBI GI: 225678468 Blast Desc: lovastatin nonaketide synthase [Paracoccidioides brasiliensis Pb03]
  misc_feature (11)..(2348): NCBI GI: 40787393 Blast Desc: polyketide synthase [Cochliobolus heterostrophus]
  misc_feature (12)..(2373): NCBI GI: 240109583 Blast Desc: polyketide synthase, [Coccidioides posadasii C735 delta SOWgp]
  misc_feature (11)..(2384): NCBI GI: 169609548 Blast Desc: SNOG_07866 [Phaeosphaeria nodorum SN15] gi|160701869|gb|EAT85332.2| SNOG_07866 [Phaeosphaeria nodorum SN15]
  misc_feature (11)..(2385): NCBI GI: 238840354 Blast Desc: polyketide synthase/peptide synthetase [Microsporum canis CBS 113480]
  misc_feature (8)..(2373): NCBI GI: 121704559 Blast Desc: hybrid NRPS/PKS enzyme, [Aspergillus clavatus NRRL 1] gi|119398688|gb|EAW09117.1| hybrid NRPS/PKS enzyme, [Aspergillus clavatus NRRL 1]
  misc_feature (10)..(1861): SWISSPROT Homolog: EC 2.3.1.161 Lovastatin nonaketide synthase
  misc_feature: Useful for fungicidal and/or biocontrol applications
MGATKSPQMPSEPIAIVGSGCRFPGGATSPSKLWDLLRQPVDVSSEISSSRFSANGFYHPSNSSPGHCNVKRSYLLRENVAHFDAQFFNLQAEEASAMDPQQRILLETVYEGLETAGLTLEGLKGSDTGVYVGMMYGDYESLQYRDLQNIPTYHGLGTARSITSNRISYFFDWHGPSLTLDTACSSSLVALHQGVQALRSAEVGVAVVAGTNLLLGPEPYIYESKLQMLSPDGQSRMWDESANGYARGDGVACLILKTLSKAIADHDHIEAIIRETGVNQDGRSRGITMPTVNAQVALIRDTYSRAGLDPTLPSHRCQYFEAHGTVSSHPFSYPQTRALIYAIRERQLVTQSRHKPFIQHSLAINPINTELSSISQPDSASTDLDFKSIKTIIGHTESTSGIAGIIKVVQAMKNKSIPPNLLFNNLNPRVAPWYHRLQIPQQLTPWPETVDGQRRRASVNSFGFGGTNAHVILEDFESLDTSQNHPVLFTPFVFSAQSKQSLLASLMAYAAHIEHNPDVSPVDLAWTLRTRRSRLPLRVSFPASPIEELHRNISAFTKDFNLNSKSASITSRKARLLGVFTGQGAQWARMGAALIERTKLAGDILSKLDNSLAQLPEGERPQWSLRAEILAEAVSSRINKAAISQPLCTAIQIVLVKLLRLAGIEFSVTIGHSSGEIACAYAAGCLSSSDAIRIAYYRGLHSRLACGPDGLCGAMLAVGTTLADAEELCNDEVFKGRVQVAACNSPSSVTLSGDEDAIEEMMEILQDEQKFARRLKVDTAYHSHHMVPCFQAYLDSMKAVSVSTAPTSDSSCTWISSVHGDLTPEMMRTIGSQYWVDNLLSPVLFKQAVERAASTGDFDAIIEVGPHPALKGPVRETLEDAGAIIPPYTSLLQRNTDAVGSISAALGYLWAEVDNLTVQFDKFEAALAGPLSYHFISDLPLYQWNHNQEYWHESSTSRKLRERQGPSHPLLGDLLPQSSTSRKMWKNILRTQDLDWIHGHQIQGQSVFPAAGYAITAIESAALLLPGQSIRLIEVEDLTIHQAMALDNDDVGIEVFFTLEGIKKDIHGGTTAFFTYESQSNNQPSPLLMASGRVAVIVGDESQHLLPATQGSEHDMIDIPTDVFYNTLQEVGYGYSGPFRALGGLKRKLGKATGLISMTPTGGVLSVHPGVLDAAIHSIFLAHSCPRDGQLSSLHLPTQIRRIRVNPSLCGKSWQAVDQVPFVSSIPDVFVDDRSTGFIGDVEIQNMASNASAIQLEGLRVVPFTEATKSEDKSVFYATRWIEAQPNADIPEPFEATSQDIELATILERGHYFYLRQLEEQIPPDHPSRRDALNANYLRWASQVNHLVTRGRHPYAKKGWCQDTLDDIQSLTKPFSSRPEIRAMHIVGEQMPLAIRGETTMLEHLMPTGLLSEYYEKAIGLTQVTVVADVVDQIVQRYPQSKILEVGAGTGGATREILKKVGHIFSSYTFTDVSAGFFEDAQVEFSPFREHMSFRVLDLEQDVTSQGFEKHAYDVVVASLVLHTSKSLEQACRRVRSLLKPGGYLVLYEVTNVDLIRLTALFGCLPGWWSGVDEGRTMTPAVNESKWDDILRSTGFSGVDTMTPVQNSLVFCNSVLVSQAVDDKIEFLREPLMSQPSLNQAEPVIKQLFIVGGSSLKVSRLATDVQKSIFMFCDQITRAKSLSDLDYDQVSRDAVVLVLQDLEEPIFENVNASKLECLKKLFGSEKSIVWVSQNRLVDSPYSNMVNGFARSQIWETPELRYQFLDFQDAARFNPGDIAETVLRFQALDSVHDARYNTILWSVETEIVIDGQGRQLIPRLRPIEDANNRYNSAVRAITQEVHPHAKPLVVSNSNGNYILHEAPSPNFTNLTAGVDLTVPLTVTHSSLSLINSDGECICVLFGKCDKTQQQYIGTARQPTSRIELLRKDLVDLPVPIDSDFVAPFLRLVVSHLLLGSFMGGLRAGETLICHNPPQSLATLIASRTKQLDVNTVFTTTSKQVTTAQGYTYLDPFMRQSEIMSLLPSNAARVIDFSGNDGTIATHATSSHWPTTANIVKLSALLADNDCSSNLCCRITRDALEKAVKAAIEHLDQSKPVLPSFDSFSVDRLPHSEGMNDPFTILNWNVPSVILSAKPVRPNLKADKTYWLVGLSRDMGLSLVNYLIANGARYFAITSRSPSVSSEWLEHATRRGATIRVLKCDVTNYDSLCTTYEEISTTLPPIAGVAQGAMVLRDVLTRDMKIEELTDVLGPKVEGSLNLDRFFYEKPLDFLVFFSSSAGLTGNAGQANYAAANFFMMSLAQQRQRRGVAGSVVDLGPVLGIGYITREWGNALSQPLAERGLMGLSERDVHCAFAEAINASHPNSEAENIHITTGLIPLPASAPDRPLVGSFLVQFSSFRLPYSQ

SEQ ID NO: 33236 - DNA, 1800 bp, Muscodor strobelii
  misc_feature: SGI cDNA ID NO. 571462
  misc_feature: Encodes the peptide sequence at SEQ ID NO 33237
atgatgttgtcacttagtcccgcgctcgtccttgggctggcagttttcctgtacgctatctacagatgggcgttgccgaagccattggcaggcattccatacaatgctgaggcagcgaataacatatttggcgatatcccgaaccttatgaaagagttatctgagacgggtgacttggtagcctgggtacttaagcaaaatgtaaaggccaattcacccatcagccaggtctttatccaccctttcggcaagcccctaattctactcagcgactggcgcgctgcacgtgatatcatgatacacagaactcacgagtttgatcgctcaagtatgatgacgaattactttcgcggtattttgaatcgtcagcagttcactctgcaaacaggatcagaatggaaaatacatcgtcgcatagtccaggacactatgtcaccgacgttcctgaaccgaaaggctgcgcctgcgatctatgaacatagtttggagtggatcaagctatggaatctaaaagctcggatagcaaatggccgaccatttgcggccaacaacgacatattccatgcagcactcgacggagtacttgggttcgcctttggatcgagctttgcgcatagcgcgactggaccgcaggttgaagggttgcttaagatttcgcccgttgaatttagccaaagcagccttaacaccgatgagcccgttgaatttccagaattccagttccacgagggtcttttgtccatgctgcagttatctgagatgatggaagaggtcaaaaatgcaccatctgtaccattgaagtggtggttcctcaagcgaacagaagtctacaagagtcgcatgaaaaagaaagatgcctgcatccgtgctgagattgagaaggcgatcgagacacggaagaatcataatcggctcggagacatcgatgaagcagacgattatccctcgtggatgcgctgtgcagttgagacgattgtggacagagaagagcgacatgctcaacgagagaaaagaaccccggatttctttgctcccatcgtcatggacgaaatatttggatttgtggttgcgggacacgatacaatatcaaccacgctttcctgggcagtgaagtttctagcggataatccaacggcccaagtccgtctcagacaagcgctccatgtatcccactctgctgctctcactgagaagcgactcccatccgtggacgacattgtacagacgtcaatcccttacctcgacgcaacaatggaagaagtacttcgatgcgctggtatcgtacccattggagaccgcgaggctcaagtggacactgtgttattaggccatcatataccaaagggcacaatcgtatgctttctcaataatgggcctggggtgcgacaacccgagctcgagataaacgagaagaagtatggaagtgcatctcaaaagggcataaatgacagcggaaatgccatcatttccgcttgggacaatgacaatgttgcctcttttagacccgaacgatggcttgtcaagcgaagtaatcttcagtcgtcgaacaatgacgatgcagacgcagatgacctggtcttcgacatccaagccggtccatcgatgccctttgggttgggcgttcgggcctgttttggcaaacgacttgcgtacctggagtataggatttatttgaccatgctggtgtggaattttgagttactcggatgtcccgagtcgctctccacctattctgggcaaatggcgcttgtacataagccgagatcctgctttgtgaggttgaacaagatttgtaattag

SEQ ID NO: 33237 - protein, 599 aa, Muscodor strobelii
  misc_feature: SGI Peptide ID NO. 571462
  misc_feature (26)..(594): Pfam Id: PF00067 Pfam Desc: Cytochrome P450
  misc_feature (350)..(452): Pfam Id: PF00067 Pfam Desc: Cytochrome P450
  misc_feature (499)..(573): Pfam Id: PF00067 Pfam Desc: Cytochrome P450
  misc_feature (9)..(598): NCBI GI: 91771577 Blast Desc: cytochrome P450 monooxygenase [Hypocrea virens]
  misc_feature (9)..(597): NCBI GI: 18026282 Blast Desc: cytochrome P450 [Gibberella zeae]
  misc_feature (9)..(597): NCBI GI: 18026284 Blast Desc: cytochrome P450 [Gibberella zeae]
  misc_feature (9)..(597): NCBI GI: 20475383 Blast Desc: cytochrome p450 monooxygenase [Gibberella zeae]
  misc_feature (18)..(597): NCBI GI: 85089910 Blast Desc: NCU09636 [Neurospora crassa OR74A] gi|28919499|gb|EAA28931.1| [Neurospora crassa OR74A]
  misc_feature (9)..(597): NCBI GI: 22300021 Blast Desc: AF330109_1 TRI13 [Fusarium sporotrichioides] gi|23957822|gb|AAN40834.1| cytochrome P450 [Fusarium sporotrichioides]
  misc_feature (9)..(597): NCBI GI: 29126007 Blast Desc: P450 monooxygenase for C-4 hydroxylation of trichothecene [Fusarium sporotrichioides]
  misc_feature (15)..(597): NCBI GI: 170940310 Blast Desc: protein product [Podospora anserina]
  misc_feature (9)..(597): NCBI GI: 269856267 Blast Desc: cytochrome P450 monooxygenase [Fusarium sp. NRRL 13405]
  misc_feature (6)..(594): NCBI GI: 189191520 Blast Desc: cytochrome P450 monooxygenase [Pyrenophora tritici-repentis Pt-1C-BFP] gi|187973705|gb|EDU41204.1| cytochrome P450 monooxygenase [Pyrenophora tritici-repentis
MMLSLSPALVLGLAVFLYAIYRWALPKPLAGIPYNAEAANNIFGDIPNLMKELSETGDLVAWVLKQNVKANSPISQVFIHPFGKPLILLSDWRAARDIMIHRTHEFDRSSMMTNYFRGILNRQQFTLQTGSEWKIHRRIVQDTMSPTFLNRKAAPAIYEHSLEWIKLWNLKARIANGRPFAANNDIFHAALDGVLGFAFGSSFAHSATGPQVEGLLKISPVEFSQSSLNTDEPVEFPEFQFHEGLLSMLQLSEMMEEVKNAPSVPLKWWFLKRTEVYKSRMKKKDACIRAEIEKAIETRKNHNRLGDIDEADDYPSWMRCAVETIVDREERHAQREKRTPDFFAPIVMDEIFGFVVAGHDTISTTLSWAVKFLADNPTAQVRLRQALHVSHSAALTEKRLPSVDDIVQTSIPYLDATMEEVLRCAGIVPIGDREAQVDTVLLGHHIPKGTIVCFLNNGPGVRQPELEINEKKYGSASQKGINDSGNAIISAWDNDNVASFRPERWLVKRSNLQSSNNDDADADDLVFDIQAGPSMPFGLGVRACFGKRLAYLEYRIYLTMLVWNFELLGCPESLSTYSGQMALVHKPRSCFVRLNKICN

SEQ ID NO: 33238 - DNA, 818 bp, Muscodor strobelii
  misc_feature: SGI EST ID NO. CUFF.78645.0
  misc_feature: Variant of the nucleotide sequence at SEQ ID NO 33236
catcgtcatggacgaaatatttggatttgtggttgcgggacacgatacaatatcaaccacgctttcctgggcagtgaagtttctagcggataatccaacggcccaagtccgtctcagacaagcgctccatgtatcccactctgctgctctcactgagaagcgactcccatccgtggacgacattgtacagacgtcaatcccttacctcgacgcaacaatggaagaagtacttcgatgcgctggtatcgtacccattggagaccgcgaggctcaagtggacactgtgttattaggccatcatataccaaagggcacaatcgtatgctttctcaataatgggcctggggtgcgacaacccgagctcgagataaacgagaagaagtatggaagtgcatctcaaaagggcataaatgacagcggaaatgccatcatttccgcttgggacaatgacaatgttgcctcttttagacccgaacgatggcttgtcaagcgaagtaatcttcagtcgtcgaacaatgacgatgcagacgcagatgacctggtcttcgacatccaagccggtccatcgatgccctttgggttgggcgttcgggcctgttttggcaaacgacttgcgtacctggagtataggatttatttgaccatgctggtgtggaattttgagttactcggatgtcccgagtcgctctccacctattctgggcaaatggcgcttgtacataagccgagatcctgctttgtgaggttgaacaagatttgtaattagttgttcatcatcgcataacatcaacacggctacttccagccgaatttgatat

SEQ ID NO: 33239 - DNA, 1065 bp, Muscodor strobelii
  misc_feature: SGI cDNA ID NO. 571463
  misc_feature: Encodes the peptide sequence at SEQ ID NO 33240
atggaatgcctcgtccagtcgcccgatggcaaaggagagcccgtcattgcaacagatcgaccaataccgcaacccaaagagccttatgacgtattgattaaggtgatagccgttgcactcaatccaacagattttaagtcaccgcaaacgaatccgactccaggcgctataatcggagtcgacttttctggaattgttatatccacgagtactggtgttgaacatcttactcccggcgatcgtgtatgtggcggtgtccacggttctaatccaggcaatcccaacaacggggccttcgcccaatatctaatatctgattcgcgactactggtcagagtcccagatgcttggaatgatcttgatgccgcagcgttgggtggtgttagctggggaacgatagctttagctatggagaattcgctaaagttgcctggagttccatcgaagccggttgccctacgctcggatgggacgcgaatacctgttttggtctacggtggtgcgacagcgatgggaacgatggcttgtcagctgttagagaaatcgggctacgacccaattgcaacgtgtgcgccaccatcatcgagtctagtgcggagctacggcgctataaagacattgccctattcgtcaccaacgtgtggccaggcaatctttgatgataccaaaggaacgctccgacatgccatagactgcatcacaacacctgaatcgattagttgctgtttcaaagctttagctcgagcagggccgcgctacgccagtcttgaatacgcaccagaagagtaccggacccgcaaagcagtcaaagtcgaccttcctattacatacgtcttgtacggtagagaggtgaagttgaaaggggcgtaccatcgagaagctaacccagccaatgtcgagctcggtacacgatggagaaatgagattgaggctctcctcgacggtggtcaattaaaagcacatcccgtgcgagaaatggaaggacggtggcaaggcattatcgaaggcttagagctattgaaaggcgggtacgtgcgtggccaaaaactagtcgtacgtgtatga

SEQ ID NO: 33240 - protein, 354 aa, Muscodor strobelii
  misc_feature: SGI Peptide ID NO. 571463
  misc_feature (28)..(113): Pfam Id: PF08240 Pfam Desc: Alcohol dehydrogenase GroES-like domain
  misc_feature (4)..(354): NCBI GI: 242801941 Blast Desc: zinc binding dehydrogenase, [Talaromyces stipitatus ATCC 10500] gi|218717218|gb|EED16639.1| zinc binding dehydrogenase, [Talaromyces stipitatus ATCC 10500]
  misc_feature (4)..(354): NCBI GI: 189195888 Blast Desc: zinc-binding dehydrogenase family oxidoreductase [Pyrenophora tritici-repentis Pt-1C-BFP] gi|187980161|gb|EDU46787.1| zinc-binding dehydrogenase family
  misc_feature (4)..(354): NCBI GI: 212545771 Blast Desc: alcohol dehydrogenase, [Penicillium marneffei ATCC 18224] gi|210064559|gb|EEA18654.1| alcohol dehydrogenase, [Penicillium marneffei ATCC 18224]
  misc_feature (10)..(352): NCBI GI: 238840353 Blast Desc: conserved [Microsporum canis CBS 113480]
  misc_feature (15)..(354): NCBI GI: 169609544 Blast Desc: SNOG_07864 [Phaeosphaeria nodorum SN15] gi|111064210|gb|EAT85330.1| SNOG_07864 [Phaeosphaeria nodorum SN15]
  misc_feature (9)..(354): NCBI GI: 39946264 Blast Desc: MGG_08380 [Magnaporthe grisea 70-15] gi|145019961|gb|EDK04189.1| MGG_08380 [Magnaporthe grisea 70-15]
  misc_feature (16)..(354): NCBI GI: 121704567 Blast Desc: zinc-binding dehydrogenase family oxidoreductase, [Aspergillus clavatus NRRL 1] gi|119398692|gb|EAW09121.1| zinc-binding dehydrogenase family oxidoreductase, [Aspergillus 1]
  misc_feature (22)..(354): NCBI GI: 171679195 Blast Desc: protein product [Podospora anserina] gi|170937669|emb|CAP62327.1| protein product [Podospora anserina]
  misc_feature (16)..(354): NCBI GI: 261352797 Blast Desc: TOXD [Verticillium albo-atrum VaMs.102]
  misc_feature (16)..(354): NCBI GI: 169595154 Blast Desc: SNOG_00311 [Phaeosphaeria nodorum SN15] gi|160701029|gb|EAT91806.2| SNOG_00311 [Phaeosphaeria nodorum SN15]
  misc_feature (22)..(202): SWISSPROT Homolog: EC 2.3.1.94 6-deoxyerythronolide-B synthase
MECLVQSPDGKGEPVIATDRPIPQPKEPYDVLIKVIAVALNPTDFKSPQTNPTPGAIIGVDFSGIVISTSTGVEHLTPGDRVCGGVHGSNPGNPNNGAFAQYLISDSRLLVRVPDAWNDLDAAALGGVSWGTIALAMENSLKLPGVPSKPVALRSDGTRIPVLVYGGATAMGTMACQLLEKSGYDPIATCAPPSSSLVRSYGAIKTLPYSSPTCGQAIFDDTKGTLRHAIDCITTPESISCCFKALARAGPRYASLEYAPEEYRTRKAVKVDLPITYVLYGREVKLKGAYHREANPANVELGTRWRNEIEALLDGGQLKAHPVREMEGRWQGIIEGLELLKGGYVRGQKLVVRV

SEQ ID NO: 33241 - DNA, 1122 bp, Muscodor strobelii
  misc_feature: SGI cDNA ID NO. 571464
  misc_feature: Encodes the peptide sequence at SEQ ID NO 33242
atgaagcactcaagttcactcttagacagcgagtcggcaccctttgacaagatcagggacacatttgccagccatgcagcccgttatcctgacaccgagacattggagagccaccattggcatatgaagactgacaacgcgaagagtagcgaatgggacttctctgagtttcagaagacggctgaccaatttggctggtttgtgacgtacatggagaaccagcgcgacacacacaacaggcagtggaacaaacagtgctgggaggcaattctcaatgccacagaaaaatatgccatccacatcgttgccggcaaaatgcccgcacagaagttcctaaagacttgcatgcttcgcatttgggccaaggaatccgactcatcagaactcccggacaagccaactggacctgtcattgaccccattcagtttctgatcaagctagacactatcgaggaggactaccagctcatccacctgctctctagagccacttccgctgtgtatcggccagactcgacttcatccgagcgcaagaacgcgaagtcgcaggctacggagcacgagacacgacttgcctccaagctccagtcctgtgccctagatgagatcatcgacaaggaagggcacaaggacgctggaatgagcaccaagcattccgagaacaccggagacaacgaggctatccgggacagtgatagcatcggtcccagtcactcggacgaatccaacaagactctctctagcggctcagtcgcgggcggcacagataaagacagcactccgtctgccctctcagaatcagctactccatcaatcatcccgttgtacgaggactatacgcacgagcaacttgtcgatgtcgccaacacaatcgttgtctacaaacccacccctggcataccctttgctagactgcgcaagaagatgacccatgcattgaagcaagccgcccacgacgttatcacagcagacaagcagatgaagaaggacctcaacgctcttgcgctggacttcaatcaccttgacatcgatgaggagaagacgaacaagaagcggatgcacggggatgatgatggtgatgtccctatggagccccagatgaagcgtagcaaggaagactga

SEQ ID NO: 33242 - protein, 373 aa, Muscodor strobelii
  misc_feature: SGI Peptide ID NO. 571464
MKHSSSLLDSESAPFDKIRDTFASHAARYPDTETLESHHWHMKTDNAKSSEWDFSEFQKTADQFGWFVTYMENQRDTHNRQWNKQCWEAILNATEKYAIHIVAGKMPAQKFLKTCMLRIWAKESDSSELPDKPTGPVIDPIQFLIKLDTIEEDYQLIHLLSRATSAVYRPDSTSSERKNAKSQATEHETRLASKLQSCALDEIIDKEGHKDAGMSTKHSENTGDNEAIRDSDSIGPSHSDESNKTLSSGSVAGGTDKDSTPSALSESATPSIIPLYEDYTHEQLVDVANTIVVYKPTPGIPFARLRKKMTHALKQAAHDVITADKQMKKDLNALALDFNHLDIDEEKTNKKRMHGDDDGDVPMEPQMKRSKED

SEQ ID NO: 33243 - DNA, 339 bp, Muscodor strobelii
  misc_feature: SGI cDNA ID NO. 571465
  misc_feature: Encodes the peptide sequence at SEQ ID NO 33244
atgtgtctcatcttcacctgcggcgagcacaccttccgcaaggaggtcgagggctacgagggcgtcacctgccagtgccacaactgcggcaactactcgggccatgtcatccgcagcaagccctggttcaccttctgcttcgtccccgtcgtccccctctccatgagcggctaccacgacgtcgtctgccacatctgcaacttcgcccagcccctcgagaacaggcccgacgtccagcagatgaagggcggcaaccacatccccatgcagaaccaggggccgccacagggctggaataacggcccgccacacggacaggcgcccatgcagtacaagtga

SEQ ID NO: 33244 - protein, 112 aa, Muscodor strobelii
  misc_feature: SGI Peptide ID NO. 571465
  misc_feature (1)..(111): NCBI GI: 116182264 Blast Desc: CHGG_01760 [Chaetomium globosum CBS 148.51] gi|88186057|gb|EAQ93525.1| CHGG_01760 [Chaetomium globosum CBS 148.51]
  misc_feature (1)..(112): NCBI GI: 85117496 Blast Desc: NCU08369 [Neurospora crassa OR74A] gi|28927078|gb|EAA36036.1| [Neurospora crassa OR74A]
  misc_feature (1)..(82): NCBI GI: 39943308 Blast Desc: MGG_03734 [Magnaporthe grisea 70-15] gi|145009667|gb|EDJ94323.1| MGG_03734 [Magnaporthe grisea 70-15]
  misc_feature (1)..(111): NCBI GI: 256730804 Blast Desc: NECHADRAFT_89761 [Nectria haematococca mpVI 77-13-4]
  misc_feature (1)..(92): NCBI GI: 154296454 Blast Desc: BC1G_13053 [Botryotinia fuckeliana B05.10] gi|150843414|gb|EDN18607.1| BC1G_13053 [Botryotinia fuckeliana B05.10]
  misc_feature (1)..(91): NCBI GI: 156054734 Blast Desc: SS1G_06215 [Sclerotinia sclerotiorum 1980] gi|154703995|gb|EDO03734.1| SS1G_06215 [Sclerotinia sclerotiorum 1980]
  misc_feature (1)..(94): NCBI GI: 261188226 Blast Desc: BDBG_09087 [Ajellomyces dermatitidis SLH14081] gi|239593276|gb|EEQ75857.1| BDBG_09087 [Ajellomyces dermatitidis SLH14081]
  misc_feature (1)..(79): NCBI GI: 189197511 Blast Desc: conserved [Pyrenophora tritici-repentis Pt-1C-BFP] gi|187981041|gb|EDU47667.1| conserved [Pyrenophora tritici-repentis Pt-1C-BFP]
  misc_feature (1)..(79): NCBI GI: 225563035 Blast Desc: HCBG_00769 [Ajellomyces capsulatus G186AR] gi|240279855|gb|EER43360.1| HCDG_03258 [Ajellomyces capsulatus H143]
  misc_feature (1)..(84): NCBI GI: 169616722 Blast Desc: SNOG_11536 [Phaeosphaeria nodorum SN15] gi|111060124|gb|EAT81244.1| SNOG_11536 [Phaeosphaeria nodorum SN15]
MCLIFTCGEHTFRKEVEGYEGVTCQCHNCGNYSGHVIRSKPWFTFCFVPVVPLSMSGYHDVVCHICNFAQPLENRPDVQQMKGGNHIPMQNQGPPQGWNNGPPHGQAPMQYK

SEQ ID NO: 33245 - DNA, 1304 bp, Muscodor strobelii
  misc_feature: SGI EST ID NO. CUFF.78691.1
  misc_feature: Variant of the nucleotide sequence at SEQ ID NO 33243
ttaataacggtgtttggatgcacccacatcagtgccacatgcatccgtcgacgtttcgtcactcgccaaggctgcgctgaggtttgattgagcttggccgagaagtcgatcccattcagagttgaaggtttcgacacagccccgaagaggtgacgcgcccaatcctcaagcttcctctctgcaccaccattcttttttgtccagctgtcaaccaatctcccacgccgcactcactcacactctaccacctaaactctacctctgcctctacccatctcgccgccacacctcgccacgcctcacgatccggctcaatccatctatccatcatttgcgacgacaccaccactcccccgatatccagagcgcaccatcgcaattgacccgccatgtgtctcatcttcacctgcggcgagcacaccttccgcaaggaggtcgagggctacgagggcgtcacctgccagtgccacaactgcggcaactactcgggccatgtcatccgcagcaagccctggttcaccttctgcttcgtccccgtcgtccccctctccatgagcggctaccacgacgtcgtctgccacatctgcaacttcgcccagcccctcgagaacaggcccgacgtccagcagatgaagggcggcaaccacatccccatgcagaaccaggggccgccacagggctggaataacggcccgccacacggacaggcgcccatgcagtacaagtgaaccatgatcatcgacgaggacacagcggaaaacagagagaaaaggcgccgatgcgtgtgtttctgctgtcaataatgaagaggcgacaatttcatgacgaggggaatatgggtaacatgggcgatttggtttctatgcaaggaaaacggcgtttgggtgttatgcatcacgagtcccccgggtttgttcactttcgttttcacaatttgcaataccacgcatcatggttaatggcattcttgagttcatatgttgcttattaatcatttccctcgtctttgccgtctcatgttaccgtctagaaatccacattgcctggacgtagatgcagcataatcccacaccacatacacacggattgagcttcagtctgacgcggaccttgaatgggactgtctgatttcaacttagcgagtgataagcaggagggtaattcggttggtagttgtacactgagaggttctgacatctcaatgcttatatgatatgaagcgacatccacgatccatatatctatttcacaagccagcgaaaatcgtatctccaatgtactaccttagccaagcccaattgacg

SEQ ID NO: 33246 - DNA, 278 bp, Muscodor strobelii
  misc_feature: SGI cDNA ID NO. 571466
  misc_feature: Encodes the peptide sequence at SEQ ID NO 33247
atgttctacgacctcaacgtcgcgtggtcacccagcacgacagccgacgaactcgaccgcaccctgagattcagcgcctcgctggggtacggcgccgtggccctcaaccacaccatcgccgccccgatccccgtcaagttcacgaaccccgtccccgtcgtccccgtgccggagcctggggcgtcgtcggcgaagctgccggcggtgctgcggcgggcgacggtcgtctacagcgacaacgccatcaaccaccagctgccgcagatcgcccaggccta

SEQ ID NO: 33247 - protein, 92 aa, Muscodor strobelii
  misc_feature: SGI Peptide ID NO. 571466
  misc_feature (1)..(92): NCBI GI: 261355190 Blast Desc: conserved [Verticillium albo-atrum VaMs.102]
  misc_feature (1)..(92): NCBI GI: 145615878 Blast Desc: MGG_03733 [Magnaporthe grisea 70-15] gi|145009668|gb|EDJ94324.1| MGG_03733 [Magnaporthe grisea 70-15]
  misc_feature (1)..(90): NCBI GI: 46109216 Blast Desc: FG01490.1 [Gibberella zeae PH-1]
  misc_feature (1)..(92): NCBI GI: 256730586 Blast Desc: NECHADRAFT_30286 [Nectria haematococca mpVI 77-13-4]
  misc_feature (1)..(59): NCBI GI: 85117491 Blast Desc: NCU08368 [Neurospora crassa OR74A] gi|28927077|gb|EAA36035.1| conserved [Neurospora crassa OR74A]
  misc_feature (1)..(92): NCBI GI: 154320768 Blast Desc: BC1G_01856 [Botryotinia fuckeliana B05.10] gi|150853545|gb|EDN28737.1| BC1G_01856 [Botryotinia fuckeliana B05.10]
  misc_feature (1)..(92): NCBI GI: 171695180 Blast Desc: protein product [Podospora anserina] gi|170947832|emb|CAP59996.1| protein product [Podospora anserina]
  misc_feature (1)..(91): NCBI GI: 225561916 Blast Desc: ribonuclease P protein subunit p30 [Ajellomyces capsulatus G186AR]
  misc_feature (1)..(91): NCBI GI: 240275525 Blast Desc: ribonuclease P protein subunit p30 [Ajellomyces capsulatus H143]
  misc_feature (1)..(91): NCBI GI: 154283591 Blast Desc: conserved [Ajellomyces capsulatus NAm1] gi|150410771|gb|EDN06159.1| conserved [Ajellomyces capsulatus NAm1]
MFYDLNVAWSPSTTADELDRTLRFSASLGYGAVALNHTIAAPIPVKFTNPVPVVPVPEPGASSAKLPAVLRRATVVYSDNAINHQLPQIAQA

SEQ ID NO: 33248 - DNA, 483 bp, Muscodor strobelii
  misc_feature: SGI EST ID NO. CUFF.78678.0
  misc_feature: Variant of the nucleotide sequence at SEQ ID NO 33246
atgggcttggccgctatctaaggtacctatgtggacaaggtgcgataagataaccgaagctgcaactcaaatttatggcgacatgttttatcttttaatacgatagcgagactcaacaacgatatagcaccgcaggccacacctcggaggtttgaatatgaggagatagtctcccgtttcattctacacggggccctgcgccggcctcccccatcgccatgttctacgacctcaacgtcgcgtggtcacccagcacgacagccgacgaactcgaccgcaccctgagattcagcgcctcgctggggtacggcgccgtggccctcaaccacaccatcgccgccccgatccccgtcaagttcacgaaccccgtccccgtcgtccccgtgccggagcctggggcgtcgtcggcgaagctgccggcggtgctgcggcgggcgacggtcgtctacagcgacaacgccatcaaccaccagctgccgcaga

SEQ ID NO: 33249 - DNA, 3906 bp, Muscodor strobelii
  misc_feature: SGI cDNA ID NO. 571467
  misc_feature: Encodes the peptide sequence at SEQ ID NO 33250
cgcgtcgcccaggtccgcatcggcgtcaacgacgtcccctacgacctcctgccccgcgtcgtccccgccgtgccctccggctactccgagtccgaccaggactccgagaacgcctggtccgacctgctccagaagctgcgcagcctcatcctcagcagcttcgacctgcgcgtcgcccagtacgaggacgacatcaaggagaaggacgcccagcgctccctgcccggctggaacttctgcaccttcttcatcctcaaggagggcctcgcacgcggcttcgagagcgtcggcctcgtcgaagatgccctcgtcggctacgacgagctcagcctggggctcgacatggtcatcagagagcagcgctcgggtgcttctgcttcgggctccgccgccaatcttcttcccgcctgcaccccggaactgaagcacatcgcactcaaggccagggctgccatgactgggtccgactacgaggacgacgaggacgaggagcttgtggatctccagaaatcgcagtcggcgggatcggcatcgggatcggtgtcgaccactagggatttttacgacgacatccccatcagtgccaacaagaagccctaccgcgatctcattgtcgccaacaatgtctcgctgttcgatttcaggtgctacatctttgcgcgacagatatccttactgctgcggctcggcaacgcctggtctacgcgggaggagttgctggcgaaattgaaagagcagcaagaatcagtcttgcacggagtcgcacctcgagcgcctcccccgaagcacaaggagaacgagcaggaagagctccctatgctctctgagatctgccgcaggacgctcgagttcatcccctctgtgtctcaggtcatgcgtagagatgttatatctgccttggttggtagcaccagtggagagtccgaggtcgaacccacagtccagctcgacccaggcgtgaatgaagtcgtcgataacttggtggcgtctttcgccttctccatcgcccaacaaatcctcgctcagacctcgaccaaagccttacccatacccccttcttcccttgggcccccggacggacatgaacccaaggccgctatccccgagcccaagacaatgatgcacccagctaggagctcatcgttgaatgtgcggcccggaggaaacagtgtcgcaaacccaccgcctagtcctggtatttttcccggcagaccatcagatcaacaaggccagcccccttcattcctcaaggccggcctagaggatctcgccgccaggagagccgaactgtacgccctgtctaggaatattttggaagagtcgggcaagaagcgaggttggactaatggctgggatcaagtccctattgttggcgaatctgtcatggtcaatatggtggatattgatcttggagaggaaaaaggtacggcgacgcagcccattcccaagcccattgtttccatgtgtggcatagacaataagctcttgaggactgcactcgacaatcaagatgatttctaccgcctgtacgagatcctcaccgacaagtcccttcggcactacactgtcgcaaatcatactcactctatccagaccacgatggctgatcttgccgtgctcaaatatcatcttggtgattataatactgcttcgtcttatttctggaggacaacaccattctttggagagagcggctggagccttctggaactatccatgttgatcatgtattgccgctgcttgaaggagcttgaacgcaaggatgagtacgtgaaggtgctgttgaaactgctatctaaagccgcggcagcagagaatgaccgacgacaagccaacgcttctttcctggctcgctccggcacttttcccgagaatgatgcaattgagggacttttgatagatctattacaagagtcgcgagcgttgactaatgaactgcggatcccgttatctaactttgtttcgagcgtcgaggtcgacgggcctccagactatgatcagggtcgcgacagccagacaatcaagttaaagctcgacagcctacttgttgatgagttgacgctcgacacagccagagtgagggtcgtggatcccaactccaacccacccaaagaggtatggttcacccaagagggacaaatgggcatcaagccggggaaaagtagactccaattgagaagcaacacaactatgccaggctcatatgagattgacagactcgatttgatagctggaaaattatgtcttcactttgaacgcgaattcggcgaccgtgttaacaccttcctcaagtcgtcttcagtgtccctctaccaccgcacagatgcgttagatgtgtcgctgttcgcctctaagcacatgcagctggatcgtaataacaccgttgaagttgagctagattcggggtggaacgacctgcagactaccgagatccgagtcaaagcagcaacaggcggcttgcgattactcacaagcgaggctgaatgcctacaccccaccattgagctgaatcgagtaacagaagtcggtttattatccttcaatgccataccaccagaaactaaggtccgcatacgatttccatatactctagagcaggatacccccaatatatcgattcgcatagaagtaacgtatgagacgaaacatggacgctacgcatattcgaaaacgcccaccatctacactgccttggcactcggagtgaacgtacaagatgttttcaagcacgatgccctcttctctaggttcactgtttcaagtgcaaactatagccctttaagattatttcaaagcgagctgatagagtcggacacgtttgattccactttcggcgcaccgcttagagccgtgaccatctttcccaagcagccagcaagtcttttatacaagatcaaccggaagagcaaggcaaaaagcgggcctaagacgtctaagaccatgtatctcaagctgctttacagtgtgctgcatgacgaaatcattgaagcaatcgagacttcgctcttgaaggctcttgatcacacaccattgcggtctctttcacggttactgctatcctccctgttgccagcggtacagaatgatctcaccggagcagacctcgagcgggccgctctcttaggatacattcctacttcgtttgtatctcatatcaattgtcgaaagctatttagaagactcggctacgatgaatccggcgtcgatttatccgagtcactggcctcattccttcaagcctggcataacaagtgtccaaccatcgctctccccgcaacggagcccgatgagccatcatccatcctaattcccgtcgatattccctcggtcactgtggtccacacagccgatattcgactgacgctgccggcgtcatttgaagatgttacacccatttgcactggccaactcgtgcctgccacgctgcatcttcgctggtcgcgcgcatggaatacggagactccgttgtcggagcagtccgatctcgaattcagttatgaagtctcggcaccacaggacacctggttgctgggtgggcggcgtaaaggccatttcgtcatccccgcacctggcgatagcgatgagcagagcacttatagcagctccattgacacagaagctgagataccgatcgtggtcatcccgctgcgagaaggctggctgccgtatccgagcgtcgatatccgcgaggtacggtcagaggcaaacgacagcaacaagtcaggggctcgaggtaacgggagtgatcagttcgagacagatttcaagaatgtcggagagactgtgcgggttattgcggatcgcgcaagagttacactgtctctggacgcaagcgggtcaggtgggggaccgcttgtattggattcggagacgagagaagtggaggggagagtgcttgttgcttaa

SEQ ID NO: 33250 - protein, 1301 aa, Muscodor strobelii
  misc_feature: SGI Peptide ID NO. 571467
  misc_feature (1)..(1301): NCBI GI: 256727268 Blast Desc: NECHADRAFT_90679 [Nectria haematococca mpVI 77-13-4]
  misc_feature (1)..(1296): NCBI GI: 164426965 Blast Desc: NCU02225 [Neurospora crassa OR74A] gi|157071549|gb|EAA30402.2| conserved [Neurospora crassa OR74A]
  misc_feature (1)..(1290): NCBI GI: 46121351 Blast Desc: FG05054.1 [Gibberella zeae PH-1]
  misc_feature (1)..(1270): NCBI GI: 261353933 Blast Desc: conserved [Verticillium albo-atrum VaMs.102]
  misc_feature (1)..(1187): NCBI GI: 171680709 Blast Desc: protein product [Podospora anserina] gi|170939982|emb|CAP65208.1| protein product [Podospora anserina]
  misc_feature (1)..(1278): NCBI GI: 145616616 Blast Desc: MGG_01969 [Magnaporthe grisea 70-15] gi|145009222|gb|EDJ93933.1| MGG_01969 [Magnaporthe grisea 70-15]
  misc_feature (1)..(1292): NCBI GI: 156030991 Blast Desc: SS1G_14276 [Sclerotinia sclerotiorum 1980] gi|154700667|gb|EDO00406.1| SS1G_14276 [Sclerotinia sclerotiorum 1980]
  misc_feature (1)..(1292): NCBI GI: 154297586 Blast Desc: BC1G_12638 [Botryotinia fuckeliana B05.10] gi|150858461|gb|EDN33653.1| BC1G_12638 [Botryotinia fuckeliana B05.10]
  misc_feature (1)..(1292): NCBI GI: 159131377 Blast Desc: TMEM1 family protein, [Aspergillus fumigatus A1163]
  misc_feature (1)..(1292): NCBI GI: 70995738 Blast Desc: TMEM1 family protein [Aspergillus fumigatus Af293] gi|66850259|gb|EAL90586.1| TMEM1 family protein, [Aspergillus fumigatus Af293]
RVAQVRIGVNDVPYDLLPRVVPAVPSGYSESDQDSENAWSDLLQKLRSLILSSFDLRVAQYEDDIKEKDAQRSLPGWNFCTFFILKEGLARGFESVGLVEDALVGYDELSLGLDMVIREQRSGASASGSAANLLPACTPELKHIALKARAAMTGSDYEDDEDEELVDLQKSQSAGSASGSVSTTRDFYDDIPISANKKPYRDLIVANNVSLFDFRCYIFARQISLLLRLGNAWSTREELLAKLKEQQESVLHGVAPRAPPPKHKENEQEELPMLSEICRRTLEFIPSVSQVMRRDVISALVGSTSGESEVEPTVQLDPGVNEVVDNLVASFAFSIAQQILAQTSTKALPIPPSSLGPPDGHEPKAAIPEPKTMMHPARSSSLNVRPGGNSVANPPPSPGIFPGRPSDQQGQPPSFLKAGLEDLAARRAELYALSRNILEESGKKRGWTNGWDQVPIVGESVMVNMVDIDLGEEKGTATQPIPKPIVSMCGIDNKLLRTALDNQDDFYRLYEILTDKSLRHYTVANHTHSIQTTMADLAVLKYHLGDYNTASSYFWRTTPFFGESGWSLLELSMLIMYCRCLKELERKDEYVKVLLKLLSKAAAAENDRRQANASFLARSGTFPENDAIEGLLIDLLQESRALTNELRIPLSNFVSSVEVDGPPDYDQGRDSQTIKLKLDSLLVDELTLDTARVRVVDPNSNPPKEVWFTQEGQMGIKPGKSRLQLRSNTTMPGSYEIDRLDLIAGKLCLHFEREFGDRVNTFLKSSSVSLYHRTDALDVSLFASKHMQLDRNNTVEVELDSGWNDLQTTEIRVKAATGGLRLLTSEAECLHPTIELNRVTEVGLLSFNAIPPETKVRIRFPYTLEQDTPNISIRIEVTYETKHGRYAYSKTPTIYTALALGVNVQDVFKHDALFSRFTVSSANYSPLRLFQSELIESDTFDSTFGAPLRAVTIFPKQPASLLYKINRKSKAKSGPKTSKTMYLKLLYSVLHDEIIEAIETSLLKALDHTPLRSLSRLLLSSLLPAVQNDLTGADLERAALLGYIPTSFVSHINCRKLFRRLGYDESGVDLSESLASFLQAWHNKCPTIALPATEPDEPSSILIPVDIPSVTVVHTADIRLTLPASFEDVTPICTGQLVPATLHLRWSRAWNTETPLSEQSDLEFSYEVSAPQDTWLLGGRRKGHFVIPAPGDSDEQSTYSSSIDTEAEIPIVVIPLREGWLPYPSVDIREVRSEANDSNKSGARGNGSDQFETDFKNVGETVRVIADRARVTLSLDASGSGGGPLVLDSETREVEGRVLVA

SEQ ID NO: 33251 - DNA, 4199 bp, Muscodor strobelii
  misc_feature: SGI EST ID NO. CUFF.78681.0
  misc_feature: Variant of the nucleotide sequence at SEQ ID NO 33249
cccaggtccgcatcggcgtcaacgacgtcccctacgacctcctgccccgcgtcgtccccgccgtgccctccggctactccgagtccgaccaggactccgagaacgcctggtccgacctgctccagaagctgcgcagcctcatcctcagcagcttcgacctgcgcgtcgcccagtacgaggacgacatcaaggagaaggacgcccagcgctccctgcccggctggaacttctgcaccttcttcatcctcaaggagggcctcgcacgcggcttcgagagcgtcggcctcgtcgaagatgccctcgtcggctacgacgagctcagcctggggctcgacatggtcatcagagagcagcgctcgggtgcttctgcttcgggctccgccgccaatcttcttcccgcctgcaccccggaactgaagcacatcgcactcaaggccagggctgccatgactgggtccgactacgaggacgacgaggacgaggagcttgtggatctccagaaatcgcagtcggcgggatcggcatcgggatcggtgtcgaccactagggatttttacgacgacatccccatcagtgccaacaagaagccctaccgcgatctcattgtcgccaacaatgtctcgctgttcgatttcaggtgctacatctttgcgcgacagatatccttactgctgcggctcggcaacgcctggtctacgcgggaggagttgctggcgaaattgaaagagcagcaagaatcagtcttgcacggagtcgcacctcgagcgcctcccccgaagcacaaggagaacgagcaggaagagctccctatgctctctgagatctgccgcaggacgctcgagttcatcccctctgtgtctcaggtcatgcgtagagatgttatatctgccttggttggtagcaccagtggagagtccgaggtcgaacccacagtccagctcgacccaggcgtgaatgaagtcgtcgataacttggtggcgtctttcgccttctccatcgcccaacaaatcctcgctcagacctcgaccaaagccttacccatacccccttcttcccttgggcccccggacggacatgaacccaaggccgctatccccgagcccaagacaatgatgcacccagctaggagctcatcgttgaatgtgcggcccggaggaaacagtgtcgcaaacccaccgcctagtcctggtatttttcccggcagaccatcagatcaacaaggccagcccccttcattcctcaaggccggcctagaggatctcgccgccaggagagccgaactgtacgccctgtctaggaatattttggaagagtcgggcaagaagcgaggttggactaatggctgggatcaagtccctattgttggcgaatctgtcatggtcaatatggtggatattgatcttggagaggaaaaaggtacggcgacgcagcccattcccaagcccattgtttccatgtgtggcatagacaataagctcttgaggactgcactcgacaatcaagatgatttctaccgcctgtacgagatcctcaccgacaagtcccttcggcactacactgtcgcaaatcatactcactctatccagaccacgatggctgatcttgccgtgctcaaatatcatcttggtgattataatactgcttcgtcttatttctggaggacaacaccattctttggagagagcggctggagccttctggaactatccatgttgatcatgtattgccgctgcttgaaggagcttgaacgcaaggatgagtacgtgaaggtgctgttgaaactgctatctaaagccgcggcagcagagaatgaccgacgacaagccaacgcttctttcctggctcgctccggcacttttcccgagaatgatgcaattgagggacttttgatagatctattacaagagtcgcgagcgttgactaatgaactgcggatcccgttatctaactttgtttcgagcgtcgaggtcgacgggcctccagactatgatcagggtcgcgacagccagacaatcaagttaaagctcgacagcctacttgttgatgagttgacgctcgacacagccagagtgagggtcgtggatcccaactccaacccacccaaagaggtatggttcacccaagagggacaaatgggcatcaagccggggaaaagtagactccaattgagaagcaacacaactatgccaggctcatatgagattgacagactcgatttgatagctggaaaattatgtcttcactttgaacgcgaattcggcgaccgtgttaacaccttcctcaagtcgtcttcagtgtccctctaccaccgcacagatgcgttagatgtgtcgctgttcgcctctaagcacatgcagctggatcgtaataacaccgttgaagttgagctagattcggggtggaacgacctgcagactaccgagatccgagtcaaagcagcaacaggcggcttgcgattactcacaagcgaggctgaatgcctacaccccaccattgagctgaatcgagtaacagaagtcggtttattatccttcaatgccataccaccagaaactaaggtccgcatacgatttccatatactctagagcaggatacccccaatatatcgattcgcatagaagtaacgtatgagacgaaacatggacgctacgcatattcgaaaacgcccaccatctacactgccttggcactcggagtgaacgtacaagatgttttcaagcacgatgccctcttctctaggttcactgtttcaagtgcaaactatagccctttaagattatttcaaagcgagctgatagagtcggacacgtttgattccactttcggcgcaccgcttagagccgtgaccatctttcccaagcagccagcaagtcttttatacaagatcaaccggaagagcaaggcaaaaagcgggcctaagacgtctaagaccatgtatctcaagctgctttacagtgtgctgcatgacgaaatcattgaagcaatcgagacttcgctcttgaaggctcttgatcacacaccattgcggtctctttcacggttactgctatcctccctgttgccagcggtacagaatgatctcaccggagcagacctcgagcgggccgctctcttaggatacattcctacttcgtttgtatctcatatcaattgtcgaaagctatttagaagactcggctacgatgaatccggcgtcgatttatccgagtcactggcctcattccttcaagcctggcataacaagtgtccaaccatcgctctccccgcaacggagcccgatgagccatcatccatcctaattcccgtcgatattccctcggtcactgtggtccacacagccgatattcgactgacgctgccggcgtcatttgaagatgttacacccatttgcactggccaactcgtgcctgccacgctgcatcttcgctggtcgcgcgcatggaatacggagactccgttgtcggagcagtccgatctcgaattcagttatgaagtctcggcaccacaggacacctggttgctgggtgggcggcgtaaaggccatttcgtcatccccgcacctggcgatagcgatgagcagagcacttatagcagctccattgacacagaagctgagataccgatcgtggtcatcccgctgcgagaaggctggctgccgtatccgagcgtcgatatccgcgaggtacggtcagaggcaaacgacagcaacaagtcaggggctcgaggtaacgggagtgatcagttcgagacagatttcaagaatgtcggagagactgtgcgggttattgcggatcgcgcaagagttacactgtctctggacgcaagcgggtcaggtgggggaccgcttgtattggattcggagacgagagaagtggaggggagagtgcttgttgcttaacccgactctactacacgaggtcttcggtcgtgatagaccccaggggataaatgtatatagagaatgaggttatggagtagacgggaatagagaccagcatctcgtagagccgcagtgcagcagatgaagaagacgaatatgagtacctaatattgcattcacgcaatggtagcatcttatcattcgcccgagtagtgggcttagactgcttagtaacgccgttgtctttgctggcatcaacatatatactaatcgttagtttccttctacttttccgctagccgaatccttgactatttg

SEQ ID NO: 33252 - DNA, 1371 bp, Muscodor strobelii
  misc_feature: SGI cDNA ID NO. 571468
  misc_feature: Encodes the peptide sequence at SEQ ID NO 33253
atgaccgcagacagcacgggctcagcgctcgacggccccatcgacggcggccgtcacatccgctactggctgcgctgcttccgcacgctgctgcctcaccactacacgagcaacgacagcatccgcctgacgctcggcttcttcatcgtgtccgccctcgacatcctcgcgccctcctccgataagccgctgatcacccccgaagagcgcgagcagctgcaggactgggtcctcaacctccagcacccatacggtggcttctgcggctcccctcaccacgccctcccccgtgaattcacccacggctgggaccccgtggcccaggtcaacgtcgcccgcgatgcctccaaccccaacattgccgccaccggcttcgccctgctgtgtcttggcgtcctggctgacgacgatggttccagcgcgtttgccggtgtcaacagggcctgcaccctcggatggctgaagaagctgcagagggaggacggcagctttggcgatgtgctcaccgacgacggcagggtctcgggcggcagagacatgcgccactgctattttgccaccatcatccgctgggcactgggcgcaggcgagagtgacgccgacaagtcgctggacatcgacgtcgatgccctcgtgaggcacatacggcgcgcccagacttttgacggcggcatggccgagagctcgacacacgaaagtcacagtggttacgccttctgcgctgttgccgctcttgcgatgctcgatctcgccaacaccgacccggccgccgccccggatcactacatccgcgcgggcatcccttcgatcccctccctcgtccatttcctcgtaaaccgccagttcgcataccttgaggctcccgagggcgacggcgaagccgatgacgaacccgaatccgccaaccatgcactgcccgatctatctgctctttccatgtccgacgctgatcacctcaccggtttcaatggccgccccaacaagctccccgacacgtgctacacttggtgggtgagcggcgccctctccctcctcggcgaagacgacgtcgtcgaccgtgtctgcgctcgtcgcttcatcctacaaaagacgcaacatcgcatcggcgggtttggaaagcatccgggtagcccgcctgatatctaccatgggtacatgggtcttgctgctctgggaacgatagcaggcgagggaggagaagcggggatgaagaaattcgatcctcgtctatgtatcagttctgacacggcagccaagctcatcaaggcgaagcagggtctgctagcggatgaagagggtgaagacgttgaggagtggatcgcgtctttccttaagtctgacagagatgaagctaaagttccacccgagtga

SEQ ID NO: 33253 - protein, 456 aa, Muscodor strobelii
  misc_feature: SGI Peptide ID NO. 571468
  misc_feature (206)..(249): Pfam Id: PF00432 Pfam Desc: Prenyltransferase and squalene oxidase repeat
  misc_feature (351)..(395): Pfam Id: PF00432 Pfam Desc: Prenyltransferase and squalene oxidase repeat
  misc_feature (321)..(346): Pfam Id: PF00432 Pfam Desc: Prenyltransferase and squalene oxidase repeat
  misc_feature (68)..(93): Pfam Id: PF00432 Pfam Desc: Prenyltransferase and squalene oxidase repeat
  misc_feature (145)..(187): Pfam Id: PF00432 Pfam Desc: Prenyltransferase and squalene oxidase repeat
  misc_feature (11)..(429): NCBI GI: 154297084 Blast Desc: BC1G_12201 [Botryotinia fuckeliana B05.10] gi|150843030|gb|EDN18223.1| BC1G_12201 [Botryotinia fuckeliana B05.10]
  misc_feature (14)..(432): NCBI GI: 156057103 Blast Desc: SS1G_04282 [Sclerotinia sclerotiorum 1980] gi|154702068|gb|EDO01807.1| SS1G_04282 [Sclerotinia sclerotiorum 1980]
  misc_feature (11)..(407): NCBI GI: 145604925 Blast Desc: MGG_01971 [Magnaporthe grisea 70-15] gi|145012833|gb|EDJ97474.1| MGG_01971 [Magnaporthe grisea 70-15]
  misc_feature (13)..(434): NCBI GI: 256725023 Blast Desc: [Nectria haematococca mpVI 77-13-4]
  misc_feature (14)..(431): NCBI GI: 85093171 Blast Desc: NCU02228 [Neurospora crassa OR74A] gi|28921087|gb|EAA30405.1| [Neurospora crassa OR74A]
  misc_feature (14)..(407): NCBI GI: 46122777 Blast Desc: FG05766.1 [Gibberella zeae PH-1]
  misc_feature (18)..(420): NCBI GI: 189193647 Blast Desc: geranylgeranyl transferase type I beta subunit [Pyrenophora tritici-repentis Pt-1C-BFP] gi|187978726|gb|EDU45352.1| geranylgeranyl transferase type I
  misc_feature (1)..(434): NCBI GI: 171680703 Blast Desc: protein product [Podospora anserina] gi|170939979|emb|CAP65205.1| protein product [Podospora anserina]
  misc_feature (18)..(413): NCBI GI: 225562304 Blast Desc: geranylgeranyl transferase type I beta subunit [Ajellomyces capsulatus G186AR]
  misc_feature (18)..(413): NCBI GI: 226292408 Blast Desc: geranylgeranyl transferase type I beta subunit [Paracoccidioides brasiliensis Pb18]
  misc_feature (2)..(420): SWISSPROT Homolog: EC 2.5.1.59 Protein geranylgeranyltransferase type I
MTADSTGSALDGPIDGGRHIRYWLRCFRTLLPHHYTSNDSIRLTLGFFIVSALDILAPSSDKPLITPEEREQLQDWVLNLQHPYGGFCGSPHHALPREFTHGWDPVAQVNVARDASNPNIAATGFALLCLGVLADDDGSSAFAGVNRACTLGWLKKLQREDGSFGDVLTDDGRVSGGRDMRHCYFATIIRWALGAGESDADKSLDIDVDALVRHIRRAQTFDGGMAESSTHESHSGYAFCAVAALAMLDLANTDPAAAPDHYIRAGIPSIPSLVHFLVNRQFAYLEAPEGDGEADDEPESANHALPDLSALSMSDADHLTGFNGRPNKLPDTCYTWWVSGALSLLGEDDVVDRVCARRFILQKTQHRIGGFGKHPGSPPDIYHGYMGLAALGTIAGEGGEAGMKKFDPRLCISSDTAAKLIKAKQGLLADEEGEDVEEWIASFLKSDRDEAKVPPE

SEQ ID NO: 33254 - DNA, 2169 bp, Muscodor strobelii
  misc_feature: SGI EST ID NO. CUFF.78698.1
  misc_feature: Variant of the nucleotide sequence at SEQ ID NO 33252
caacagtgaggatgcgcgatcttaagttgtagtgactggaggtctaggtggggtagctggggttgatgctcgcccctcacctggcgcattctcagccttcagcctgcaaccaagatcacgatccacgaacgcaaagcgcagacgcacacactcttacattcccatgtttgactgccagcaacgacatgattgggaatagcttttggtcattttgttttctttcataagttcattgtgacattacgcgtatctgctgtacaaggacccgaatctctccaatttccccacctctttgactatcggccgataaaccgttagcgacctcaggttccggatgtcatgaccgcagacagcacgggctcagcgctcgacggccccatcgacggcggccgtcacatccgctactggctgcgctgcttccgcacgctgctgcctcaccactacacgagcaacgacagcatccgcctgacgctcggcttcttcatcgtgtccgccctcgacatcctcgcgccctcctccgataagccgctgatcacccccgaagagcgcgagcagctgcaggactgggtcctcaacctccagcacccatacggtggcttctgcggctcccctcaccacgccctcccccgtgaattcacccacggctgggaccccgtggcccaggtcaacgtcgcccgcgatgcctccaaccccaacattgccgccaccggcttcgccctgctgtgtcttggcgtcctggctgacgacgatggttccagcgcgtttgccggtgtcaacagggcctgcaccctcggatggctgaagaagctgcagagggaggacggcagctttggcgatgtgctcaccgacgacggcagggtctcgggcggcagagacatgcgccactgctattttgccaccatcatccgctgggcactgggcgcaggcgagagtgacgccgacaagtcgctggacatcgacgtcgatgccctcgtgaggcacatacggcgcgcccagacttttgacggcggcatggccgagagctcgacacacgaaagtcacagtggttacgccttctgcgctgttgccgctcttgcgatgctcgatctcgccaacaccgacccggccgccgccccggatcactacatccgcgcgggcatcccttcgatcccctccctcgtccatttcctcgtaaaccgccagttcgcataccttgaggctcccgagggcgacggcgaagccgatgacgaacccgaatccgccaaccatgcactgcccgatctatctgctctttccatgtccgacgctgatcacctcaccggtttcaatggccgccccaacaagctccccgacacgtgctacacttggtgggtgagcggcgccctctccctcctcggcgaagacgacgtcgtcgaccgtgtctgcgctcgtcgcttcatcctacaaaagacgcaacatcgcatcggcgggtttggaaagcatccgggtagcccgcctgatatctaccatgggtacatgggtcttgctgctctgggaacgatagcaggcgagggaggagaagcggggatgaagaaattcgatcctcgtctatgtatcagttctgacacggcagccaagctcatcaaggcgaagcagggtctgctagcggatgaagagggtgaagacgttgaggagtggatcgcgtctttccttaagtctgacagagatgaagctaaagttccacccgagtgacgacaaccaagccctgagactgcaaagaagcgtctttgacgccaaggtgcaaataacaattcctcgtacgtatctatcaccacgaactcctgctccgtagccaatactctcaccattgcatggcaatatctccatctcgatgacgaaggcttgtgcatgcctcgagttattaagcaagttgaagagcgccgctgtctaggtatagatccaaacgcagcacggggatcatggcccgtaggcgattacccgtgtcgagatcaggcacatcgatgctggcccacgcggcctggatatttggtgcagcaattgcctgctaggcacgatttgtaaataagatgaggtcaaagatagcatcagatgcgtgacgcctcactgactttggggagaaccatgtccctgtccagtgatggcaagtgcctgcttctccgtagtgaataaattgtctgattacacaacgtg

SEQ ID NO: 33255 - DNA, 534 bp, Muscodor strobelii
  misc_feature: SGI cDNA ID NO. 571469
  misc_feature: Encodes the peptide sequence at SEQ ID NO 33256
atggccatcctcatccccgcgagtaccatcttgacctcgctgtgccttttccacattaccctcgcgtatttcttctacacgaacccgcagactatagcggatcaggcactggtattcttcctcggcgaggccaccggcatgccgcagacacaatacttctcgaaaccgtcacctagctccgccctcctcgccgtcgtccttctgctacttggcctctccgaccttattaccctctccatgcccgaggagatctggttggtacactactggggcgcccaggcacctgctcgtattgccgtcttcggtctcctgaccctcttctcctatttcactacgccttcctctcccgtaaccacccgattatacggtacggcaagtggagcggacgggctgcgtaatcgcgtcttcttcgcgtttgcctttctggagtgcctgagttgggtctgggcttgggtcacactgagagaagaggccgcagcatttgcgaagcgcaagaggagacgttcgagcacggctggtagggaaagatcgtaa

SEQ ID NO: 33256 - protein, 177 aa, Muscodor strobelii
  misc_feature: SGI Peptide ID NO. 571469
  misc_feature (4)..(170): NCBI GI: 39967252 Blast Desc: MGG_01972 [Magnaporthe grisea 70-15] gi|145012834|gb|EDJ97475.1| MGG_01972 [Magnaporthe grisea 70-15]
  misc_feature (4)..(176): NCBI GI: 85093175 Blast Desc: NCU02229 [Neurospora crassa OR74A] gi|28921088|gb|EAA30406.1| conserved [Neurospora crassa OR74A]
  misc_feature (4)..(175): NCBI GI: 261353939 Blast Desc: conserved [Verticillium albo-atrum VaMs.102]
  misc_feature (4)..(170): NCBI GI: 46122775 Blast Desc: FG05765.1 [Gibberella zeae PH-1]
  misc_feature (4)..(157): NCBI GI: 156057105 Blast Desc: SS1G_04283 [Sclerotinia sclerotiorum 1980] gi|154702069|gb|EDO01808.1| SS1G_04283 [Sclerotinia sclerotiorum 1980]
  misc_feature (4)..(157): NCBI GI: 171680701 Blast Desc: protein product [Podospora anserina] gi|170939978|emb|CAP65204.1| protein product [Podospora anserina]
  misc_feature (4)..(157): NCBI GI: 154297086 Blast Desc: BC1G_12202 [Botryotinia fuckeliana B05.10] gi|150843031|gb|EDN18224.1| BC1G_12202 [Botryotinia fuckeliana B05.10]
  misc_feature (4)..(173): NCBI GI: 116200788 Blast Desc: CHGG_10939 [Chaetomium globosum CBS 148.51] gi|88175653|gb|EAQ83121.1| CHGG_10939 [Chaetomium globosum CBS 148.51]
  misc_feature (4)..(174): NCBI GI: 169601502 Blast Desc: SNOG_03618 [Phaeosphaeria nodorum SN15] gi|111067703|gb|EAT88823.1| SNOG_03618 [Phaeosphaeria nodorum SN15]
  misc_feature (1)..(168): NCBI GI: 189205551 Blast Desc: conserved [Pyrenophora tritici-repentis Pt-1C-BFP] gi|187975203|gb|EDU41829.1| conserved [Pyrenophora tritici-repentis Pt-1C-BFP]
MAILIPASTILTSLCLFHITLAYFFYTNPQTIADQALVFFLGEATGMPQTQYFSKPSPSSALLAVVLLLLGLSDLITLSMPEEIWLVHYWGAQAPARIAVFGLLTLFSYFTTPSSPVTTRLYGTASGADGLRNRVFFAFAFLECLSWVWAWVTLREEAAAFAKRKRRRSSTAGRERS

SEQ ID NO: 33257 - DNA, 1413 bp, Muscodor strobelii
  misc_feature: SGI EST ID NO. CUFF.78714.1
  misc_feature: Variant of the nucleotide sequence at SEQ ID NO 33255
agaaagtactctttggatacatgatgtagcgtcagcaggggtcaacgtggctataaataccgaaatgggagatcccgacacgtagccagcttagagggactagagttgtcgcatcgaaaacgccaaaacactccaacaccccgtctgtgtcgcgacaatgtgacacatgactcaacaaccccctggtccacctgatgctgatgcccttcacctgaaagcctccgatcacaagccaaacctgtatatacaactttagctccgaattccaccacatacaagccatcacatacatcgtccgcagctagcaccgtctagatcgagtggactttcaactcgttgctgggtctttcctttggcgagtagtacacctctatactcaaaagggaccttgacgtcatctggcgccgacgccgacaacgccgacaaccttcaagatggccatcctcatccccgcgagtaccatcttgacctcgctgtgccttttccacattaccctcgcgtatttcttctacacgaacccgcagactatagcggatcaggcactggtattcttcctcggcgaggccaccggcatgccgcagacacaatacttctcgaaaccgtcacctagctccgccctcctcgccgtcgtccttctgctacttggcctctccgaccttattaccctctccatgcccgaggagatctggttggtacactactggggcgcccaggcacctgctcgtattgccgtcttcggtctcctgaccctcttctcctatttcactacgccttcctctcccgtaaccacccgattatacggtacggcaagtggagcggacgggctgcgtaatcgcgtcttcttcgcgtttgcctttctggagtgcctgagttgggtctgggcttgggtcacactgagagaagaggccgcagcatttgcgaagcgcaagaggagacgttcgagcacggctggtagggaaagatcgtaatgcgctgggctgcgcatcgaggataggcacaagtgtggagattcaatgaaagaaatctagttggggcagcacaggcgatttgcggcgttgggagttacttacatacggaattgggacatggctgatgcgctgtttctcggggatcatctgtgacgatgtgaggaagtaagtgtcaactttatgcttgcaaaatgggttctatgggcgttgatgacttttgagacgatttcgctggtcggagagaccatttctcttctccctcgaaaacgatcttttagcaactctcgagctagctagagtctgcattctattcccgagcggatgagtgagcgaagcgaatagagtttagacatgtatgtattgttgcacttttttttttacgaacgaagataccccgtttttactcttcatcgcccctcagctcctcttcaatttgaagctggat

SEQ ID NO: 33258 - DNA, 1695 bp, Muscodor strobelii
  misc_feature: SGI cDNA ID NO. 571470
  misc_feature: Encodes the peptide sequence at SEQ ID NO 33259
atggcaggattcaatgatcgaagggcgaagacggctcatgtcaacatgatgacagacaccatcattaataacatgtctcccgatgggcttcggatcatgatgcgatcattactcgcatcgcatcccgaaatcactggaactttcgaggctacgacacgcatttatatcgaggaaaatatcttgtcgaggatagaaaaccagtcttcacatacggattcggccaagctcaagacaatacagcagactttacggtgtatgcttggttgtggactttgctacagcgcactccctcttgcagctggccttgcaactcagacttttcagctagatcgagcatcgttaggcttgagtgagattgatgcatgtaagctattggcctcaattgatggtgacattgtacaagccattaccgcagttcagaaaacactgttcgtatccacaggcgtacgggagctgctcgatgaagagaaggttcctctccgaaatctcttggatagtcttgagagctgttgccgttttgcgcaaacaaccgctgtcgagtttccatatagtcgggctttgagtgcgacagcaagtattcttgggttaccgcctcctgaggacatcgacacttatccaggactagatggtatcgatgcaccggtaggcatatcggaaacatttgagttaaaaggtcgaatactcccaagattattctcgggtctatggcaattgtctagtcccgcttggggctctgcatcgacatcgaagatttttacgcagttttccaaatatgcgaagagcggtatcactgccttcgacatggcggaccattatggcgatgcagaaattattttcttaaagggtcggtttcggtcgagatacccatacaaggactcaatctttgcggcaactaaatactgcgtttttcacccaatgaccgtcacccacgaagccgtcaaggagaatgtatcagagagatgtaagagactaggcagcgagaagatcgatctgctacagtttcactggcaattttacaacgacagtcattatttagatgcgctgcgttaccttgcggaagacgaacgagtttctgcccttggtctctgcaacttcgacacagaccatcttgaagctgtcataaatggtggcgtcgaagtacacacaaatcaagtccaattctctctcatcgacagtagacctactgtccgcatgggcgaagtttgcaagaagcacaacatcaaattgctaacatacgggagtttgtgtggcggatttcttgctgagaagtggcttggaaagcctgagccagacctctatgatgaatcgataactccaagtcaacggaaagttagtatcgctgcacgaaactcccatgttatacacgctgaccagagccagtatcacggcgtgattcgatcttggggagactgggcactcttccaagaattgctcagcacactgaagtcaatcggcgacaagtacggcgtcagcgtatcaaatgtagcaacacgatgggtcctggactttccatacgtcggcgctgttattgttggtgcccgtatgggtgttagcgaacacactgacgagaacctcgcaagcttgggctggagcctcgaccccgaggatgggcagtcgatagatgttgtcctcaataaaagtaggagatttgacatgttcgcggcaatgggggactgtggtggagaataccgctga

SEQ ID NO: 33259 - protein, 564 aa, Muscodor strobelii
  misc_feature: SGI Peptide ID NO. 571470
  misc_feature (223)..(545): Pfam Id: PF00248 Pfam Desc: Aldo/keto reductase family
  misc_feature (322)..(423): Pfam Id: PF00248 Pfam Desc: Aldo/keto reductase family
  misc_feature (7)..(564): NCBI GI: 242773249 Blast Desc: aryl-alcohol dehydrogenase, [Talaromyces stipitatus ATCC 10500] gi|218721821|gb|EED21239.1| aryl-alcohol dehydrogenase, [Talaromyces stipitatus ATCC 10500]
  misc_feature (8)..(564): NCBI GI: 115388171 Blast Desc: conserved [Aspergillus terreus NIH2624] gi|114195675|gb|EAU37375.1| conserved [Aspergillus terreus NIH2624]
  misc_feature (8)..(564): NCBI GI: 212534094 Blast Desc: aldo-keto reductase, [Penicillium marneffei ATCC 18224] gi|210069602|gb|EEA23692.1| aldo-keto reductase, [Penicillium marneffei ATCC 18224]
  misc_feature (238)..(564): NCBI GI: 256720504 Blast Desc: NECHADRAFT_55885 [Nectria haematococca mpVI 77-13-4]
  misc_feature (206)..(564): NCBI GI: 261195598 Blast Desc: aldo/keto reductase [Ajellomyces dermatitidis SLH14081] gi|239588075|gb|EEQ70718.1| aldo/keto reductase [Ajellomyces dermatitidis SLH14081]
  misc_feature (206)..(564): NCBI GI: 239610434 Blast Desc: aldo/keto reductase [Ajellomyces dermatitidis ER-3]
  misc_feature (219)..(564): NCBI GI: 225563405 Blast Desc: aldo/keto reductase [Ajellomyces capsulatus G186AR]
  misc_feature (219)..(564): NCBI GI: 240107305 Blast Desc: general stress protein, [Coccidioides posadasii C735 delta SOWgp]
  misc_feature (9)..(564): NCBI GI: 156062750 Blast Desc: SS1G_01491 [Sclerotinia sclerotiorum 1980] gi|154696827|gb|EDN96565.1| SS1G_01491 [Sclerotinia sclerotiorum 1980]
  misc_feature (219)..(564): NCBI GI: 154282061 Blast Desc: [Ajellomyces capsulatus NAm1] gi|150412022|gb|EDN07410.1| [Ajellomyces capsulatus NAm1]
MAGFNDRRAKTAHVNMMTDTIINNMSPDGLRIMMRSLLASHPEITGTFEATTRIYIEENILSRIENQSSHTDSAKLKTIQQTLRCMLGCGLCYSALPLAAGLATQTFQLDRASLGLSEIDACKLLASIDGDIVQAITAVQKTLFVSTGVRELLDEEKVPLRNLLDSLESCCRFAQTTAVEFPYSRALSATASILGLPPPEDIDTYPGLDGIDAPVGISETFELKGRILPRLFSGLWQLSSPAWGSASTSKIFTQFSKYAKSGITAFDMADHYGDAEIIFLKGRFRSRYPYKDSIFAATKYCVFHPMTVTHEAVKENVSERCKRLGSEKIDLLQFHWQFYNDSHYLDALRYLAEDERVSALGLCNFDTDHLEAVINGGVEVHTNQVQFSLIDSRPTVRMGEVCKKHNIKLLTYGSLCGGFLAEKWLGKPEPDLYDESITPSQRKVSIAARNSHVIHADQSQYHGVIRSWGDWALFQELLSTLKSIGDKYGVSVSNVATRWVLDFPYVGAVIVGARMGVSEHTDENLASLGWSLDPEDGQSIDVVLNKSRRFDMFAAMGDCGGEYR

SEQ ID NO: 33260 - DNA, 2759 bp, Muscodor strobelii
  misc_feature: SGI EST ID NO. CUFF.78724.0
  misc_feature: Variant of the nucleotide sequence at SEQ ID NO 33258
tttctggctaccagagtctcgcatctgtgctgccattacttgcagcaaaacagcgagtaacatcgaagaatgattggatgacaacagatgcattgatcgcgtgccccgatcccaattgcccttcacaactcaagattattcgcgaaggcgtccggaagttcaaccattcagagacaacagcagtgccgttagaccaatgatttgcgagacctcaagttattagattttgtctagagggaggcatcagaggctcctaataggcaaagaaggtcccatcttcagtgttaaacccagctaccgcgaacatgttgctccatagttcatcaccgcgccaacaaatcgaattgcgaaattgctcaaatcatagttttcatgggatgccgcgcctgaaatattagctcgagatccaactttgttgcggcttgaagctaggatagccggattgcgagagttttgaaatgggaggcttgaaaaagtttgtctaactttgtgagcaactggcgctttcagtgcgtctttcgtgtctacatttgtatgtataatttgaccaagctctatcaagaatctccctcgtaaatagcaacttgatgcttcgggcgaggcttgctgcgaggtgtttgccactttacgaatggcattgcatgcttcgtcttctatacgttgtgtaattaaccctgtgattaataataagagctgtcgcgttgataatcagcgcatatgattcattgacaagatcataaatgtctccattttcaccaggcacaaactcgcctcgtacctccttctacagcagggccggcgtctgcctatgtcaacttgccgaaacaggagccgagcgcgcccaccacgccggcattccactagcaaccaatatcgccggtgccttaacgccgacaaacgggttgtgagcggtccctcgatcttcttgtacaacgaggaaagaaacatatcaaatattcattttgatatctaataatttgaacgaaataagcagctaagttcagtgtctttgtatcgccatggcaggattcaatgatcgaagggcgaagacggctcatgtcaacatgatgacagacaccatcattaataacatgtctcccgatgggcttcggatcatgatgcgatcattactcgcatcgcatcccgaaatcactggaactttcgaggctacgacacgcatttatatcgaggaaaatatcttgtcgaggatagaaaaccagtcttcacatacggattcggccaagctcaagacaatacagcagactttacggtgtatgcttggttgtggactttgctacagcgcactccctcttgcagctggccttgcaactcagacttttcagctagatcgagcatcgttaggcttgagtgagattgatgcatgtaagctattggcctcaattgatggtgacattgtacaagccattaccgcagttcagaaaacactgttcgtatccacaggcgtacgggagctgctcgatgaagagaaggttcctctccgaaatctcttggatagtcttgagagctgttgccgttttgcgcaaacaaccgctgtcgagtttccatatagtcgggctttgagtgcgacagcaagtattcttgggttaccgcctcctgaggacatcgacacttatccaggactagatggtatcgatgcaccggtaggcatatcggaaacatttgagttaaaaggtcgaatactcccaagattattctcgggtctatggcaattgtctagtcccgcttggggctctgcatcgacatcgaagatttttacgcagttttccaaatatgcgaagagcggtatcactgccttcgacatggcggaccattatggcgatgcagaaattattttcggtcggtttcggtcgagatacccatacaaggactcaatctttgcggcaactaaatactgcgtttttcacccaatgaccgtcacccacgaagccgtcaaggagaatgtatcagagagatgtaagagactaggcagcgagaagatcgatctgctacagtttcactggcaattttcattatttagatgcgctgcgttaccttgcggaagacgaacgagtttctgcccttggtctctgcaacttcgacacagaccatcttgaagctgtcataaatggtggcgtcgaagtacacacaaatcaagtccaattctctctcatcgacagtagacctactgtccgcatgggcgaagtttgcaagaagcacaacatcaaattgctaacatacgggagtttgtgtggcggatttcttgctgagaagtggcttggaaagcctgagccagacctctatgatgaatcgataactccaagtcaacggaaatatcacggcgtgattcgatcttggggagactgggcactcttccaagaattgctcagcacactgaagtcaatcggcgacaagtacggcgtcagcgtatcaaatgtagcaacacgatgggtcctggactttccatacgtcggcgctgttattgttggtgcccgtatgggtgttagcgaacacactgacgagaacctcgcaagcttgggctggagcctcgaccccgaggatgggcagtcgatagatgttgtcctcaataaaagtaggagatttgacatgttcgcggcaatgggggactgtggtggagaataccgctgagatgtgaaatcaggctcgtacaactatgatattaatatcgttggtgtaattgtgcaagctagtattccaggtatctatctgctatctattctttttgaggtctatgttctcgt

SEQ ID NO: 33261 - DNA, 1749 bp, Muscodor strobelii
  misc_feature: SGI cDNA ID NO. 571471
  misc_feature: Reduced expression when VOC is produced
  misc_feature: Encodes the peptide sequence at SEQ ID NO 33262
atggcaggattcaatgatcgaagggcgaagacggctcatgtcaacatgatgacagacaccatcattaataacatgtctcccgatgggcttcggatcatgatgcgatcattactcgcatcgcatcccgaaatcactggaactttcgaggctacgacacgcatttatatcgaggaaaatatcttgtcgaggatagaaaaccagtcttcacatacggattcggccaagctcaagacaatacagcagactttacggtgtatgcttggttgtggactttgctacagcgcactccctcttgcagctggccttgcaactcagacttttcagctagatcgagcatcgttaggcttgagtgagattgatgcatgtaagctattggcctcaattgatggtgacattgtacaagccattaccgcagttcagaaaacactgttcgtatccacaggcgtacgggagctgctcgatgaagagaaggttcctctccgaaatctcttggatagtcttgagagctgttgccgttttgcgcaaacaaccgctgtcgagtttccatatagtcgggctttgagtgcgacagcaagtattcttgggttaccgcctcctgaggacatcgacacttatccaggactagatggtatcgatgcaccggtaggcatatcggaaacatttgagttaaaaggtcgaatactcccaagattattctcgggtctatggcaattgtctagtcccgcttggggctctgcatcgacatcgaagatttttacgcagttttccaaatatgcgaagagcggtatcactgccttcgacatggcggaccattatggcgatgcagaaattattttcttaaagggtcggtttcggtcgagatacccatacaaggactcaatctttgcggcaactaaatactgcgtttttcacccaatgaccgtcacccacgaagccgtcaaggagaatgtatcagagagatgtaagagactaggcagcgagaagatcgatctgctacagtttcactggcaattttacaacgacagtcattatttagatgcgctgcgttaccttgcggaagacgaacgagtttctgcccttggtctctgcaacttcgacacagaccatcttgaagctgtcataaatggtggcgtcgaagtacacacaaatcaagtccaattctctctcatcgacagtagacctactgtccgcatgggcgaagtttgcaagaagcacaacatcaaattgctaacatacgggagtttggtaagacccaagttacacgaagacaaaggacaatcaactcattatttctcgcagtgtggcggatttcttgctgagaagtggcttggaaagcctgagccagacctctatgatgaatcgataactccaagtcaacggaaagttagtatcgctgcacgaaactcccatgttatacacgctgaccagagccagtatcacggcgtgattcgatcttggggagactgggcactcttccaagaattgctcagcacactgaagtcaatcggcgacaagtacggcgtcagcgtatcaaatgtagcaacacgatgggtcctggactttccatacgtcggcgctgttattgttggtgcccgtatgggtgttagcgaacacactgacgagaacctcgcaagcttgggctggagcctcgaccccgaggatgggcagtcgatagatgttgtcctcaataaaagtaggagatttgacatgttcgcggcaatgggggactgtggtggagaataccgctga

SEQ ID NO: 33262 - protein, 582 aa, Muscodor strobelii
  misc_feature: SGI Peptide ID NO. 571471
  misc_feature (223)..(563): Pfam Id: PF00248 Pfam Desc: Aldo/keto reductase family
  misc_feature (322)..(420): Pfam Id: PF00248 Pfam Desc: Aldo/keto reductase family
  misc_feature (7)..(582): NCBI GI: 242773249 Blast Desc: aryl-alcohol dehydrogenase, [Talaromyces stipitatus ATCC 10500] gi|218721821|gb|EED21239.1| aryl-alcohol dehydrogenase, [Talaromyces stipitatus ATCC 10500]
  misc_feature (8)..(582): NCBI GI: 115388171 Blast Desc: conserved [Aspergillus terreus NIH2624] gi|114195675|gb|EAU37375.1| conserved [Aspergillus terreus NIH2624]
  misc_feature (8)..(582): NCBI GI: 212534094 Blast Desc: aldo-keto reductase, [Penicillium marneffei ATCC 18224] gi|210069602|gb|EEA23692.1| aldo-keto reductase, [Penicillium marneffei ATCC 18224]
  misc_feature (238)..(582): NCBI GI: 256720504 Blast Desc: NECHADRAFT_55885 [Nectria haematococca mpVI 77-13-4]
  misc_feature (206)..(582): NCBI GI: 261195598 Blast Desc: aldo/keto reductase [Ajellomyces dermatitidis SLH14081] gi|239588075|gb|EEQ70718.1| aldo/keto reductase [Ajellomyces dermatitidis SLH14081]
  misc_feature (206)..(582): NCBI GI: 239610434 Blast Desc: aldo/keto reductase [Ajellomyces dermatitidis ER-3]
  misc_feature (219)..(582): NCBI GI: 225563405 Blast Desc: aldo/keto reductase [Ajellomyces capsulatus G186AR]
  misc_feature (219)..(582): NCBI GI: 240107305 Blast Desc: general stress protein, [Coccidioides posadasii C735 delta SOWgp]
  misc_feature (9)..(582): NCBI GI: 156062750 Blast Desc: SS1G_01491 [Sclerotinia sclerotiorum 1980] gi|154696827|gb|EDN96565.1| SS1G_01491 [Sclerotinia sclerotiorum 1980]
  misc_feature (219)..(582): NCBI GI: 154282061 Blast Desc: [Ajellomyces capsulatus NAm1] gi|150412022|gb|EDN07410.1| [Ajellomyces capsulatus NAm1]
  misc_feature: Useful for introducing or modulating the production of volatile compounds
MAGFNDRRAKTAHVNMMTDTIINNMSPDGLRIMMRSLLASHPEITGTFEATTRIYIEENILSRIENQSSHTDSAKLKTIQQTLRCMLGCGLCYSALPLAAGLATQTFQLDRASLGLSEIDACKLLASIDGDIVQAITAVQKTLFVSTGVRELLDEEKVPLRNLLDSLESCCRFAQTTAVEFPYSRALSATASILGLPPPEDIDTYPGLDGIDAPVGISETFELKGRILPRLFSGLWQLSSPAWGSASTSKIFTQFSKYAKSGITAFDMADHYGDAEIIFLKGRFRSRYPYKDSIFAATKYCVFHPMTVTHEAVKENVSERCKRLGSEKIDLLQFHWQFYNDSHYLDALRYLAEDERVSALGLCNFDTDHLEAVINGGVEVHTNQVQFSLIDSRPTVRMGEVCKKHNIKLLTYGSLVRPKLHEDKGQSTHYFSQCGGFLAEKWLGKPEPDLYDESITPSQRKVSIAARNSHVIHADQSQYHGVIRSWGDWALFQELLSTLKSIGDKYGVSVSNVATRWVLDFPYVGAVIVGARMGVSEHTDENLASLGWSLDPEDGQSIDVVLNKSRRFDMFAAMGDCGGEYR

SEQ ID NO: 33263 - DNA, 2759 bp, Muscodor strobelii; identical to SEQ ID NO: 33260
  misc_feature: SGI EST ID NO. CUFF.78724.0
  misc_feature: Variant of the nucleotide sequence at SEQ ID NO 33261

SEQ ID NO: 33264 - DNA, 378 bp, Muscodor strobelii
  misc_feature: SGI cDNA ID NO. 571472
  misc_feature: Encodes the peptide sequence at SEQ ID NO 33265
atgagtgacggattcgagctctttgaccttcgcgtagaggtggtatgtccccctggacggagaatcatgtgcggagcaaaggagggggactactttaccctccagggcgaaatgctgttcttgccccctaaccagggaattagcatctacggcatgtataaaaagatcccgcgcgatgctgacgatgtatctattatagcatctgtgctgccattacttgcagcaaaacagcgagtaacatcgaagaatgattggatgacaacagatgcattgatcgcgtgccccgatcccaattgcccttcacaactcaagattattcgcgaaggcgtccggaagttcaaccattcagagacaacagcagtgccgttagaccaatga

SEQ ID NO: 33265 - protein, 125 aa, Muscodor strobelii
  misc_feature: SGI Peptide ID NO. 571472
  misc_feature (3)..(125): NCBI GI: 242773259 Blast Desc: conserved [Talaromyces stipitatus ATCC 10500] gi|218721823|gb|EED21241.1| conserved [Talaromyces stipitatus ATCC 10500]
  misc_feature (3)..(123): NCBI GI: 256720505 Blast Desc: NECHADRAFT_89023 [Nectria haematococca mpVI 77-13-4]
  misc_feature (3)..(122): NCBI GI: 170094905 Blast Desc: [Laccaria bicolor S238N-H82] gi|164645977|gb|EDR10223.1| [Laccaria bicolor S238N-H82]
  misc_feature (3)..(124): NCBI GI: 156062746 Blast Desc: SS1G_01489 [Sclerotinia sclerotiorum 1980] gi|154696825|gb|EDN96563.1| SS1G_01489 [Sclerotinia sclerotiorum 1980]
  misc_feature (3)..(123): NCBI GI: 260459972 Blast Desc: conserved [Mesorhizobium opportunistum WSM2075] gi|259034183|gb|EEW35441.1| conserved [Mesorhizobium opportunistum WSM2075]
  misc_feature (3)..(123): NCBI GI: 118592875 Blast Desc: SIAM614_29461 [Stappia aggregata IAM 12614] gi|118434645|gb|EAV41297.1| SIAM614_29461 [Stappia aggregata IAM 12614]
  misc_feature (3)..(125): NCBI GI: 84685681 Blast Desc: RB2654_06909 [Rhodobacterales bacterium HTCC2654] gi|84666347|gb|EAQ12820.1| RB2654_06909 [Rhodobacterales bacterium HTCC2654]
  misc_feature (3)..(123): NCBI GI: 13475980 Blast Desc: mlr7179 [Mesorhizobium loti MAFF303099] gi|14026740|dbj|BAB53336.1| mlr7179 [Mesorhizobium loti MAFF303099]
  misc_feature (3)..(122): NCBI GI: 254505268 Blast Desc: SADFL11_5308 [Labrenzia alexandrii DFL-11] gi|222441339|gb|EEE48018.1| SADFL11_5308 [Labrenzia alexandrii DFL-11]
  misc_feature (3)..(125): NCBI GI: 148553636 Blast Desc: Swit_0713 [Sphingomonas wittichii RW1] gi|148498826|gb|ABQ67080.1| Swit_0713 [Sphingomonas wittichii RW1]
MSDGFELFDLRVEVVCPPGRRIMCGAKEGDYFTLQGEMLFLPPNQGISIYGMYKKIPRDADDVSIIASVLPLLAAKQRVTSKNDWMTTDALIACPDPNCPSQLKIIREGVRKFNHSETTAVPLDQ

SEQ ID NO: 33266 - DNA, 403 bp, Muscodor strobelii
  misc_feature: SGI EST ID NO. CUFF.78727.0
  misc_feature: Variant of the nucleotide sequence at SEQ ID NO 33264
gtccaatcttgccctcttccagaagctctgcttcttagtagaacgcagtcgatagatttggggttaggttggggtatgatcctagcaagatccgagataagtaaagcttggtagaacgccagtcagtggccattgttaggtagccggcattacctaccttgcagttgggctaaatgtgtaaagacacaattcacaagagcattgaacttggccttgcttgtccagacatcagtctcattctcgtcctacgcaatgagtgacggattcgagctctttgaccttcgcgtagaggtggtatgtccccctggacggagaatcatgtgcggagcaaaggagggggactactttaccctccagggcgaaatgctgttcttgccccctaaccagggaattagcatctacg

SEQ ID NO: 33267 - DNA, 1596 bp, Muscodor strobelii
  misc_feature: SGI cDNA ID NO. 571473
  misc_feature: Encodes the peptide sequence at SEQ ID NO 33268
atggaggtatgcgccgacgacggcagccacacaggcgcagaatcagaatcagatgaagagatcaaacgagatctgcgatcccgacatataaacatgattgctattgcgggcatgattggtaccggcctttttctaagttccggaacagctattgcaacagcagggccggctggggctttgctcgcgtatattgttatgggctttgttaccgccggcatttcttataccacgggagaaataacggccttcatgcccacgacaggcggttttattcgtcacgcaactaagttcgttgaaccggcgctcggcgctgcgacgggatggaatttttggtacacaatggccatcaccgtgccagcggaaataagtgcagcggcaacagtaatacaattctggaaccgttgggtgaatcctggcgtgtggatcagcatattcctggccttcatcgtcgcattgaatttctgcggggtgaaattatacggggagtctgaagtcatattcgcgtctctgaaaatcatgttgattattggcctcattattggtggccttgtgatcgacttaggagggggcccgaatcacgaatatcttggctctcgttactggtatagtcccggagccttcaacacatacattaagacaggaccttctgggcgctttctagctttctttaagattttattgtcggctgcctttgcatacggaaatatccaggttgtggccatctcgggatctgagactcgaaacccgcggcgtatcattccctctgcaacgcgaaagacgttttttagagtattcgtgttttatgtgctgagtattctcattgttggcttgattgttcccttcgacgacgagagtctcagtatctctactggtacagcgcggcagtcacctttcgttatcgcgtttgtaaggtctggtgtctctgtagtcccgtcaatcatcaacgccgtagttgctacatcagctatctcgagtgggtcggcatgcattttcattgcttctagaacgctttacggtctaagtcgggatggccatgcgcctgccttgtttcaacggtgcaatcgatttggaacgcctcattacgcagtaggaatgacctgtctactgttgccactagtataccttaacgttggccacaatacaggagtcgtatttggctggttcgtcaacataactactgttgccggtctcatcggttggactgtgatcgaaattacatacattcgattccatacaggcctcagaattcaggggtattctcgaaatgatcttccatatcgtagtcccggtcaaccatacgtttcgtgggccacacttttagtggtgactgtcgttgtcctgttttccggcttcgatgttttcgttgctggacatttcactgctagcggatttctcaccatctatttgaacatcttcatttttgctgcgttgtatctgttcttcaagctgttcctccgttccagagtcatcccattagacgagctggatttcgagacggagtttgcgagtatcagacaatggaaagaacatttcgcacaacagcgagcatcagaaaatgctagaccatggtatcgcagaatgatacattggatttaa

SEQ ID NO: 33268 - protein, 531 aa, Muscodor strobelii
  misc_feature: SGI Peptide ID NO. 571473
  misc_feature (29)..(494): Pfam Id: PF00324 Pfam Desc: Amino acid permease
  misc_feature (10)..(521): NCBI GI: 242773264 Blast Desc: amino acid transporter, [Talaromyces stipitatus ATCC 10500] gi|218721824|gb|EED21242.1| amino acid transporter, [Talaromyces stipitatus ATCC 10500]
  misc_feature (15)..(521): NCBI GI: 212531541 Blast Desc: proline-specific permease, [Penicillium marneffei ATCC 18224] gi|210071291|gb|EEA25380.1| proline-specific permease, [Penicillium marneffei ATCC 18224]
  misc_feature (3)..(518): NCBI GI: 256720495 Blast Desc: NECHADRAFT_98279 [Nectria haematococca mpVI 77-13-4]
  misc_feature (6)..(423): NCBI GI: 115388169 Blast Desc: conserved [Aspergillus terreus NIH2624] gi|114195674|gb|EAU37374.1| conserved [Aspergillus terreus NIH2624]
  misc_feature (19)..(519): NCBI GI: 156062752 Blast Desc: SS1G_01492 [Sclerotinia sclerotiorum 1980] gi|154696828|gb|EDN96566.1| SS1G_01492 [Sclerotinia sclerotiorum 1980]
  misc_feature (9)..(317): NCBI GI: 154313071 Blast Desc: BC1G_05537 [Botryotinia fuckeliana B05.10] gi|150849622|gb|EDN24815.1| BC1G_05537 [Botryotinia fuckeliana B05.10]
  misc_feature (6)..(517): NCBI GI: 170084099 Blast Desc: amino acid permease [Laccaria bicolor S238N-H82] gi|164650825|gb|EDR15065.1| amino acid permease [Laccaria bicolor S238N-H82]
  misc_feature (2)..(518): NCBI GI: 1764098 Blast Desc: permease [Uromyces viciae-fabae]
  misc_feature (6)..(509): NCBI GI: 115383650 Blast Desc: ATEG_01007 [Aspergillus terreus NIH2624] gi|114196064|gb|EAU37764.1| ATEG_01007 [Aspergillus terreus NIH2624]
  misc_feature (6)..(522): NCBI GI: 145241436 Blast Desc: An09g00400 [Aspergillus niger] gi|134077902|emb|CAL00300.1| protein product [Aspergillus niger]
MEVCADDGSHTGAESESDEEIKRDLRSRHINMIAIAGMIGTGLFLSSGTAIATAGPAGALLAYIVMGFVTAGISYTTGEITAFMPTTGGFIRHATKFVEPALGAATGWNFWYTMAITVPAEISAAATVIQFWNRWVNPGVWISIFLAFIVALNFCGVKLYGESEVIFASLKIMLIIGLIIGGLVIDLGGGPNHEYLGSRYWYSPGAFNTYIKTGPSGRFLAFFKILLSAAFAYGNIQVVAISGSETRNPRRIIPSATRKTFFRVFVFYVLSILIVGLIVPFDDESLSISTGTARQSPFVIAFVRSGVSVVPSIINAVVATSAISSGSACIFIASRTLYGLSRDGHAPALFQRCNRFGTPHYAVGMTCLLLPLVYLNVGHNTGVVFGWFVNITTVAGLIGWTVIEITYIRFHTGLRIQGYSRNDLPYRSPGQPYVSWATLLVVTVVVLFSGFDVFVAGHFTASGFLTIYLNIFIFAALYLFFKLFLRSRVIPLDELDFETEFASIRQWKEHFAQQRASENARPWYRRMIHWI

SEQ ID NO: 33269 - DNA, 3470 bp, Muscodor strobelii
  misc_feature: SGI EST ID NO. CUFF.78717.0
  misc_feature: Variant of the nucleotide sequence at SEQ ID NO 33267
gcatgatctccgtcgaccggcgttcgttccaagggctccacccctccgcatgaaggacccgacctaaattaatcatggagggcttctcttatcgggtttgttgaattaagtcgcgatcagtctagacgaagcattgtcggtatgttagtctgctattttggttaccatcagttcgaggatactctgttgtgcttcattgcttgaattctaacttctttcgataccaatcaacgcgattgctgtgccaatccgccacccgattcgaatttcatggtatattgagaaaagcggaagtatggaggaaacggagaaacgcgcttttggcttcattggcggaccaaaaatggaggtatgcgccgacgacggcagccacacaggcgcagaatcagaatcagatgaagagatcaaacgagatctgcgatcccgacatataaacatgattgctattgcgggcatgattctattgcaacagcagggccggctggggctttgctcgcgtatattgttatgggctttgttaccgccggcatttcttataccacgggagaaataacggccttcatgcccacgacaggcggttttattcgtcacgcaactaagttcgttgaaccggcgctcggcgctgcgacgggatggaatttttggtacacaatggccatcaccgtgccagcggaaataagtgcagcggcaacagtaatacaattctggaaccgttgggtgaatcctggcgtgtggatcagcatattcctggccttcatcgtcgcattgaatttctgcggggtgaaattatacggggagtctgaagtcatattcgcgtctctgaaaatcatgttgattattggcctcattattggtggccttgtgatcgacttaggagggggcccgaatcacgaatatcttggctctcgttactggtatagtcccggagccttcaacacatacattaagacaggaccttctgggcgctttctagctttctttaagattttattgtcggctgcctttgcatacggaaatatccaggttgtggccatctcgggatctgagactcgaaacccgcggcgtatcattccctctgcaacgcgaaagacgttttttagagtattcgtgttttatgtgctgagtattctcattgttggcttgattgttcccttcgacgacgagagtctcagtatctctactggtacagcgcggcagtcacctttcgttatcgcgtttgtaaggtctggtgtctctgtagtcccgtcaatcatcaacgccgtagttgctacatcagctatctcgagtgggtcggcatgcattttcattgcttctagaacgctttacggtctaagtcgggatggccatgcgcctgccttgtttcaacggtgcaatcgatttggaacgcctcattacgcagtaggaatgacctgtctactgttgccactagtataccttaacgttggccacaatacaggagtcgtatttggctggttcgtcaacataactactgttgccggtctcatcggttggactgtgatcgaaattacatacattcgattccatacaggcctcagaattcaggggtattctcgaaatgatcttccatatcgtagtcccggtcaaccatacgtttcgtgggccacacttttagtggtgactgtcgttgtcctgttttccggcttcgatgttttcgttgctggacatttcactgctagcggatttctcaccatctatttgaacatcttcatttttgctgcgttgtatctgttcttcaagctgttcctccgttccagagtcatcccattagacgagctggatttcgagacggagtttgcgagtatcagacaatggaaagaacatttcgcacaacagcgagcatcagaaaatgctagaccatggtatcgcagaatgatacattggatttaaccagtactaggagggatatctacagatgagtaacatcattcgtgagacatccttgtctgcatacctcgtggatattgacatgactggctctcagcgagacgatgctgcttgaaagactacgatcagtagtgtcaaggcatagctgtatttagcaaataacttaagtaccacgtgtagtgtaatatttaaacttcagcctccttatattcagaccactccttgccgcgccaaaatttttggccacctctgaacgaatgttcaattctatcctttgctctatctgccatccgcttctcaaatcgtgcaagtgtatgctgtgttatgccctcttttgcgatcgtgtaagctaaatcggctgcgttgcggattgccgtatcggcgccggatcctcccattgggctcatggcatgcgctgcgtcgccaacaagtaagactcgacttgcctgaggagtcaattgaatgtcaggcttgcttgatgcgatgggtacgcaagccgatgagtcatatgaagcatgttcaagcattagtctcaatttgggatgccacgcttccgatacccttcgcaggaatgttctcttctcatcggcagtctttggaatttgtttagcatactgaaatggcgctgtgcagagagcgaaatataagtagtcgtcgaagtcaaaccgagtgagtttaccttccgatgcttcccttgcgctcttcgaccagctgatgggctcgacgatcgtttgaacattggcttcatagtccagatacatacaccatgtgagaatatcaggcgagagcttctccttcaaatcagctgtcaacagcgtccgaccccatatgatccaccgctccaagtcaagcattttgcgatctggttgaagctgctttcgtagtcggctccttataccatccgcgccgattaagagctgtccacgtacaaacgagccatccgtgaatctgacgtgaactgcttcttcaacagtctcgtaggattcaaactctttgccatactcaatgatgccatcaagactcaatgaaagcagttggcgtagccatgtcctgtcgattggcttgcccgttgcctctggatccactggtgttgggtcttcgtggtctaacttcttggcatcgacgtatcgcggttgaaagcgatttgcttcggccgccgtacttttcattaaagtccgaaggtcgggtgatagaatactatcgagagcttcttgtccatcttttgagatacgaaatcgatggccttgtgacttgtgtagtcgtgagtggcgttcaaagacccggcaagggatggaccggagacgtaagccttgagcgagtgtgaggccggcgacaccagcgccgataatcaggattggagattgaagtgtcatgactggcattcaagcataatgtggcaagcatttgaaattgatacaaatcatggtgttaaaatttgacaataacgtccatggtccgtgtttagcatgcagacaatagaaaccatcagacttaaactgtacattaagacaatacctcgaggccaatgagcaacctgttacagaaggttgtcagtggctctcgat

SEQ ID NO: 33270 - DNA, 1302 bp, Muscodor strobelii
  misc_feature: SGI cDNA ID NO. 571474
  misc_feature: Encodes the peptide sequence at SEQ ID NO 33271
atggaggtatgcgccgacgacggcagccacacaggcgcagaatcagaatcagatgaagagatcaaacgagatctgcgatcccgacatataaacatgattgctattgcgggcatgattggtaccggcctttttctaagttccggaacagctattgcaacagcagggccggctggggctttgctcgcgtatattgttatgggctttgttaccgccggcatttcttataccacgggagaaataacggccttcatgcccacgacaggcggttttattcgtcacgcaactaagttcgttgaaccggcgctcggcgctgcgacgggatggaatttttggtacacaatggccatcaccgtgccagcggaaataagtgcagcggcaacagtaatacaattctggaaccgttgggtgaatcctggcgtgtggatcagcatattcctggccttcatcgtcgcattgaatttctgcggggtgaaattatacggggagtctgaagtcatattcgcgtctctgaaaatcatgttgattattggcctcattattggtggccttgtgatcgacttaggagggggcccgaatcacgaatatcttggctctcgttactggtatagtcccggagccttcaacacatacattaagacaggaccttctgggcgctttctagctttctttaagattttattgtcggctgcctttgcatacggaaatatccaggttgtggccatctcgggatctgagactcgaaacccgcggcgtatcattccctctgcaacgcgaaagacgttttttagagtattcgtgttttatgtgctgagtattctcattgttggcttgattgttcccttcgacgacgagagtctcagtatctctactggtacagcgcggcagtcacctttcgttatcgcgtttgtaaggtctggtgtctctgtagtcccgtcaatcatcaacgccgtagttgctacatcagctatctcgaatcttccatatcgtagtcccggtcaaccatacgtttcgtgggccacacttttagtggtgactgtcgttgtcctgttttccggcttcgatgttttcgttgctggacatttcactgctagcggatttctcaccatctatttgaacatcttcatttttgctgcgttgtatctgttcttcaagctgttcctccgttccagagtcatcccattagacgagctggatttcgagacggagtttgcgagtatcagacaatggaaagaacatttcgcacaacagcgagcatcagaaaatgctagaccatggtatcgcagaatgatacattggatttaa

SEQ ID NO: 33271 - protein, 433 aa, Muscodor strobelii
  misc_feature: SGI Peptide ID NO. 571474
  misc_feature (29)..(396): Pfam Id: PF00324 Pfam Desc: Amino acid permease
  misc_feature (29)..(324): Pfam Id: PF00324 Pfam Desc: Amino acid permease
  misc_feature (326)..(396): Pfam Id: PF00324 Pfam Desc: Amino acid permease
  misc_feature (9)..(427): NCBI GI: 154313071 Blast Desc: BC1G_05537 [Botryotinia fuckeliana B05.10] gi|150849622|gb|EDN24815.1| BC1G_05537 [Botryotinia fuckeliana B05.10]
  misc_feature (6)..(325): NCBI GI: 115388169 Blast Desc: conserved [Aspergillus terreus NIH2624] gi|114195674|gb|EAU37374.1| conserved [Aspergillus terreus NIH2624]
  misc_feature (15)..(325): NCBI GI: 212531541 Blast Desc: proline-specific permease, [Penicillium marneffei ATCC 18224] gi|210071291|gb|EEA25380.1| proline-specific permease, [Penicillium marneffei ATCC 18224]
  misc_feature (10)..(325): NCBI GI: 242773264 Blast Desc: amino acid transporter, [Talaromyces stipitatus ATCC 10500] gi|218721824|gb|EED21242.1| amino acid transporter, [Talaromyces stipitatus ATCC 10500]
  misc_feature (3)..(325): NCBI GI: 256720495 Blast Desc: NECHADRAFT_98279 [Nectria haematococca mpVI 77-13-4]
  misc_feature (14)..(325): NCBI GI: 212539404 Blast Desc: amino acid permease, [Penicillium marneffei ATCC 18224] gi|210067156|gb|EEA21248.1| amino acid permease, [Penicillium marneffei ATCC 18224]
  misc_feature (6)..(324): NCBI GI: 170084099 Blast Desc: amino acid permease [Laccaria bicolor S238N-H82] gi|164650825|gb|EDR15065.1| amino acid permease [Laccaria bicolor S238N-H82]
  misc_feature (9)..(324): NCBI GI: 4468097 Blast Desc: amino acid transporter [Amanita muscaria]
  misc_feature (14)..(325): NCBI GI: 154308191 Blast Desc: BC1G_07841 [Botryotinia fuckeliana B05.10] gi|150852926|gb|EDN28118.1| BC1G_07841 [Botryotinia fuckeliana B05.10]
  misc_feature (6)..(325): NCBI GI: 145241436 Blast Desc: An09g00400 [Aspergillus niger] gi|134077902|emb|CAL00300.1| protein product [Aspergillus niger]
MEVCADDGSHTGAESESDEEIKRDLRSRHINMIAIAGMIGTGLFLSSGTAIATAGPAGALLAYIVMGFVTAGISYTTGEITAFMPTTGGFIRHATKFVEPALGAATGWNFWYTMAITVPAEISAAATVIQFWNRWVNPGVWISIFLAFIVALNFCGVKLYGESEVIFASLKIMLIIGLIIGGLVIDLGGGPNHEYLGSRYWYSPGAFNTYIKTGPSGRFLAFFKILLSAAFAYGNIQVVAISGSETRNPRRIIPSATRKTFFRVFVFYVLSILIVGLIVPFDDESLSISTGTARQSPFVIAFVRSGVSVVPSIINAVVATSAISNLPYRSPGQPYVSWATLLVVTVVVLFSGFDVFVAGHFTASGFLTIYLNIFIFAALYLFFKLFLRSRVIPLDELDFETEFASIRQWKEHFAQQRASENARPWYRRMIHWI

SEQ ID NO: 33272 - DNA, 3470 bp, Muscodor strobelii; identical to SEQ ID NO: 33269
  misc_feature: SGI EST ID NO. CUFF.78717.0
  misc_feature: Variant of the nucleotide sequence at SEQ ID NO 33270

SEQ ID NO: 33273 - DNA, 1185 bp, Muscodor strobelii
  misc_feature: SGI cDNA ID NO. 571475
  misc_feature: Encodes the peptide sequence at SEQ ID NO 33274
atgacacttcaatctccaatcctgattatcggcgctggtgtcgccggcctcacactcgctcaaggcttacgtctccggtccatcccttgccgggtctttgaacgccactcacgactacacaagtcacaaggccatcgatttcgtatctcaaaagatggacaagaagctctcgatagtattctatcacccgaccttcggactttaatgaaaagtacggcggccgaagcaaatcgctttcaaccgcgatacgtcgatgccaagaagttagaccacgaagacccaacaccagtggatccagaggcaacgggcaagccaatcgacaggacatggctacgccaactgctttcattgagtcttgatggcatcattgagtatggcaaagagtttgaatcctacgagactgttgaagaagcagttcacgtcagattcacggatggctcgtttgtacgtggacagctcttaatcggcgcggatggtataaggagccgactacgaaagcagcttcaaccagatcgcaaaatgcttgacttggagcggtggatcatatggggtcggacgctgttgacagctgatttgaaggagaagctctcgcctgatattctcacatggtgtatgtatctggactatgaagccaatgttcaaacgatcgtcgagcccatcagctggtcgaagagcgcaagggaagcatcggaaggtaaactcactcggtttgacttcgacgactacttatatttcgctctctgcacagcgccatttcagtatgctaaacaaattccaaagactgccgatgagaagagaacattcctgcgaagggtatcggaagcgtggcatcccaaattgagactaatgcttgaacatgcttcatatgactcatcggcttgcgtacccatcgcatcaagcaagcctgacattcaattgactcctcaggcaagtcgagtcttacttgttggcgacgcagcgcatgccatgagcccaatgggaggatccggcgccgatacggcaatccgcaacgcagccgatttagcttacacgatcgcaaaagagggcataacacagcatacacttgcacgatttgagaagcggatggcagatagagcaaaggatagaattgaacattcgttcagaggtggccaaaaattttggcgcggcaaggagtggtctgaatataaggaggctgaagtttaa

SEQ ID NO: 33274 - protein, 394 aa, Muscodor strobelii
  misc_feature: SGI Peptide ID NO. 571475
  misc_feature (4)..(373): Pfam Id: PF01494 Pfam Desc: FAD binding domain
  misc_feature (312)..(342): Pfam Id: PF01494 Pfam Desc: FAD binding domain
  misc_feature (4)..(40): Pfam Id: PF01494 Pfam Desc: FAD binding domain
  misc_feature (19)..(388): NCBI GI: 238842571 Blast Desc: cercosporin toxin biosynthesis protein [Microsporum canis CBS 113480]
  misc_feature (7)..(380): NCBI GI: 156053664 Blast Desc: SS1G_05679 [Sclerotinia sclerotiorum 1980] gi|154703460|gb|EDO03199.1| SS1G_05679 [Sclerotinia sclerotiorum 1980]
  misc_feature (17)..(390): NCBI GI: 66807967 Blast Desc: DDB_G0286363 [Dictyostelium discoideum AX4] gi|60466143|gb|EAL64206.1| DDB_G0286363 [Dictyostelium discoideum AX4]
  misc_feature (6)..(394): NCBI GI: 169611006 Blast Desc: SNOG_08612 [Phaeosphaeria nodorum SN15] gi|160702200|gb|EAT83780.2| SNOG_08612 [Phaeosphaeria nodorum SN15]
  misc_feature (7)..(379): NCBI GI: 256666455 Blast Desc: FAD-binding domain protein [Streptomyces sp. AA4]
  misc_feature (2)..(373): NCBI GI: 145611384 Blast Desc: MGG_00427 [Magnaporthe grisea 70-15] gi|145018681|gb|EDK02960.1| MGG_00427 [Magnaporthe grisea 70-15]
  misc_feature (19)..(379): NCBI GI: 169765924 Blast Desc: [Aspergillus oryzae RIB40] gi|238482537|ref|XP_002372507.1| conserved [Aspergillus flavus NRRL3357] gi|83765288|dbj|BAE55431.1| protein product oryzae]
  misc_feature (7)..(378): NCBI GI: 227368617 Blast Desc: FAD-binding monooxygenase [Chryseobacterium gleum ATCC 35910] gi|227108353|gb|EEI43343.1| FAD-binding monooxygenase [Chryseobacterium gleum ATCC 35910]
  misc_feature (6)..(391): NCBI GI: 90656022 Blast Desc: cercosporin toxin biosynthesis protein [Cercospora nicotianae]
  misc_feature (24)..(394): NCBI GI: 145258566 Blast Desc: An04g07370 [Aspergillus niger] gi|134074705|emb|CAK44737.1| protein product [Aspergillus niger]
  misc_feature (7)..(347): SWISSPROT Homolog: EC 1.14.13.90 Zeaxanthin epoxidase
MTLQSPILIIGAGVAGLTLAQGLRLRSIPCRVFERHSRLHKSQGHRFRISKDGQEALDSILSPDLRTLMKSTAAEANRFQPRYVDAKKLDHEDPTPVDPEATGKPIDRTWLRQLLSLSLDGIIEYGKEFESYETVEEAVHVRFTDGSFVRGQLLIGADGIRSRLRKQLQPDRKMLDLERWIIWGRTLLTADLKEKLSPDILTWCMYLDYEANVQTIVEPISWSKSAREASEGKLTRFDFDDYLYFALCTAPFQYAKQIPKTADEKRTFLRRVSEAWHPKLRLMLEHASYDSSACVPIASSKPDIQLTPQASRVLLVGDAAHAMSPMGGSGADTAIRNAADLAYTIAKEGITQHTLARFEKRMADRAKDRIEHSFRGGQKFWRGKEWSEYKEAEV

SEQ ID NO: 33275 - DNA, 657 bp, Muscodor strobelii
  misc_feature: SGI cDNA ID NO. 571476
  misc_feature: Encodes the peptide sequence at SEQ ID NO 33276
atgcctgctgacctaccggcggtcacgctggtagatgctagtgcctggtccacttggctgattggcaatgctgttgcatcgaaggggatctggctgaccctggcaaaaaagggcaccacggttccgacgtccctcacttatgcgcaggctctggatgaagccttatgccagggctggattgatggtcaggtacgtcgcagggacgagcacacttacgcccaacgcttcacgcctcgagcccctaagagtttatggtcccttcggaatgttgatcatatcgcacggctggagaaagaaggacgcgtgacggagctcggtcgagccgccgtaaattcagccaaggctgatggtcgatgggatgctgcgtatgctggacaggcgactgctgagcctccatcccaattccttgctgccattgcagccgtaccatcggctcaggccatgtgggatatactttcacggcagaaccgtttcgcgatatactttcgtcttaatgccctaaagaccgagactggcaaagaaaagcgcattgcggcgttcgtggatatgcttgctcggggagagactatctatccccagaagcagcaattgccgaagggaaacgctatcacaaccaaaccctcgagaagatcgacccggagatccaaaagatcttga

SEQ ID NO: 33276 - protein, 218 aa, Muscodor strobelii
  misc_feature: SGI Peptide ID NO. 571476
  misc_feature (1)..(201): NCBI GI: 163838853 Blast Desc: RSal33209_0088 [Renibacterium salmoninarum ATCC 33209] gi|162952329|gb|ABY21844.1| conserved [Renibacterium salmoninarum ATCC 33209]
  misc_feature (1)..(196): NCBI GI: 119960672 Blast Desc: AAur_0750 [Arthrobacter aurescens TC1] gi|119947531|gb|ABM06442.1| conserved [Arthrobacter aurescens TC1]
  misc_feature (1)..(196): NCBI GI: 220911509 Blast Desc: Achl_0732 [Arthrobacter chlorophenolicus A6] gi|219858387|gb|ACL38729.1| conserved [Arthrobacter chlorophenolicus A6]
  misc_feature (1)..(202): NCBI GI: 229821471 Blast Desc: Bcav_2990 [Beutenbergia cavernae DSM 12333] gi|229567384|gb|ACQ81235.1| conserved [Beutenbergia cavernae DSM 12333]
  misc_feature (1)..(199): NCBI GI: 159037666 Blast Desc: Sare_2061 [Salinispora arenicola CNS-205] gi|157916501|gb|ABV97928.1| conserved [Salinispora arenicola CNS-205]
  misc_feature (1)..(200): NCBI GI: 116669170 Blast Desc: Arth_0604 [Arthrobacter sp. FB24] gi|116609279|gb|ABK02003.1| conserved [Arthrobacter sp. FB24]
  misc_feature (3)..(194): NCBI GI: 238063648 Blast Desc: MCAG_04614 [Micromonospora sp. ATCC 39149] gi|237885459|gb|EEP74287.1| MCAG_04614 [Micromonospora sp. ATCC 39149]
  misc_feature (3)..(198): NCBI GI: 145595270 Blast Desc: Strop_2746 [Salinispora tropica CNB-440] gi|145304607|gb|ABP55189.1| conserved [Salinispora tropica CNB-440]
  misc_feature (4)..(194): NCBI GI: 270503888 Blast Desc: conserved [Micromonospora aurantiaca ATCC 27029] gi|270319263|gb|EFA30246.1| conserved [Micromonospora aurantiaca ATCC 27029]
  misc_feature (4)..(194): NCBI GI: 254390481 Blast Desc: conserved [Streptomyces clavuligerus ATCC 27064] gi|197704184|gb|EDY49996.1| conserved [Streptomyces clavuligerus ATCC 27064]
MPADLPAVTLVDASAWSTWLIGNAVASKGIWLTLAKKGTTVPTSLTYAQALDEALCQGWIDGQVRRRDEHTYAQRFTPRAPKSLWSLRNVDHIARLEKEGRVTELGRAAVNSAKADGRWDAAYAGQATAEPPSQFLAAIAAVPSAQAMWDILSRQNRFAIYFRLNALKTETGKEKRIAAFVDMLARGETIYPQKQQLPKGNAITTKPSRRSTRRSKRS

SEQ ID NO: 33277 - DNA, 1402 bp, Muscodor strobelii
  misc_feature: SGI EST ID NO. CUFF.78711.0
  misc_feature: Variant of the nucleotide sequence at SEQ ID NO 33275
attctggcttcgctgccttggcaccttgctagcacacagctctgtaatgggttagtctaaataaggtacctactctgtgcaccaccgaacatcccgtagcaggggcggctccttcttcgtagagccttctgcatatccacgaaacgcgaaaccgacgaagaatacgcgaagtctcatgattcttcaaattctcaagctttacatgcaaaatattgttcctagatgcctgctgacctaccggcggtcacgctggtagatgctagtgcctggtccacttggctgattggcaatgctgttgcatcgaaggggatctggctgaccctggcaaaaaagggcaccacggttccgacgtccctcacttatgcgcaggctctggatgaagccttatgccagggctggattgatggtcaggtacgtcgcagggacgagcacacttacgcccaacgcttcacgcctcgagcccctaagagtttatggtcccttcggaatgttgatcatatcgcacggctggagaaagaaggacgcgtgacggagctcggtcgagccgccgtaaattcagccaaggctgatggtcgatgggatgctgcgtatgctggacaggcgactgctgagcctccatcccaattccttgctgccattgcagccgtaccatcggctcaggccatgtgggatatactttcacggcagaaccgtttcgcgatatactttcgtcttaatgccctaaagaccgagactggcaaagaaaagcgcattgcggcgttcgtggatatgcttgctcggggagagactatctatccccagaagcagcaattgccgaagggaaacgctatcacaaccaaaccctcgagaagatcgacccggagatccaaaagatcttgacgacttaatcaataaatcaatgcatgctacagttccccggcttcgcaccccagaacaagtgtcattcgcttatcttgtgatacaacgatacgtgtggaaatctgcctttcacgactcttgcacggctgctgctaaagagactactttgaaatcacccttgacagacgtgagagataatggcgaattggtgttcaagttgtgaagtatgcgtcacccttgacattcgtgttaggggcaggaatcgcctgggcagatgttgaagcaggcgaaccaatgggcaatgaaagattcatttgatagttggtgggacttatttctattgtgtcctacacaaactctaatgacccgagaatcgcaatgactactaccgtttattgtactcttcactagtcggaaagcacaggagttgtttttaggtatctggaataggaatacctctagtactttcataaccgtatacgagagaggggtcggatgcacacgcatttcccgtctcgagttaaagaataaaacactataattc

SEQ ID NO: 33278 - DNA, 924 bp, Muscodor strobelii
  misc_feature: SGI cDNA ID NO. 571477
  misc_feature: Encodes the peptide sequence at SEQ ID NO 33279
atgcatacacttaccagcggacttgatgattaccctcgagcggaacctccgcatccaggagaactacatgtagatgcacttgcttgggttggagcagcggctgaggctctcaaacacactgctcagtacctcggagagagctctgaaatttacgataatcaaatagatgctatacgacataatctcgacgtgcttcattgggacccagatgaagcggcatactgtgatgctacgatcgacagtgaaggcacattctcaagagtctgtcacattgggtatctatctattcttcctttcgtattggggcacatgaacgagacccatccgaatttgcctgcagtccttgataaaatgtcagacccgaatacgcttctatcaccatatggattgcgtagtttaagtgcagccgatgcgaaatatggcaaggacgaagactactggcgtggtgctgtctggataaatatcaatgttctcgcagtcttgcgcttgaaaagtctcgggcccgggcccgttggatccagagcgcgtcgtctcgcgtcgatgttgcgtgagcgtacaatcaacacagtattccagagctgggaggacaccggctttttttgggagcagtacaatgacaggacgggcaatgggaaaggtagtagagcttttactggctggactgcatgtgtcatcctcttgatggggggaacatacagcggcgtgaccgatgtttctgatcattatctcctcactgagtggattgctgtccctgtcgcgtgtacggcacttctgggtctgggctcttttttcttcccaaatagagcacgcgctatttgggcgtcgatatcaaatcatgctctaagattgagccaggcgatatcaggcacgaactttgtgtatgaggaggttgtcaacctagacgaactatcaaatgagaactga

SEQ ID NO: 33279 - protein, 307 aa, Muscodor strobelii
  misc_feature: SGI Peptide ID NO. 571477
  misc_feature (2)..(232): Pfam Id: PF03200 Pfam Desc: Mannosyl oligosaccharide glucosidase
  misc_feature (1)..(228): NCBI GI: 145608028 Blast Desc: MGG_09721 [Magnaporthe grisea 70-15] gi|145015497|gb|EDK00034.1| MGG_09721 [Magnaporthe grisea 70-15]
  misc_feature (2)..(229): NCBI GI: 50556054 Blast Desc: YALI0F14927p [Yarrowia lipolytica] gi|49651305|emb|CAG78244.1| YALI0F14927p [Yarrowia lipolytica]
  misc_feature (1)..(228): NCBI GI: 67540872 Blast Desc: AN6606.2 [Aspergillus nidulans FGSC A4] gi|40738945|gb|EAA58135.1| AN6606.2 [Aspergillus nidulans FGSC A4] gi|259480185|tpe|CBF71085.1| TPA: mannosyl-oligosaccharide
  misc_feature (1)..(228): NCBI GI: 115386382 Blast Desc: ATEG_07046 [Aspergillus terreus NIH2624] gi|114190730|gb|EAU32430.1| ATEG_07046 [Aspergillus terreus NIH2624]
  misc_feature (2)..(228): NCBI GI: 256731508 Blast Desc: glycoside hydrolase family 63 [Nectria haematococca mpVI 77-13-4]
  misc_feature (1)..(228): NCBI GI: 169777113 Blast Desc: [Aspergillus oryzae RIB40] gi|83771759|dbj|BAE61889.1| protein product [Aspergillus oryzae]
  misc_feature (1)..(228): NCBI GI: 238494212 Blast Desc: mannosyl-oligosaccharide glucosidase, [Aspergillus flavus NRRL3357] gi|220694992|gb|EED51335.1| mannosyl-oligosaccharide glucosidase, [Aspergillus flavus
  misc_feature (1)..(228): NCBI GI: 145250337 Blast Desc: An15g01420 [Aspergillus niger] gi|134082201|emb|CAL00956.1| protein product [Aspergillus niger]
  misc_feature (1)..(229): NCBI GI: 169597437 Blast Desc: SNOG_01504 [Phaeosphaeria nodorum SN15] gi|111070033|gb|EAT91153.1| SNOG_01504 [Phaeosphaeria nodorum SN15]
  misc_feature (2)..(228): NCBI GI: 238840658 Blast Desc: glucosidase I [Microsporum canis CBS 113480]
  misc_feature (1)..(232): SWISSPROT Homolog: EC 3.2.1.106 Mannosyl-oligosaccharide glucosidase
MHTLTSGLDDYPRAEPPHPGELHVDALAWVGAAAEALKHTAQYLGESSEIYDNQIDAIRHNLDVLHWDPDEAAYCDATIDSEGTFSRVCHIGYLSILPFVLGHMNETHPNLPAVLDKMSDPNTLLSPYGLRSLSAADAKYGKDEDYWRGAVWININVLAVLRLKSLGPGPVGSRARRLASMLRERTINTVFQSWEDTGFFWEQYNDRTGNGKGSRAFTGWTACVILLMGGTYSGVTDVSDHYLLTEWIAVPVACTALLGLGSFFFPNRARAIWASISNHALRLSQAISGTNFVYEEVVNLDELSNEN

SEQ ID NO: 33280 - DNA, 2991 bp, Muscodor strobelii
  misc_feature: SGI EST ID NO. CUFF.78721.2
  misc_feature: Variant of the nucleotide sequence at SEQ ID NO 33278
ctacgacgcccctaaatgaagcttagttctccttccatgtctaccatcgattgaagaggccaccgtttatccttttgctgtccatggaaataaagtctgacatgttgtccccagacgatatatctcaagatgcaaactgttctacaccttctgctatgtgcgacattcgcagcttgtctgtcatgggcggtcagagatgatataccagcgcagcattcgggagtctggggcccctatcgaccaaatctatacttcgggctacgcccgcaaataccagaaacgcttctcgtagggttgatgtgggcgaatggaaatagcattgaaagcatgcttcaaacgctgcgagatacgtgtgagcaagatgacggtatggaaggctacggctggagtgtgtatgatgctcattctggggccatccagactatacatgacagaaatctccacctcgacttggatacagaattctataagaatgggactggctggggtgttcgcatctccgggaacctccggcaagattctccgccaagtttgaagacatcgttggttttccatctggctctcgaacactccaaaatcgcgaaagggaaatcattggcttgcgaaaatgatgctacaaatgatgatggatccagcctacctgccgctcgatgctacggtcacgatccgtcgcttggatcgtttgagtttcgtgtccacggagtagcgaggaataaaatgattcgaggagtcggtgtgataaggcagacggtgcccgaggatcggatttggcaggcgaagagtaagaaatgagattgccaacgaactcgatatcaatcgactgatactgttcaatcctcttcaggcgtattttcggaaacgatgagcgataatagagatgacagaacagacgacgcgtcgtctcgtcaatcacctgtaacaggaaatatgcacttcatccaagccactttcgaaggcccatttcaactatatgtattctacaaacaagacaacgatatgcacctcaaagcggagcagcttgaccggtcgttacgcgtgcttcgctccgaattcctagagaaaacccggcgggtatttccgcatacagcgccctttctgcatcgaaaatacacgggattcacacagtctgctgtctcaaacctgttaggtgggcatggagttttctatggcggtagccgagttgattactcgcacgcgcccgaatatgaagaagtcgatcttgacttctgggagcagtctgcagccgctatgaaacacgcggaaatcactacgacgaaatcaacttctctaataacccacgtgccttcaagacccttcttccctcgagggttcctctgggatgaaggcttccacctactgccgattattgagtgggacctggatctcgctgtttcggtactcaggagttggttcagccttatggatgacgacggctggatcgcacgggagcagattcttggccccgaagcgcgaagcaaagtgcctgaacagtttcaagttcaatatcctcattttgccaaccctcccaccttgataatgcttttatcggttatcgtctcgaaattgaaagatgggacggagtacaggggtcgggaatctgactttctcgcggcaccccaagaagcacgaacaatactcaaggagatttacgatctcgcttcacgacactacagttgattccgtcgaactcaatccggaaatctcacaggatttgcccggcccgagcaggcaaatacagaaggctaccgttggagaggtcgcactccaatgcatacacttaccagcggacttgatgattaccctcgagcggaacctccgcatccaggagaactacatgtagatgcacttgcttgggttggagcagcggctgaggctctcaaacacactgctcagtacctcggagagagctctgaaatttacgataatcaaatagatgctatacgacataatctcgacgtgcttcattgggacccagatgaagcggcatactgtgatgctacgatcgacagtgaaggcacattctcaagagtctgtcacattgggtatctatctattcttcctttcgtattggggcacatgaacgagacccatccgaatttgcctgcagtccttgataaaatgtcagacccgaatacgcttctatcaccatatggattgcgtagtttaagtgcagccgatgcgaaatatggcaaggacgaagactactggcgtggtgctgtctggataaatatcaatgttctcgcagtcttgcgcttgaaaagtctcgggcccgggcccgttggatccagagcgcgtcgtctcgcgtcgatgttgcgtgagcgtacaatcaacacagtattccagagctgggaggacaccggctttttttgggagcagtacaatgacaggacgggcaatgggaaaggtagtagagcttttactggctggactgcatgtgtcatcctcttgatggggggaacatacagcggcgtgaccgatgtttctgatcattatctcctcactgagtggattgctgtccctgtcgcgtgtacggcacttctgggtctgggctcttttttcttcccaaatagagcacgcgctatttgggcgtcgatatcaaatcatgctctaagattgagccaggcgatatcaggcacgaactttgtgtatgaggaggttgtcaacctagacgaactatcaaatgagaactgaagcttgatgaatgggttctcgaagccgcccagtatgccatgacactgtttgtgccggccatctctgttctggctccggtgaggccgggttggccatgggagcttggaatcgaatgactccggaagcttatgaatagaatagataactttggtattattggtcaattagaccggtgaattgacagcgagcgacgcgtttgtatcgcatatacatctcaactgtgatagggcaccacgagtagagtcggtccgtgtattctagagaatggcaggctgatcgtacagttcggcttgaatttgc

SEQ ID NO: 33281 - DNA, 1305 bp, Muscodor strobelii
  misc_feature: SGI cDNA ID NO. 571478
  misc_feature: Encodes the peptide sequence at SEQ ID NO 33282
atgcaaactgttctacaccttctgctatcgctgcgagatacgtgtgagcaagatgacggtatggaaggctacggctggagtgtgtatgatgctcattctggggccatccagactatacatgacagaaatctccacctcgacttggatacagaattctataagaatgggactggctggggtgttcgcatctccgggaacctccggcaagattctccgccaagtttgaagacatcgttggttttccatctggctctcgaacactccaaaatcgcgaaagggaaatcattggcttgcgaaaatgatgctacaaatgatgatggatccagcctacctgccgctcgatgctacggtcacgatccgtcgcttggatcgtttgagtttcgtgtccacggagtagcgaggaataaaatgattcgaggagtcggtgtgataaggcagacggtgcccgaggatcggatttggcaggcgaagagcgtattttcggaaacgatgagcgataatagagatgacagaacagacgacgcgtcgtctcgtcaatcacctgtaacaggaaatatgcacttcatccaagccactttcgaaggcccatttcaactatatgtattctacaaacaagacaacgatatgcacctcaaagcggagcagcttgaccggtcgttacgcgtgcttcgctccgaattcctagagaaaacccggcgggtatttccgcatacagcgccctttctgcatcgaaaatacacgggattcacacagtctgctgtctcaaacctgttaggtgggcatggagttttctatggcggtagccgagttgattactcgcacgcgcccgaatatgaagaagtcgatcttgacttctgggagcagtctgcagccgctatgaaacacgcggaaatcactacgacgaaatcaacttctctaataacccacgtgccttcaagacccttcttccctcgagggttcctctgggatgaaggcttccacctactgccgattattgagtgggacctggatctcgctgtttcggtactcaggagttggttcagccttatggatgacgacggctggatcgcacgggagcagattcttggccccgaagcgcgaagcaaagtgcctgaacagtttcaagttcaatatcctcattttgccaaccctcccaccttgataatgcttttatcggttatcgtctcgaaattgaaagatgggacggagtacaggggtcgggaatctgactttctcgcggcaccccaagaagcacgaacaatactcaaggagatttacgatctcgcttcacgacactacagttga

SEQ ID NO: 33282 - protein, 434 aa, Muscodor strobelii
  misc_feature: SGI Peptide ID NO. 571478
  misc_feature (188)..(399): Pfam Id: PF03200 Pfam Desc: Mannosyl oligosaccharide glucosidase
  misc_feature (10)..(130): Pfam Id: PF03200 Pfam Desc: Mannosyl oligosaccharide glucosidase
  misc_feature (6)..(434): NCBI GI: 145608028 Blast Desc: MGG_09721 [Magnaporthe grisea 70-15] gi|145015497|gb|EDK00034.1| MGG_09721 [Magnaporthe grisea 70-15]
  misc_feature (10)..(433): NCBI GI: 240111826 Blast Desc: glucosidase I, [Coccidioides posadasii C735 delta SOWgp]
  misc_feature (10)..(433): NCBI GI: 119173426 Blast Desc: CIMG_10187 [Coccidioides immitis RS]
  misc_feature (11)..(433): NCBI GI: 239614608 Blast Desc: mannosyl-oligosaccharide glucosidase [Ajellomyces dermatitidis ER-3]
  misc_feature (11)..(433): NCBI GI: 261196225 Blast Desc: mannosyl-oligosaccharide glucosidase [Ajellomyces dermatitidis SLH14081] gi|239587649|gb|EEQ70292.1| mannosyl-oligosaccharide glucosidase [Ajellomyces dermatitidis
  misc_feature (10)..(433): NCBI GI: 121703762 Blast Desc: mannosyl-oligosaccharide glucosidase, [Aspergillus clavatus NRRL 1] gi|119398289|gb|EAW08719.1| mannosyl-oligosaccharide glucosidase, [Aspergillus clavatus NRRL
  misc_feature (12)..(433): NCBI GI: 225683876 Blast Desc: mannosyl-oligosaccharide glucosidase [Paracoccidioides brasiliensis Pb03]
  misc_feature (1)..(433): NCBI GI: 116198099 Blast Desc: CHGG_07205 [Chaetomium globosum CBS 148.51] gi|88178484|gb|EAQ85952.1| CHGG_07205 [Chaetomium globosum CBS 148.51]
  misc_feature (10)..(433): NCBI GI: 238840658 Blast Desc: glucosidase I [Microsporum canis CBS 113480]
  misc_feature (10)..(433): NCBI GI: 226293262 Blast Desc: glucosidase I [Paracoccidioides brasiliensis Pb18]
  misc_feature (11)..(433): SWISSPROT Homolog: EC 3.2.1.106 Mannosyl-oligosaccharide glucosidase
MQTVLHLLLSLRDTCEQDDGMEGYGWSVYDAHSGAIQTIHDRNLHLDLDTEFYKNGTGWGVRISGNLRQDSPPSLKTSLVFHLALEHSKIAKGKSLACENDATNDDGSSLPAARCYGHDPSLGSFEFRVHGVARNKMIRGVGVIRQTVPEDRIWQAKSVFSETMSDNRDDRTDDASSRQSPVTGNMHFIQATFEGPFQLYVFYKQDNDMHLKAEQLDRSLRVLRSEFLEKTRRVFPHTAPFLHRKYTGFTQSAVSNLLGGHGVFYGGSRVDYSHAPEYEEVDLDFWEQSAAAMKHAEITTTKSTSLITHVPSRPFFPRGFLWDEGFHLLPIIEWDLDLAVSVLRSWFSLMDDDGWIAREQILGPEARSKVPEQFQVQYPHFANPPTLIMLLSVIVSKLKDGTEYRGRESDFLAAPQEARTILKEIYDLASRHYS

SEQ ID NO: 33283 - DNA, 2991 bp, Muscodor strobelii; identical to SEQ ID NO: 33280
  misc_feature: SGI EST ID NO. CUFF.78721.2
  misc_feature: Variant of the nucleotide sequence at SEQ ID NO 33281

SEQ ID NO: 33284 - DNA, 768 bp, Muscodor strobelii
  misc_feature: SGI cDNA ID NO. 571479
  misc_feature: Encodes the peptide sequence at SEQ ID NO 33285
atgcctaattcgcggacgaataatgccacacgatcgtcaatcaatcggttcagcctcttcgctgaaggagtctttaagaatgtttacgagggtcaatacaccagaggtgcaagagctggccagcgatgcgtttctaaggtgttcaagaagggctccgtttatgaagatttctatttccaagaggaaatgaacatcattcatcgcacgcagaaagtgatcagcactgatatctttgtaatgtttgtcattattagtattgacaactgggacgacgctgggtttatcaacaaacgcattctcctcaacacgccagagatctgggaattcgaagcagatggcgagaaaaacttggtcgagcccatgattgagaacttcgagaaattcaacagcaatactggctgggctagcaacggtatttggggtgaagtaatgcaggctttgagccacttttcgtaccacaattctggaggtcaatttctactttgtgatcttcaaggcggttcatactcggacggatatatattgtctgatcctgtcatcatgtcgcagcagcagagctatggtccaaccgacctaggtgccgacggaattcgatccttcttccagcgacatcgttgcaaccaattctgtagacaggagtggcaaatgcccagatatcagggcaaagctaaatttccgatgagaatgggcacaaccatgatgtctccagcatatttgccgaccagagcaagccgcaaccaactcacacataacgtcatccacgaataa

SEQ ID NO: 33285 - protein, 255 aa, Muscodor strobelii
  misc_feature: SGI Peptide ID NO. 571479
  misc_feature (1)..(210): Pfam Id: PF02816 Pfam Desc: Alpha-kinase family
  misc_feature (118)..(210): Pfam Id: PF02816 Pfam Desc: Alpha-kinase family
  misc_feature (1)..(249): NCBI GI: 39948396 Blast Desc: MGG_08681 [Magnaporthe grisea 70-15] gi|145009634|gb|EDJ94290.1| [Magnaporthe grisea 70-15]
  misc_feature (1)..(249): NCBI GI: 154317888 Blast Desc: BC1G_02927 [Botryotinia fuckeliana B05.10] gi|150843585|gb|EDN18778.1| BC1G_02927 [Botryotinia fuckeliana B05.10]
  misc_feature (1)..(249): NCBI GI: 156050157 Blast Desc: SS1G_07665 [Sclerotinia sclerotiorum 1980] gi|154692066|gb|EDN91804.1| SS1G_07665 [Sclerotinia sclerotiorum 1980]
  misc_feature (5)..(249): NCBI GI: 242816868 Blast Desc: elongation factor 2 kinase, [Talaromyces stipitatus ATCC 10500] gi|218713299|gb|EED12723.1| elongation factor 2 kinase, [Talaromyces stipitatus ATCC 10500]
  misc_feature (5)..(234): NCBI GI: 169782203 Blast Desc: [Aspergillus oryzae RIB40] gi|83774307|dbj|BAE64431.1| protein product [Aspergillus oryzae]
  misc_feature (20)..(249): NCBI GI: 258577957 Blast Desc: conserved [Uncinocarpus reesii 1704] gi|237903426|gb|EEP77827.1| conserved [Uncinocarpus reesii 1704]
  misc_feature (5)..(245): NCBI GI: 116193257 Blast Desc: CHGG_06346 [Chaetomium globosum CBS 148.51] gi|88182259|gb|EAQ89727.1| CHGG_06346 [Chaetomium globosum CBS 148.51]
  misc_feature (20)..(234): NCBI GI: 212544546 Blast Desc: elongation factor 2 kinase, [Penicillium marneffei ATCC 18224] gi|210065396|gb|EEA19490.1| elongation factor 2 kinase, [Penicillium marneffei ATCC 18224]
  misc_feature (40)..(245): NCBI GI: 256725326 Blast Desc: NECHADRAFT_83092 [Nectria haematococca mpVI 77-13-4]
  misc_feature (7)..(245): NCBI GI: 119178941 Blast Desc: CIMG_08269 [Coccidioides immitis RS]
MPNSRTNNATRSSINRFSLFAEGVFKNVYEGQYTRGARAGQRCVSKVFKKGSVYEDFYFQEEMNIIHRTQKVISTDIFVMFVIISIDNWDDAGFINKRILLNTPEIWEFEADGEKNLVEPMIENFEKFNSNTGWASNGIWGEVMQALSHFSYHNSGGQFLLCDLQGGSYSDGYILSDPVIMSQQQSYGPTDLGADGIRSFFQRHRCNQFCRQEWQMPRYQGKAKFPMRMGTTMMSPAYLPTRASRNQLTHNVIHE

SEQ ID NO: 33286 - DNA, 1864 bp, Muscodor strobelii
  misc_feature: SGI EST ID NO. CUFF.78729.0
  misc_feature: Variant of the nucleotide sequence at SEQ ID NO 33284
gcgcagctaagtttcttatcatcgtgtatcactggcgtttagttgcactggaaagcttcgatgatgatgttaagaatgtacttgttggaatatacatacatgtacccagtcttgacgaacaggccaggcacggctgtcgcttatagcaacgaggacagtgtacggtacgctaatttgcctacctaggttcccggggcaagccacatgggccgccctggtaattgacggcagattgctttgatactgtttcagctgtaacactgcaaacgcggacttgggtaaaacgtcgaagtttgccatatgcccctgcaccatcaagcaagctgttatttcgtcttttgcaaagcttccttgagcagtaccagcttccatcatgcctaattcgcggacgaataatgccacacgatcgtcaatcaatcggttcagcctcttcgctgaaggagtctttaagaatgtttacgagggtcaatacaccagaggtgcaagagctggccagcgatgcgtttctaaggtgttcaagaagggctccgtttatgaagatttctatttccaagaggaaatgaacatcattcatcgcacgcagaaagtggtatgtcgaaagagacgctgcacgagtcattggtcaacctcattctttgtgatatagatcagcactgatatctttgtagtgagtcatcttcatgtttgatactgagacaccaacctgcttcgccaggcccattttatcattaggtctgaatttgagcaatcatgaaaaaacatgactgataagagatgtttgtcattattagtattgacaactgggacgacgctgggtttatcaacaaacgcattctcctcaacacgccagagatctgggaattcgaagcagatggcgagaaaaacttggtcgagcccatgattgagaacttcgagaaattcaacagcaatactggctgggctagcaacggtatttggggtgaagtaatgcaggctttgagccacttttcgtaccacaattctggaggtcaatttctactttgtgatcttcaaggcggttcatactcggacggatatatattgtctgatcctgtcatcatgtcgcagcagcagagctatggtccaaccgacctaggtgccgacggaattcgatccttcttccagcgacatcgttgcaaccaattctgtagacaggagtggcaaatgcccagatatcagggcaaagctaaatttccgatgagaatgggcacaaccatgatgtctccagcatatttgccgaccagagcaagccgcaaccaactcacacataacgtcatccacgaataagaaagagtgttgctatcaagccagcagaagcagagagatgctagcaaaaacaaaacttacgcgtcctgtttgggatattgtatcttatcaatttcagcgcgtccagctaatccttcgcgtatgtgtttgcgattttgttctcgtaccattgctatggtagtggcggatcgttccctagggggcgcctctcatggatattagggatacgtgggcacattcagcatggacagtacctgagccctcagtctgctgttcatagtgcctatttccttattcaagatgcgtgggcattcgaccctcctttcgtatacaataggtggctatacaattcgtgcagtattgggtgtacagtggaaagtatataggttctgccacaaagtggcccgcttattcggattaccacctgagggaatgtgatacgctctagggagcatgatacaggggctcaggtgtgtatatatacgagttttattcactggtttattcggaagacagttagaaagtcaccccgccattactcttcctacatgagcgattataacacttccgtaagcttcca

SEQ ID NO: 33287 - DNA, 3003 bp, Muscodor strobelii
  misc_feature: SGI cDNA ID NO. 571480
  misc_feature: Reduced expression when VOC is produced
  misc_feature: Encodes the peptide sequence at SEQ ID NO 33288
ctgctcctcggcatcgccaagacgggcaacgagcacatgaccatggccgtcttcgacatcttcgagatgatcttcgagggcatggccggcgagctggcatcggccaagctgccgcgcctcctggagatcatctccgagatgcgccccgccacccaggacacccagctgctgcccccgtggatcgccatcctgtcgcgcggatatgatgtctcggcccagatcgagcccgacgagaccttccagaagctgccggccctcttcaccctgatcgccgagttcatgtcctcgccgtcatacaacatccgcgtctccgcttccgagtgcctgatctccttcgtcgccaactgcatcccggaacaagtcatcatcgaaccctccatctacgacgagaagacgctggacaaagtcgtcagggtcgccgagggccttctcggggtcaagtaccaggcggcgtggatggagactttcagcgttcttggcgccatgttcgacgcactgaaatggcaagccaaccccagcatggtcaatatcgctaagaccatcggagagatccgaggcaacgactcgttcaccggcaagaaacaggcagacgagattcttggtagagccatccgcgctatgggaccggaagcagtcctctctgtgctcccgctcaacctcgccaagccagtgcccggacaggtcggcagggcgtggatgctaccgatcctgcgagactacacgtgcaacactaatctccagcatttccgtgacgaatttgtaccgctcagtgaggccatgtttcagcgcgtactcgatcatggagacgcggccaaaacgatggaggtcaagatatatgagactctggttcaccagatttggtctttacttcctgggtattgcgaccttccgcttgatctccagactgccttcggccaaaccttggcagagatgctggccaatcttttgtacaagcaggtggatctgaggctcgacgtgtgccgcgctctgaaaacacttgtcgagtcaaatcaggcaatcgcagcaatcgaagatggcgaaaacccgcttctccacagccgagtgaccaaagctgatgctgaaaagaatctggtctacttgggaggatttgccggaaacattctggctgttttgttcaacgtttacggtcaaacactgcctcagaaccgcggccccatcttgcagacaataaatgcctatctcagcatcacccctgagaaagaacttggcgacacgttcgatcgtgtcagcaccatgcttgctactgctttcagtgagtcaggcgaacaaggaggtaaagcgaaggcgcagaaatcgcaagataagatgccatctacaagccagaccttgatggacctagtcattaccatggctgtctacctgccgcgtcaaagcttcggccctctctttaatatcgcacgacttgtcatcatgcaagacgacgatgcacagttgcaaaagaaagcgtacaagctgatcccgaggcttgctgattcgaagaccgggaaaactgcgcttcaggagcaacactccgaactgcaaactttgatcctctccagtgcggagaaggtttcgggccctgctcggcgtgaacgattgtccgccatggctgcgctcgtacagctcattcccgacgattcgctgcactttattccgtccatcctgtccgaagtcgtgatctgctgcaaagagaccaatgaaaaggctaggaatatcgcctacgacctgttggtactgatgggcaagaagctggccgacagcaaaggctggcagatcgacaacagtaaagtcccacacatgcctgacgatgcggcgtccgtttcggcaagcattgaggagttcttcaccatggtgagtgccgggctagctggaagtacaccgcatatgatctctgcctcgattacagctctcactcgaatactctacgagttccgcgagtctttacaggaagaggtgctgagcgatcttgtccagaccatggacctcttcttaacctcaaacaatagagagatagtgaagagtgttctaggcttcgtcaaagtttgtgtggtcagcttgccgactgatatgatgcttccccgtcttccatctatgataccgaacctcatggtttggtctcacgaacacaagggccacttcaaagccaaagtcaagcatattctagagagaatggtccgacgctttggctttgaacctgtcaataagagctgccccgaagcggataggaagttgttgaccaatatccggaagaccaaagagcgcagcaagcgaaaacgtgatgccgccaaatctgatggaaacgaagaagaggcagatgaacagcgggagaagcgacgcagccgcttcgagagtcaatatgacgaggctctatatagcagtgacgaatcggatgcgtcggctgactccgatgtcgatatgtcgggcaaagctgggagatcgaagagacgaggtgacgcatatatcatggaggatgaagatgagcctctcgatctcttggaccgcaacgctttggctagcatttcttcaacaaaacccgggaagctacgcaaagctagtaggaccaagatgaagaccgacttggacgggaaactcatcttgggcgaagatggtgaaatcgaagatgatgctatggtcatcgacacccctggcgacgaagagagcagtggcgtcggtgcatatgtcgcggcactcaaaggcagagatgccgggagaaggggccggggcgggcgtctgaagttttccaacaagcgagggcaaagtgaccatgaagaggaggacgaaatggacgtcgacgaccaagaggtgtcaacgataaagaagcagatcaacaagaacagaggtggtggctctcacagaggccgtggtgataggggcggtggccgcagcggcaggggcggcatagcctctggccgacgtggacttggtgaggacaagaggaaaggatctggagatggatttggtggcgggaaggtccacaagcccaaatcaccaagggctagatag

SEQ ID NO: 33288 - protein, 1000 aa, Muscodor strobelii
  misc_feature: SGI Peptide ID NO. 571480
  misc_feature (136)..(334): Pfam Id: PF08161 Pfam Desc: NUC173 domain
  misc_feature (1)..(917): NCBI GI: 116204877 Blast Desc: CHGG_10322 [Chaetomium globosum CBS 148.51] gi|88176450|gb|EAQ83918.1| CHGG_10322 [Chaetomium globosum CBS 148.51]
  misc_feature (1)..(916): NCBI GI: 85082271 Blast Desc: NCU01675 [Neurospora crassa OR74A] gi|7800806|emb|CAB91265.1| conserved [Neurospora crassa] gi|28917961|gb|EAA27645.1| conserved [Neurospora crassa OR74A]
  misc_feature (1)..(990): NCBI GI: 46109342 Blast Desc: FG01553.1 [Gibberella zeae PH-1]
  misc_feature (1)..(990): NCBI GI: 256730777 Blast Desc: [Nectria haematococca mpVI 77-13-4]
  misc_feature (1)..(923): NCBI GI: 171689032 Blast Desc: protein product [Podospora anserina] gi|170944478|emb|CAP70589.1| protein product [Podospora anserina]
  misc_feature (1)..(955): NCBI GI: 154299549 Blast Desc: BC1G_10737 [Botryotinia fuckeliana B05.10] gi|150857229|gb|EDN32421.1| BC1G_10737 [Botryotinia fuckeliana B05.10]
  misc_feature (1)..(919): NCBI GI: 156030810 Blast Desc: SS1G_14344 [Sclerotinia sclerotiorum 1980] gi|154700735|gb|EDO00474.1| SS1G_14344 [Sclerotinia sclerotiorum 1980]
  misc_feature (1)..(997): NCBI GI: 189200106 Blast Desc: ribosomal RNA-processing protein 12 [Pyrenophora tritici-repentis Pt-1C-BFP] gi|187983489|gb|EDU48977.1| ribosomal RNA-processing protein 12 [Pyrenophora tritici-repentis
  misc_feature (1)..(1000): NCBI GI: 169609036 Blast Desc: SNOG_07603 [Phaeosphaeria nodorum SN15] gi|111063949|gb|EAT85069.1| SNOG_07603 [Phaeosphaeria nodorum SN15]
  misc_feature (1)..(998): NCBI GI: 145610553 Blast Desc: MGG_01123 [Magnaporthe grisea 70-15] gi|145017912|gb|EDK02191.1| MGG_01123 [Magnaporthe grisea 70-15]
  misc_feature: Useful for introducing or modulating the production of volatile compounds
LLLGIAKTGNEHMTMAVFDIFEMIFEGMAGELASAKLPRLLEIISEMRPATQDTQLLPPWIAILSRGYDVSAQIEPDETFQKLPALFTLIAEFMSSPSYNIRVSASECLISFVANCIPEQVIIEPSIYDEKTLDKVVRVAEGLLGVKYQAAWMETFSVLGAMFDALKWQANPSMVNIAKTIGEIRGNDSFTGKKQADEILGRAIRAMGPEAVLSVLPLNLAKPVPGQVGRAWMLPILRDYTCNTNLQHFRDEFVPLSEAMFQRVLDHGDAAKTMEVKIYETLVHQIWSLLPGYCDLPLDLQTAFGQTLAEMLANLLYKQVDLRLDVCRALKTLVESNQAIAAIEDGENPLLHSRVTKADAEKNLVYLGGFAGNILAVLFNVYGQTLPQNRGPILQTINAYLSITPEKELGDTFDRVSTMLATAFSESGEQGGKAKAQKSQDKMPSTSQTLMDLVITMAVYLPRQSFGPLFNIARLVIMQDDDAQLQKKAYKLIPRLADSKTGKTALQEQHSELQTLILSSAEKVSGPARRERLSAMAALVQLIPDDSLHFIPSILSEVVICCKETNEKARNIAYDLLVLMGKKLADSKGWQIDNSKVPHMPDDAASVSASIEEFFTMVSAGLAGSTPHMISASITALTRILYEFRESLQEEVLSDLVQTMDLFLTSNNREIVKSVLGFVKVCVVSLPTDMMLPRLPSMIPNLMVWSHEHKGHFKAKVKHILERMVRRFGFEPVNKSCPEADRKLLTNIRKTKERSKRKRDAAKSDGNEEEADEQREKRRSRFESQYDEALYSSDESDASADSDVDMSGKAGRSKRRGDAYIMEDEDEPLDLLDRNALASISSTKPGKLRKASRTKMKTDLDGKLILGEDGEIEDDAMVIDTPGDEESSGVGAYVAALKGRDAGRRGRGGRLKFSNKRGQSDHEEEDEMDVDDQEVSTIKKQINKNRGGGSHRGRGDRGGGRSGRGGIASGRRGLGEDKRKGSGDGFGGGKVHKPKSPRAR

SEQ ID NO: 33289 - DNA, 684 bp, Muscodor strobelii
  misc_feature: SGI cDNA ID NO. 571481
  misc_feature: Encodes the peptide sequence at SEQ ID NO 33290
atggcgaacccactcgatacagatgccggctccgagctgttcagcagctacgaagccgaattcaagctcgtcggcgcagatctgacgcagaagctggaccagatcgccgagctggccggcgagccccggaaggccgccatcaaccaggctgagcgcgccctcgaggaggcagaagagctgctgggacaaatgcgcatcgagaagcagaacatcccctccgcgaaccgaaacaaggtcaacatgcgcctccgcaacttcgaatccgacgtcgacaaggccaagcgcaagctccgaacgctcgggaccgacagcgcagccacgtacggccgatacaccgacgacccggacgcccagccctccgacgcccagctagagcagcgacagcagctgctggcgggcaccgaccgtctcgaccgctcgacccagcgtctcagatcctcccaggccctcgccgaagagacggaagctatcggcgcctcgacgctttccgatctgtaccagcagcgcgagactctgcagcatactagtgagatgctgtacgagagcgagggctacgtcgatcgcagcgtcaagacgttgagggggatggcgcgtaggatggctacgaatcggataatcaccatcgccatcattaccgtgctcgttcttctcatcttcggcgtcatctatctcaagttcagatag

SEQ ID NO: 33290 - protein, 227 aa, Muscodor strobelii
  misc_feature: SGI Peptide ID NO. 571481
  misc_feature (50)..(203): Pfam Id: PF05008 Pfam Desc: Vesicle transport v-SNARE protein
  misc_feature (116)..(203): Pfam Id: PF05008 Pfam Desc: Vesicle transport v-SNARE protein
  misc_feature (50)..(100): Pfam Id: PF05008 Pfam Desc: Vesicle transport v-SNARE protein
  misc_feature (1)..(227): NCBI GI: 85090763 Blast Desc: NCU05959 [Neurospora crassa OR74A] gi|28919946|gb|EAA29337.1| conserved [Neurospora crassa OR74A]
  misc_feature (1)..(227): NCBI GI: 156030842 Blast Desc: SS1G_14360 [Sclerotinia sclerotiorum 1980] gi|154700751|gb|EDO00490.1| SS1G_14360 [Sclerotinia sclerotiorum 1980]
  misc_feature (1)..(227): NCBI GI: 242769726 Blast Desc: vesicle transport v-snare protein, [Talaromyces stipitatus ATCC 10500] gi|218725026|gb|EED24443.1| vesicle transport v-snare protein, [Talaromyces stipitatus ATCC 10500]
  misc_feature (1)..(227): NCBI GI: 212542111 Blast Desc: vesicle transport v-snare protein, [Penicillium marneffei ATCC 18224] gi|210066117|gb|EEA20210.1| vesicle transport v-snare protein, [Penicillium marneffei ATCC 18224]
  misc_feature (1)..(227): NCBI GI: 238843949 Blast Desc: vesicle transport V-SNARE protein vti1 [Microsporum canis CBS 113480]
  misc_feature (1)..(227): NCBI GI: 116180476 Blast Desc: vesicle transport v-SNARE protein VTI1 [Chaetomium globosum CBS 148.51] gi|88185163|gb|EAQ92631.1| vesicle transport v-SNARE protein VTI1 [Chaetomium globosum CBS 148.51]
  misc_feature (1)..(227): NCBI GI: 171687651 Blast Desc: protein product [Podospora anserina] gi|170943787|emb|CAP69439.1| protein product [Podospora anserina]
  misc_feature (1)..(227): NCBI GI: 145610551 Blast Desc: MGG_01124 [Magnaporthe grisea 70-15] gi|145017911|gb|EDK02190.1| MGG_01124 [Magnaporthe grisea 70-15]
  misc_feature (1)..(227): NCBI GI: 225682595 Blast Desc: vesicle transport v-snare protein VTI1 [Paracoccidioides brasiliensis Pb03] gi|226290010|gb|EEH45494.1| vesicle transport v-SNARE protein vti1 [Paracoccidioides Pb18]
  misc_feature (1)..(226): NCBI GI: 70993818 Blast Desc: vesicle transport v-snare protein [Aspergillus fumigatus Af293] gi|66849390|gb|EAL89718.1| vesicle transport v-snare protein, [Aspergillus fumigatus Af293] vesicle transport
MANPLDTDAGSELFSSYEAEFKLVGADLTQKLDQIAELAGEPRKAAINQAERALEEAEELLGQMRIEKQNIPSANRNKVNMRLRNFESDVDKAKRKLRTLGTDSAATYGRYTDDPDAQPSDAQLEQRQQLLAGTDRLDRSTQRLRSSQALAEETEAIGASTLSDLYQQRETLQHTSEMLYESEGYVDRSVKTLRGMARRMATNRIITIAIITVLVLLIFGVIYLKFR

SEQ ID NO: 33291 - DNA, 4349 bp, Muscodor strobelii
  misc_feature: SGI EST ID NO. CUFF.78750.0
  misc_feature: Variant of the nucleotide sequence at SEQ ID NO 33289
gggcgcttacctaagtacctgatcacaggtgcaggggtgtgccagcgggaatggccatcggaacctcgacatcatcaaccaccacagacaggcatcaacattccgcaaacaccacaatcaacaacgaaccttgcctggccgcaagatcggaaacatggcgaacccactcgatacagatgccggctccgagctgttcagcagctacgaagccgaattcaagctcgtcggcgcagatctgacgcagaagctggaccagatcgccgagctggccggcgagccccggaaggccgccatcaaccaggctgagcgcgccctcgaggaggcagaagagctgctgggacaaatgcgcatcgagaagcagaacatcccctccgcgaaccgaaacaaggtcaacatgcgcctccgcaacttcgaatccgacgtcgacaaggccaagcgcaagctccgaacgctcgggaccgacagcgcagccacgtacggccgatacaccgacgacccggacgcccagccctccgacgcccagctagagcagcgacagcagctgctggcgggcaccgaccgtctcgaccgctcgacccagcgtctcagatcctcccaggccctcgccgaagagacggaagctatcggcgcctcgacgctttccgatctgtaccagcagcgcgagactctgcagcatactagtgagatgctgtacgagagcgagggctacgtcgatcgcagcgtcaagacgttgagggggatggcgcgtaggatggctacgaatcggataatcaccatcgccatcattaccgtgctcgttcttctcatcttcggcgtcatctatctcaagttcagatagacaagaatcgtctcaacaacatcgttggtactgcttaacgttgtctctgtgtttctcatcgtgtagaatacgagactccgggggagttttgatgggaataacataatggcgttttagcggagcaagaggcgtccaggacctgtatcattcttatttgacttggtttccttagaacgactagagttgctgtgaattttacctacctagtcttgtatttgccaatcgagctctatattgactcctcaataatctgccgtagtatattcacaagaatacttcgatagagcggcagcacgggtcaaggataagtagctgagaagctatctaggcgaatcatgaaaaattgtagtcattttgcgttgcccatttctctatcaatgttctccttataacgccactcaaagtcaactgcggccgatattcagccttgtgtctttgcccccatattatcagacggtaaatcgttacaatagcaggagtgcaaatgggtatcaaagcctaggcggattctatctagcccttggtgatttgggcttgtggaccttcccgccaccaaatccatctccagatcctttcctcttgtcctcaccaagtccacgtcggccagaggctatgccgcccctgccgctgcggccaccgcccctatcaccacggcctctgtgagagccaccacctctgttcttgttgatctgcttctttatcgttgacacctcttggtcgtcgacgtccatttcgtcctcctcttcatggtcactttgccctcgcttgttggaaaacttcagacgcccgccccggccccttctcccggcatctctgcctttgagtgccgcgacatatgcaccgacgccactgctctcttcgtcgccaggggtgtcgatgaccatagcatcatcttcgatttcaccatcttcgcccaagatgagtttcccgtccaagtcggtcttcatcttggtcctactagctttgcgtagcttcccgggttttgttgaagaaatgctagccaaagcgttgcggtccaagagatcgagaggctcatcttcatcctccatgatatatgcgtcacctcgtctcttcgatctcccagctttgcccgacatatcgacatcggagtcagccgacgcatccgattcgtcactgctatatagagcctcgtcatattgactctcgaagcggctgcgtcgcttctcccgctgttcatctgcctcttcttcgtttccatcagatttggcggcatcacgttttcgcttgctgcgctctttggtcttccggatattggtcaacaacttcctatccgcttcggggcagctcttattgacaggttcaaagccaaagcgtcggaccattctctctagaatatgcttgactttggctttgaagtggcccttgtgttcgtgagaccaaaccatgaggttcggtatcatagatggaagacggggaagcatcatatcagtcggcaagctgaccacacaaactttgacgaagcctagaacactcttcactatctctctattgtttgaggttaagaagaggtccatggtctggacaagatcgctcagcacctcttcctgtaaagactcgcggaactcgtagagtattcgagtgagagctgtaatcgaggcagagatcatatgcggtgtacttccagctagcccggcactcaccatggtgaagaactcctcaatgcttgccgaaacggacgccgcatcgtcaggcatgtgtgggactttactgttgtcgatctgccagcctttgctgtcggccagcttcttgcccatcagtaccaacaggtcgtaggcgatattcctagccttttcattggtctctttgcagcagatcacgacttcggacaggatggacggaataaagtgcagcgaatcgtcgggaatgagctgtacgagcgcagccatggcggacaatcgttcacgccgagcagggcccgaaaccttctccgcactggagaggatcaaagtttgcagttcggagtgttgctcctgaagcgcagttttcccggtcttcgaatcagcaagcctcgggatcagcttgtacgctttcttttgcaactgtgcatcgtcgtcttgcatgatgacaagtcgtgcgatattaaagagagggccgaagctttgacgcggcaggtagacagccatggtaatgactaggtccatcaaggtctggcttgtagatggcatcttatcttgcgatttctgcgccttcgctttacctccttgttcgcctgactcactgaaagcagtagcaagcatggtgctgacacgatcgaacgtgtcgccaagttctttctcaggggtgatgctgagataggcatttattgtctgcaagatggggccgcggttctgaggcagtgtttgaccgtaaacgttgaacaaaacagccagaatgtttccggcaaatcctcccaagtagaccagattcttttcagcatcagctttggtcactcggctgtggagaagcgggttttcgccatcttcgattgctgcgattgcctgatttgactcgacaagtgttttcagagcgcggcacacgtcgagcctcagatccacctgcttgtacaaaagattggccagcatctctgccaaggtttggccgaaggcagtctggagatcaagcggaaggtcgcaatacccaggaagtaaagaccaaatctggtgaaccagagtctcatatatcttgacctccatcgttttggccgcgtctccatgatcgagtacgcgctgaaacatggcctcactgagcggtacaaattcgtcacggaaatgctggagattagtgttgcacgtgtagtctcgcaggatcggtagcatccacgccctgccgacctgtccgggcactggcttggcgaggttgagcgggagcacagagaggactgcttccggtcccatagcgcggatggctctaccaagaatctcgtctgcctgtttcttgccggtgaacgagtcgttgcctcggatctctccgatggtcttagcgatattgaccatgctggggttggcttgccatttcagtgcgtcgaacatggcgccaagaacgctgaaagtctccatccacgccgcctggtacttgaccccgagaaggccctcggcgaccctgacgactttgtccagcgtcttctcgtcgtagatggagggttcgatgatgacttgttccgggatgcagttggcgacgaaggagatcaggcactcggaagcggagacgcggatgttgtatgacggcgaggacatgaactcggcgatcagggtgaagagggccggcagcttctggaaggtctcgtcgggctcgatctgggccgagacatcatatccgcgcgacaggatggcgatccacgggggcagcagctgggtgtcctgggtggcggggcgcatctcggagatgatctccaggaggcgcggcagcttggccgatgccagctcgccggccatgccctcgaagatcatctcgaagatgtcgaagacggccatggtcatgtgctcgttgcccgtcttggcgatgccgaggagca

SEQ ID NO: 33292 - DNA, 1521 bp, Muscodor strobelii
  misc_feature: SGI cDNA ID NO. 571482
  misc_feature: Encodes the peptide sequence at SEQ ID NO 33293
atgccaaacaactcgcaggattatcgcatgaaaaaggtcgctattgtgggtagcggctccgcgggtattgcagctctttgggcactgaaggctgccgaccggctgggtggccacacaaacaccgtcgaatggaagaagggcaaattcaagacactcgttgataccggtttcattgttctgaacactgccacatatccaaacttcatcaactttttgaggaaaataaacgtcccgatctcgaaaacagaaatgacatttggagtgtcacgagatcgaggcaaattcgagtgggctgggacgagcctgggcgccgtattctgccaacggaagaatatcttctcgcccaggatgtggagactgatcttcgacatagtgcgcttcaatcagtttgcgctcgatctgctgagagatgacgactttgatacgaacggggctcaagcggcggacacgaggttagagactattggccattacttaaacaggcatggatattccgacaccttccgcgacgactatctcattcccatgaccgctgctgtctggagtacgagcccggacaaatgtgctctggagttccccgccgccactttagtcaggtttatgtggaaccaccatctactaagtacagtagcgacaaggcctgactggctgactttggaaggaggtgcaaaatcatatatcgacgccgtcatgaaaggatttccaccgaaccatctctttctcaagaccgccgtgaagcatgtctgtacagagagtgacggccgtgtcaagctacatttagagagtggaaagacggagatatatgaccacgtgattctggcgacccacggagaccaagccctcgatatcattggcccaacagctactaatgaggagaagagcatcatgtcgaagttcgtgacgtcggaaaacacgtgtgtcttgcattcggatctatctctgatgccgaagcgacgaaacgcctggtcggcgtggaactatctgaccatgtcatcaccttggaccggccgagatgtcgatcaagtgtcgttgacatacaacatgaacattctacagcatattccccgtgaggcattcggggacgtgctagtcacgctgaatccgatccccgagccgagaccagggacggtgcaagggcgatactcatattctcacccgttgtacacacccgaggcagtgcgggctcaagagaggctgcccagcatacagaacaagcgtgggatcagctatgcaggggcttggaccaaatacggtttccacgaagatggattcagcagcggactgcacgtggcaatgaagcacctaggcgcacggcttccattcgagttcgtcgattctacttttagtcgagggagacagccagagctggggattctcgactggttggtgagggtgattgttttgataatccaggtgttcctgatcgacttgccggaaagactgttcaataggacaaaagcacaggtctcggcgcaggtcaacggcgtcggaaagagattgacgagaggaaagctttcatga

SEQ ID NO: 33293 - protein, 506 aa, Muscodor strobelii
  misc_feature: SGI Peptide ID NO. 571482
  misc_feature (1)..(504): NCBI GI: 256728917 Blast Desc: NECHADRAFT_100382 [Nectria haematococca mpVI 77-13-4]
  misc_feature (8)..(495): NCBI GI: 164428117 Blast Desc: NCU01678 [Neurospora crassa OR74A] gi|157072019|gb|EAA27648.2| conserved [Neurospora crassa OR74A]
  misc_feature (1)..(502): NCBI GI: 46138667 Blast Desc: FG10848.1 [Gibberella zeae PH-1]
  misc_feature (3)..(492): NCBI GI: 156030840 Blast Desc: SS1G_14359 [Sclerotinia sclerotiorum 1980] gi|154700750|gb|EDO00489.1| SS1G_14359 [Sclerotinia sclerotiorum 1980]
  misc_feature (1)..(497): NCBI GI: 116204885 Blast Desc: CHGG_10326 [Chaetomium globosum CBS 148.51] gi|88176454|gb|EAQ83922.1| CHGG_10326 [Chaetomium globosum CBS 148.51]
  misc_feature (11)..(482): NCBI GI: 154290440 Blast Desc: BC1G_15557 [Botryotinia fuckeliana B05.10] gi|150847728|gb|EDN22921.1| BC1G_15557 [Botryotinia fuckeliana B05.10]
  misc_feature (11)..(500): NCBI GI: 171689068 Blast Desc: protein product [Podospora anserina] gi|170944496|emb|CAP70607.1| protein product [Podospora anserina]
  misc_feature (8)..(495): NCBI GI: 7800809 Blast Desc: conserved [Neurospora crassa]
  misc_feature (5)..(499): NCBI GI: 189200120 Blast Desc: amine oxidase [Pyrenophora tritici-repentis Pt-1C-BFP] gi|187983496|gb|EDU48984.1| amine oxidase [Pyrenophora tritici-repentis Pt-1C-BFP]
  misc_feature (11)..(475): NCBI GI: 145239853 Blast Desc: An08g04550 [Aspergillus niger] gi|134077087|emb|CAK45428.1| protein product [Aspergillus niger]
MPNNSQDYRMKKVAIVGSGSAGIAALWALKAADRLGGHTNTVEWKKGKFKTLVDTGFIVLNTATYPNFINFLRKINVPISKTEMTFGVSRDRGKFEWAGTSLGAVFCQRKNIFSPRMWRLIFDIVRFNQFALDLLRDDDFDTNGAQAADTRLETIGHYLNRHGYSDTFRDDYLIPMTAAVWSTSPDKCALEFPAATLVRFMWNHHLLSTVATRPDWLTLEGGAKSYIDAVMKGFPPNHLFLKTAVKHVCTESDGRVKLHLESGKTEIYDHVILATHGDQALDIIGPTATNEEKSIMSKFVTSENTCVLHSDLSLMPKRRNAWSAWNYLTMSSPWTGRDVDQVSLTYNMNILQHIPREAFGDVLVTLNPIPEPRPGTVQGRYSYSHPLYTPEAVRAQERLPSIQNKRGISYAGAWTKYGFHEDGFSSGLHVAMKHLGARLPFEFVDSTFSRGRQPELGILDWLVRVIVLIIQVFLIDLPERLFNRTKAQVSAQVNGVGKRLTRGKLS

SEQ ID NO: 33294 - DNA, 1933 bp, Muscodor strobelii
  misc_feature: SGI EST ID NO. CUFF.78803.0
  misc_feature: Variant of the nucleotide sequence at SEQ ID NO 33292
gttttatcatttgaataacagcatatctgtataaatccttcgtcgtccgtcctagcccagccccctgcaatacctggtcttcttgctggcgacgtcgtcgccgccaagaagcttcaatggcatcatcacatattgatcgcgtacctaggaaaaaggtcgctattgtgggtagcggctccgcgggtattgcagctctttgggcactgaaggtgagtgctcgtattttccatctgacataaatatcttccaaagctaacgttccgcagtgagtcgaatttgtggcaaatgacgttaagttatcaaattaacaagatgcagccgtacacatcacgatgtttatctctacgaggctgccgaccggctgggtggccacacaaacaccgtcgaatggaagaagggcaaattcaagacactcgttgataccggtttcattgttctgaacactgccacatatccaaacttcatcaactttttgaggaaaataaacgtcccgatctcgaaaacagaaatgacatttggagtgtcacgagatcgaggcaaattcgagtgggctgggacgagcctgggcgccgtattctgccaacggaagaatatcttctcgcccaggatgtggagactgatcttcgacatagtgcgcttcaatcagtttgcgctcgatctgctgagagatgacgactttgatacgaacggggctcaagcggcggacacgaggttagagactattggccattacttaaacaggcatggatattccgacaccttccgcgacgactatctcattcccatgaccgctgctgtctggagtacgagcccggacaaatgtgctctggagttccccgccgccactttagtcaggtttatgtggaaccaccatctactaagtacagtagcgacaaggcctgactggctgactttggaaggaggtgcaaaatcatatatcgacgccgtcatgaaaggatttccaccgaaccatctctttctcaagaccgccgtgaagcatgtctgtacagagagtgacggccgtgtcaagctacatttagagagtggaaagacggagatatatgaccacgtgattctggcgacccacggagaccaagccctcgatatcattggcccaacagctactaatgaggagaagagcatcatgtcgaagttcgtgacgtcggaaaacacgtgtgtcttgcattcggatctatctctgatgccgaagcgacgaaacgcctggtcggcgtggaactatctgaccatgtcatcaccttggaccggccgagatgtcgatcaagtgtcgttgacatacaacatgaacattctacagcatattccccgtgaggcattcggggacgtgctagtcacgctgaatccgatccccgagccgagaccagggacggtgcaagggcgatactcatattctcacccgttgtacacacccgaggcagtgcgggctcaagagaggctgcccagcatacagaacaagcgtgggatcagctatgcaggggcttggaccaaatacggtttccacgaagatggattcagcagcggactgcacgtggcaatgaagcacctaggcgcacggcttccattcgagttcgtcgattctacttttagtcgagggagacagccagagctggggattctcgactggttggtgagggtgattgttttgataatccaggtgttcctgatcgacttgccggaaagactgttcaataggacaaaagcacaggtctcggcgcaggtcaacggcgtcggaaagagattgacgagaggaaagctttcatgattactccctctactgcatagcgcacgttcctgtactaaacctaggtgatacccatctccttgctagcctgagcactatatagctactactatattgtttatgagatatatatatttcacaagttcgagatataaaaaattgtgtagtcagttt

SEQ ID NO: 33295 - DNA, 810 bp, Muscodor strobelii
  misc_feature: SGI cDNA ID NO. 571483
  misc_feature: Reduced expression when VOC is produced
  misc_feature: Encodes the peptide sequence at SEQ ID NO 33296
atgaactcagcaccccgtatatcgtggagggcgctccaatcgagcacctcgtcctgggcatgtgcatcatgtcgccgaggactcgcaccagcgaggcaatcgcccaatcgctcgccgcgaagaccattctcgaagaccacggccaaaacgcaacagcagcaccagcaggcgagtgcgccctcaatggagcgcctgcgggagcactacaaatacaagaatagaacgaccatgttctatacgctcagcatcatcctcggcaccgtcgctttctcgtacggctctgtgcctatgtataagatgatctgccagacaacaggctggggcggccaacccatccgagcaccaggccacagcggcgtcggcggcgaccaagatccagcatcacggctcgtaccagtgaaggacgcacggcgcatccgcgtgacgttcaacgcctccgtctccgacgtcctcccctggaaattcacaccccagcagcgcgaagtgcgggtgctccccggcgagacggcgctggcgttctacacggcgacaaaccgcagcgacagcgacatcatcggcgtagcgacgtacagcgtgacgccggcacaggtggcgccgtacttcagcaagatccagtgtttctgctttgaggagcagaggcttaatgccggggagacggtcgatatgcccgtgtttttctaccttgatccggacttgttggatgatttgaatatgcgggggattaatgaggtgacgctgagttatacgttcttcaaagccaaatacgataacaatggaaatttcaagaatttccccacgacctctacataa

SEQ ID NO: 33296 - protein, 269 aa, Muscodor strobelii
  misc_feature: SGI Peptide ID NO. 571483
  misc_feature (94)..(253): Pfam Id: PF04442 Pfam Desc: Cytochrome c oxidase assembly protein CtaG / Cox11
  misc_feature (1)..(266): NCBI GI: 154290444 Blast Desc: cytochrome-c oxidase assembly protein [Botryotinia fuckeliana B05.10] gi|150847730|gb|EDN22923.1| cytochrome-c oxidase assembly protein [Botryotinia fuckeliana B05.10]
  misc_feature (1)..(262): NCBI GI: 256728918 Blast Desc: [Nectria haematococca mpVI 77-13-4]
  misc_feature (1)..(262): NCBI GI: 46138663 Blast Desc: FG10846.1 [Gibberella zeae PH-1]
  misc_feature (62)..(266): NCBI GI: 156030828 Blast Desc: SS1G_14353 [Sclerotinia sclerotiorum 1980] gi|154700744|gb|EDO00483.1| SS1G_14353 [Sclerotinia sclerotiorum 1980]
  misc_feature (1)..(257): NCBI GI: 171689096 Blast Desc: protein product [Podospora anserina] gi|170944510|emb|CAP70621.1| protein product [Podospora anserina]
  misc_feature (16)..(265): NCBI GI: 258565367 Blast Desc: cytochrome c oxidase assembly protein ctaG [Uncinocarpus reesii 1704] gi|237907129|gb|EEP81530.1| cytochrome c oxidase assembly protein ctaG [Uncinocarpus reesii 1704]
  misc_feature (55)..(266): NCBI GI: 119190363 Blast Desc: CIMG_05229 [Coccidioides immitis RS] gi|240107208|gb|EER25393.1| Cytochrome c oxidase assembly protein COX11, mitochondrial precursor, [Coccidioides posadasii C735
  misc_feature (55)..(266): NCBI GI: 169774817 Blast Desc: [Aspergillus oryzae RIB40] gi|83769739|dbj|BAE59874.1| protein product [Aspergillus oryzae]
  misc_feature (65)..(265): NCBI GI: 116204887 Blast Desc: CHGG_10327 [Chaetomium globosum CBS 148.51] gi|88176455|gb|EAQ83923.1| CHGG_10327 [Chaetomium globosum CBS 148.51]
  misc_feature (12)..(269): NCBI GI: 156074029 Blast Desc: mitochondrial cytochrome c oxidase assembly factor Cox11p [Paracoccidioides brasiliensis] gi|226286725|gb|EEH42238.1| cytochrome c oxidase assembly protein
  misc_feature: Useful for introducing or modulating the production of volatile compounds
MNSAPRISWRALQSSTSSWACASCRRGLAPARQSPNRSPRRPFSKTTAKTQQQHQQASAPSMERLREHYKYKNRTTMFYTLSIILGTVAFSYGSVPMYKMICQTTGWGGQPIRAPGHSGVGGDQDPASRLVPVKDARRIRVTFNASVSDVLPWKFTPQQREVRVLPGETALAFYTATNRSDSDIIGVATYSVTPAQVAPYFSKIQCFCFEEQRLNAGETVDMPVFFYLDPDLLDDLNMRGINEVTLSYTFFKAKYDNNGNFKNFPTTST

SEQ ID NO: 33297 - DNA, 6112 bp, Muscodor strobelii
  misc_feature: SGI EST ID NO. CUFF.78866.0
  misc_feature: Variant of the nucleotide sequence at SEQ ID NO 33295
ttgcatcgatctgcgccgcccgcagttttatcgattgagagctccaagtctgcgaaacatatgacagcttcaaagaccgatcattgattcagcgtgtaaaaagactaacagcttctgtcacgctcgaaacatgaactcagcaccccgtatatcgtggagggcgctccaatcgagcacctcgtcctgggcatgtgcatcatgtcgccgaggactcgcaccagcgaggcaatcgcccaatcgctcgccgcgaagaccattctcgaagaccacggccaaaacgcaacagcagcaccagcaggcgagtgcgccctcaatggagcgcctgcgggagcactacaaatacaagaatagaacgaccatgttctatacgctcagcatcatcctcggcaccgtcgctttctcgtacggctctgtgcctatgtataagatgatctgccagacaacaggctggggcggccaacccatccgagcaccaggccacagcggcgtcggcggcgaccaagatccagcatcacggctcgtaccagtgaaggacgcacggcgcatccgcgtgacgttcaacgcctccgtctccgacgtcctcccctggaaattcacaccccagcagcgcgaagtgcgggtgctccccggcgagacggcgctggcgttctacacggcgacaaaccgcagcgacagcgacatcatcggcgtagcgacgtacagcgtgacgccggcacaggtggcgccgtacttcagcaagatccagtgtttctgctttgaggagcagaggcttaatgccggggagacggtcgatatgcccgtgtttttctaccttgatccggacttgttggatgatttgaatatgcgggggattaatgaggtgacgctgagttatacgttcttcaaagccaaatacgataacaatggaaatttcaagaatttccccacgacctctacataatgtaccaaaatgttcacttgcataacgtattttatgtgtatcataagagtgttacataatcatggctattcaactttaccgtccaccacttgactagtggcgagtgtttagagttatgccattcatctctattgcctagataagcatgaaagagcatcagcgccctgcgacttaagagagtatataaacttggagatgtgtaaagatattagactatctaaaactgtacgaaaaggatcaacgcaacaaacacccttgcagataatattgacatcttctatcatcaagcccatagcagcatttccactctgcaccatcatatcacgaaacatgaagcgcgatcattactggaataattgggaataacaattcgatacgaatcactgctattttcaagaagagaaaagaaatctgagctaggcttacggcagtgcctaaattcccatcagagcctatttacattggaatcgaacaacttcagggtatttgcccgagcatgggagagcgcatagatacattcactctctctatatagcagtgtctcgaaatatgacatgaaaccattttgacattcgattgtcatttctatgatacatcattcaacaatagataggctctcaaagtatccgtaggtggtgtatttcccaagcatactgggggctgatgctattgtcccctcagccacactttgttggaccctgaaaagtgcgtctacgtcacctatccattccagagtcacaagctcccttcagccgtctcttccatactggcatcttcgaatgcgcaaacccttccatctacacaatctggctgcctaggtagccatcggtgcctatggtagtaataacatgacgatatcatagcggctatcgcacctttgctcagcctcttagacttacgacgaataagatcaagattcaacgacccctccacagcacctcactcaacgtcgcagcgcatcctcaccgcgccggacctcgaatctcctcgtcacatcagtcgcatccacaacctcacgtctaccatggacctaagcgacgccacagcgcgtctacggcgaacattcgcctacccctccgacacaacaacaccaacaacatcccacccagactccgactcagacgggcccgcgctcgacgagcaagagcaagactccctaatccaacacctaacccgacaaaacgacacgcgcaacgcccaattccgcatctttctcctctccgtcccgctgctctccaccatcccctacctaaccctgctcttctcgtcctcccgccgcccctccgacttctggaccgccctcctcgccctctcaagcctatcctgcaccgcctggtctctctacttcctcccaccaggcgtgacaggcgtcaagatcctcgacgcctgggtcaaacccgcatccacatcaccatccccaacctcatccacatccacccacacccaaacgcccgacctacaaatccccatcggcgcaaacgcccagcgtcgcagacggttgagcgggaccaacacgcgcgtcttctggtctcagcaccgatcgcccttagaagcctacctcccattcctcaacctcgggctctcgtgcgtgctagtcctgactggtttcctgtcccccaaacgagttcaggagcagcactggggacacgtgggactcgctaatctgcccgctgtcgtgtacgccgttgtgctcatcgccaagatgttcatgggtagtgttgatcccgagagagagttggcggctttacggtacgagtataaaggtgcttgatcatgccgtgtttcgttgcttctcttcttgtccggtgctaggggcaacgggggctaagggatatgtaataagaacggaacggtttgctatgcaccagagttggctctggtcttgcgcgtggtgcgtataatataattacctagtgataccccagatatgagttttgaaattttctcaatttctttcgctgtgatactgcacaatctataaacaagcacaatttgtggcatgcgctcatcacatgctgcatccgctcccaattttcccccctgccacccaagggtattcagcaatcctccacctaagaagcaaccagttgacacttaatgtagaatgagccaccagaagcgcagcatacccgtcatgcgaaatagagccagtcccccagcgctcgtatcttatattataccttgtgtcgtggaacactcaaaattagttccgtgctcctaactctactccgtttcccccttttctctggagcaccaataccatctttctcatacctcgatcgactcattgaaccgcaacacaccgttgctcttcaacacaccgtctatgcccttgggcgagcgttggaatgtgtcgacgtctggttgcgcgtctaccgatctatcgaccacaagtgccaatccgtgagacttgatcgcatcgacaagcgcggggaccatattctacaaaagagtttgtatcagcaaaattgcataaaagtgtgagataatagcaatacttaccaggagacgcgcgttacagataagtcccataaggttgttgttctgcgcaatcctgaccacctctttcactgagagcgttctacgaccgctgctctggatcacgttcggtgctgacatcaggtcctccatgccgaggtcgttgcagaggaagacgggaaagttgggctgcttccagttgagagtgacgcacaacgtgggattatacgacccaaacacgacggatctgaccgggcttgggacggacaatgttctagcacgctgctctctggcgtgatcaaacacgatgctcaggattgcatccacgaactcgttgacgttcatggtcgggcctaggctatactgtcttctttcctcctcggatggatatagaatctgtaagttgacatgcatggtagagggcagtacagagagagcatgctctagagagacacccgcggcagagagtacacgatgaacctgcgcaatgtcttcatgaccacgagtaggtatcagttcgagttccgcacgagcctggcttgtcgaggtcacggcgatgaactgttcatacgacaagtgcgtcactggaatgtcaatatcgccgcaccttatcatccaccgcggccacacgatcggaataccatcgcaggtgtgctggatgtggagctgaacaaaatcaccagacagactcgaacccgttacgaacattgtcggattctgatcagactggctagttgctttccaatacgtctcaaaatcggtgatctctagcggcgctcctcggaaaggcttgatcacctgtgtattaaacgtgatctggccgatggcccgaagtcgtgggtcaaagagcggaagacaacacttgcccgagctgctcagggaagctctaaaggtgtttggaagcgcgaccgtcttagcaatgatcttcgcaccgtatgtcggaaatacgtcgaagtcgagagtgaaagtgtcgaggttatcgacttggaaggagactagccgtgtgtcttcctggaacggcagtatgatgttcttcggaatgagatcagagagcttagacgatatggtaaggcgagcagcagggtatttgctatcatggaaaaacacaagaggctgctctccatcctcttcaaagctaatctggacgactgtcttggtgtccagaaaattgtgtccgtaccggcgcaacggaatgatgggtggcggtaactcgagtacagggatagcatcaacatctaaagacatgggaacgggtccgctaccagtacttataggtgctaataacgaaccaggggtttgcattatcaaaggactttgtgtcttgtccttttgatacggcgtgagtaactgtatacatgccaagtgcccctcccaggcggcgtagtacatagcaggtaaatccttctcgtcgagaatattcgggtcaactcccacattcaacaactcttggagacagggaacattgccttcacttgcagcatgaaccagcggagtccacccataaagcttatcgatctgatctagatctgctccatgatgctttagtagacgaagcagctgtggtgtctgacccgagcgggccacgagatgttgcgggtacaatccctcagcatcagcgagtatctgcgcgccgtgctgtagtagagtttctactatttccactgatccatgttcacatgccagattcaggggtatatgatccgtctccgagacaggatccagccgcgaagaggcggccaaaaggagctgcacacaagtaagatgaccatggacgatggcatggatgagcggagtgaagttatcatggtcgatcatgtcgatcgttgatggatcagctgcacagaatgtaagtgacaaatgagggatgaggatgtggtccaaagaaagttacgcaccttgaagcagtgcttgtagcatgtctagccgcccatgcatgctcgcataatgtagcggtacccttccatatacatctgtcctattgacttcaactcccgcagagagacctacaccaaggacgaaagaattgccatagattgtcgcttggtgaaggcagttcctctcgtttatgtcgtcctcggatcggagatcgacaaggtttgttgcgagcaagacttctaaagaggcttgtgggccctcgtgaatagctgcgagaaacgtacgtgttattcgttccctcaatggaatgtccatggcgggtgctgagcttgatgctgcttgcattctcgacagtagatcctgaagagactctagattgccagaaattgcggtgtcaagcagcaagctgtccgcatcaccttcgtcagtgccaagcaggtgttgactactcacgacatgttcagttcgggcgtcaaatgtaacatggtcaccctctgcccaagctccaagctcttgcagactcgtcgtagcctggtccgaaagttcactaatgacggtagcattgaagaaaggctgaacctcaactgcgcgagaaaggtacagctcttttgtcttcgactttgatgtcttgtcccactttttaagaatcttagagaaagctgtcccattgatctcgacgaactgctgtagtttgttcaaatcgttggcgaattgctggaacccttcttcgagagtagtgaactttgctgaacgcctcgaaagcccttgtcgtgattttaaaaccctcttcttgtcgatcagagtcttgaggcgtacttt

SEQ ID NO: 33298 - DNA, 747 bp, Muscodor strobelii
  misc_feature: SGI cDNA ID NO. 571484
  misc_feature: Reduced expression when VOC is produced
  misc_feature: Encodes the peptide sequence at SEQ ID NO 33299
atggacctaagcgacgccacagcgcgtctacggcgaacattcgcctacccctccgacacaacaacaccaacaacatcccacccagactccgactcagacgggcccgcgctcgacgagcaagagcaagactccctaatccaacacctaacccgacaaaacgacacgcgcaacgcccaattccgcatctttctcctctccgtcccgctgctctccaccatcccctacctaaccctgctcttctcgtcctcccgccgcccctccgacttctggaccgccctcctcgccctctcaagcctatcctgcaccgcctggtctctctacttcctcccaccaggcgtgacaggcgtcaagatcctcgacgcctgggtcaaacccgcatccacatcaccatccccaacctcatccacatccacccacacccaaacgcccgacctacaaatccccatcggcgcaaacgcccagcgtcgcagacggttgagcgggaccaacacgcgcgtcttctggtctcagcaccgatcgcccttagaagcctacctcccattcctcaacctcgggctctcgtgcgtgctagtcctgactggtttcctgtcccccaaacgagttcaggagcagcactggggacacgtgggactcgctaatctgcccgctgtcgtgtacgccgttgtgctcatcgccaagatgttcatgggtagtgttgatcccgagagagagttggcggctttacggtacgagtataaaggtgcttga

SEQ ID NO: 33299 - protein, 248 aa, Muscodor strobelii
  misc_feature: SGI Peptide ID NO. 571484
  misc_feature (7)..(248): NCBI GI: 46109322 Blast Desc: FG01543.1 [Gibberella zeae PH-1]
  misc_feature (6)..(248): NCBI GI: 39968841 Blast Desc: MGG_02513 [Magnaporthe grisea 70-15] gi|145013868|gb|EDJ98509.1| MGG_02513 [Magnaporthe grisea 70-15]
  misc_feature (7)..(248): NCBI GI: 256730782 Blast Desc: NECHADRAFT_74219 [Nectria haematococca mpVI 77-13-4]
  misc_feature (6)..(248): NCBI GI: 28881361 Blast Desc: [Neurospora crassa]
  misc_feature (3)..(248): NCBI GI: 156044222 Blast Desc: [Sclerotinia sclerotiorum 1980] gi|154694603|gb|EDN94341.1| [Sclerotinia sclerotiorum 1980]
  misc_feature (3)..(245): NCBI GI: 154305464 Blast Desc: [Botryotinia fuckeliana B05.10] gi|150853288|gb|EDN28480.1| [Botryotinia fuckeliana B05.10]
  misc_feature (3)..(248): NCBI GI: 171689550 Blast Desc: protein product [Podospora anserina] gi|170944737|emb|CAP70848.1| protein product [Podospora anserina]
  misc_feature (6)..(248): NCBI GI: 240107863 Blast Desc: CPC735_002040 [Coccidioides posadasii C735 delta SOWgp]
  misc_feature (7)..(248): NCBI GI: 225560375 Blast Desc: conserved [Ajellomyces capsulatus G186AR]
  misc_feature (7)..(248): NCBI GI: 240279929 Blast Desc: conserved [Ajellomyces capsulatus H143]
  misc_feature: Useful for introducing or modulating the production of volatile compounds
MDLSDATARLRRTFAYPSDTTTPTTSHPDSDSDGPALDEQEQDSLIQHLTRQNDTRNAQFRIFLLSVPLLSTIPYLTLLFSSSRRPSDFWTALLALSSLSCTAWSLYFLPPGVTGVKILDAWVKPASTSPSPTSSTSTHTQTPDLQIPIGANAQRRRRLSGTNTRVFWSQHRSPLEAYLPFLNLGLSCVLVLTGFLSPKRVQEQHWGHVGLANLPAVVYAVVLIAKMFMGSVDPERELAALRYEYKGA

SEQ ID NO: 33300 - DNA, 6112 bp, Muscodor strobelii; identical to SEQ ID NO: 33297
  misc_feature: SGI EST ID NO. CUFF.78866.0
  misc_feature: Variant of the nucleotide sequence at SEQ ID NO 33298

SEQ ID NO: 33301 - DNA, 3111 bp, Muscodor strobelii
  misc_feature: SGI cDNA ID NO. 571485
  misc_feature: Encodes the peptide sequence at SEQ ID NO 33302
atggcctctgctacatccccaatcccaaacgtcacatcgatttcaagactctcatcagccgaggcgaaattcggcaaacagattcagaagcggcagcttgaagtgcccgagtatgccgcgagttttgtgaattacaaggcactcaaaaagcttatcaaaaggctttctgctactccgactctcagcgcgcaaactgatcctcatctgctcacgacacccgcagacacccagactgcactacaggcgaataaagcaaagttcttctttcaattggaacgagaattagaaaaggtgaatgcgttctacctacagaaagaagcagagctcaaagtacgcctcaagactctgatcgacaagaagagggttttaaaatcacgacaagggctttcgaggcgttcagcaaagttcactactctcgaagaagggttccagcaattcgccaacgatttgaacaaactacagcagttcgtcgagatcaatgggacagctttctctaagattcttaaaaagtgggacaagacatcaaagtcgaagacaaaagagctgtacctttctcgcgcagttgaggttcagcctttcttcaatgctaccgtcattagtgaactttcggaccaggctacgacgagtctgcaagagcttggagcttgggcagagggtgaccatgttacatttgacgcccgaactgaacatgtcgtgagtagtcaacacctgcttggcactgacgaaggtgatgcggacagcttgctgcttgacaccgcaatttctggcaatctagagtctcttcaggatctactgtcgagaatgcaagcagcatcaagctcagcacccgccatggacattccattgagggaacgaataacacgtacgtttctcgcagctattcacgagggcccacaagcctctttagaagtcttgctcgcaacaaaccttgtcgatctccgatccgaggacgacataaacgagaggaactgccttcaccaagcgacaatctatggcaattctttcgtccttggtgtaggtctctctgcgggagttgaagtcaataggacagatgtatatggaagggtaccgctacattatgcgagcatgcatgggcggctagacatgctacaagcactgcttcaagctgatccatcaacgatcgacatgatcgaccatgataacttcactccgctcatccatgccatcgtccatggtcatcttacttgtgtgcagctccttttggccgcctcttcgcggctggatcctgtctcggagacggatcatatacccctgaatctggcatgtgaacatggatcagtggaaatagtagaaactctactacagcacggcgcgcagatactcgctgatgctgagggattgtacccgcaacatctcgtggcccgctcgggtcagacaccacagctgcttcgtctactaaagcatcatggagcagatctagatcagatcgataagctttatgggtggactccgctggttcatgctgcaagtgaaggcaatgttccctgtctccaagagttgttgaatgtgggagttgacccgaatattctcgacgagaaggatttacctgctatgtactacgccgcctgggaggggcacttggcatgtatacagttactcacgccgtatcaaaaggacaagacacaaagtcctttgataatgcaaacccctggttcgttattagcacctataagtactggtagcggacccgttcccatgtctttagatgttgatgctatccctgtactcgagttaccgccacccatcattccgttgcgccggtacggacacaattttctggacaccaagacagtcgtccagattagctttgaagaggatggagagcagcctcttgtgtttttccatgatagcaaataccctgctgctcgccttaccatatcgtctaagctctctgatctcattccgaagaacatcatactgccgttccaggaagacacacggctagtctccttccaagtcgataacctcgacactttcactctcgacttcgacgtatttccgacatacggtgcgaagatcattgctaagacggtcgcgcttccaaacacctttagagcttccctgagcagctcgggcaagtgttgtcttccgctctttgacccacgacttcgggccatcggccagatcacgtttaatacacaggtgatcaagcctttccgaggagcgccgctagagatcaccgattttgagacgtattggaaagcaactagccagtctgatcagaatccgacaatgttcgtaacgggttcgagtctgtctggtgattttgttcagctccacatccagcacacctgcgatggtattccgatcgtgtggccgcggtggatgataaggtgcggcgatattgacattccagtgacgcacttgtcgtatgaacagttcatcgccgtgacctcgacaagccaggctcgtgcggaactcgaactgatacctactcgtggtcatgaagacattgcgcaggttcatcgtgtactctctgccgcgggtgtctctctagagcatgctctctctgtactgccctctaccatgcatgtcaacttacagattctatatccatccgaggaggaaagaagacagtatagcctaggcccgaccatgaacgtcaacgagttcgtggatgcaatcctgagcatcgtgtttgatcacgccagagagcagcgtgctagaacattgtccgtcccaagcccggtcagatccgtcgtgtttgggtcgtataatcccacgttgtgcgtcactctcaactggaagcagcccaactttcccgtcttcctctgcaacgacctcggcatggaggacctgatgtcagcaccgaacgtgatccagagcagcggtcgtagaacgctctcagtgaaagaggtggtcaggattgcgcagaacaacaaccttatgggacttatctgtaacgcgcgtctcctgaatatggtccccgcgcttgtcgatgcgatcaagtctcacggattggcacttgtggtcgatagatcggtagacgcgcaaccagacgtcgacacattccaacgctcgcccaagggcatagacggtgtgttgaagagcaacggtgtgttgcggttcaatgagtcgatcgaggtatga

SEQ ID NO: 33302 - protein, 1036 aa, Muscodor strobelii
  misc_feature: SGI Peptide ID NO. 571485
  misc_feature (487)..(519): Pfam Id: PF00023 Pfam Desc: Ankyrin repeat
  misc_feature (353)..(383): Pfam Id: PF00023 Pfam Desc: Ankyrin repeat
  misc_feature (22)..(188): Pfam Id: PF03105 Pfam Desc: SPX domain
  misc_feature (420)..(449): Pfam Id: PF00023 Pfam Desc: Ankyrin repeat
  misc_feature (387)..(419): Pfam Id: PF00023 Pfam Desc: Ankyrin repeat
  misc_feature (23)..(188): Pfam Id: PF03105 Pfam Desc: SPX domain
  misc_feature (23)..(1036): NCBI GI: 261355129 Blast Desc: ankyrin repeat protein nuc-2 [Verticillium albo-atrum VaMs.102]
  misc_feature (14)..(1036): NCBI GI: 145606138 Blast Desc: MGG_02514 [Magnaporthe grisea 70-15] gi|145013867|gb|EDJ98508.1| MGG_02514 [Magnaporthe grisea 70-15]
  misc_feature (23)..(1036): NCBI GI: 1399532 Blast Desc: NUC-2 [Neurospora crassa]
  misc_feature (23)..(1036): NCBI GI: 30581062 Blast Desc: NUC2_NEUCR RecName: Full=Ankyrin repeat protein nuc-2 gi|28881225|emb|CAD70463.1| Nuc-2 protein [Neurospora crassa]
  misc_feature (9)..(1036): NCBI GI: 46109324 Blast Desc: FG01544.1 [Gibberella zeae PH-1]
  misc_feature (9)..(1036): NCBI GI: 156044224 Blast Desc: SS1G_10215 [Sclerotinia sclerotiorum 1980] gi|154694604|gb|EDN94342.1| SS1G_10215 [Sclerotinia sclerotiorum 1980]
  misc_feature (19)..(1036): NCBI GI: 154305462 Blast Desc: BC1G_08500 [Botryotinia fuckeliana B05.10] gi|150853287|gb|EDN28479.1| BC1G_08500 [Botryotinia fuckeliana B05.10]
  misc_feature (17)..(1036): NCBI GI: 116199545 Blast Desc: CHGG_07928 [Chaetomium globosum CBS 148.51] gi|88179207|gb|EAQ86675.1| CHGG_07928 [Chaetomium globosum CBS 148.51]
  misc_feature (23)..(1036): NCBI GI: 171689520 Blast Desc: protein product [Podospora anserina] gi|170944722|emb|CAP70833.1| protein product [Podospora anserina]
  misc_feature (51)..(1001): NCBI GI: 164422349 Blast Desc: NCU11426 [Neurospora crassa OR74A] gi|157069542|gb|EDO64869.1| NCU11426 [Neurospora crassa OR74A]
  misc_feature (351)..(1022): SWISSPROT Homolog: EC 3.1.4.46 Glycerophosphodiester phosphodiesterase
MASATSPIPNVTSISRLSSAEAKFGKQIQKRQLEVPEYAASFVNYKALKKLIKRLSATPTLSAQTDPHLLTTPADTQTALQANKAKFFFQLERELEKVNAFYLQKEAELKVRLKTLIDKKRVLKSRQGLSRRSAKFTTLEEGFQQFANDLNKLQQFVEINGTAFSKILKKWDKTSKSKTKELYLSRAVEVQPFFNATVISELSDQATTSLQELGAWAEGDHVTFDARTEHVVSSQHLLGTDEGDADSLLLDTAISGNLESLQDLLSRMQAASSSAPAMDIPLRERITRTFLAAIHEGPQASLEVLLATNLVDLRSEDDINERNCLHQATIYGNSFVLGVGLSAGVEVNRTDVYGRVPLHYASMHGRLDMLQALLQADPSTIDMIDHDNFTPLIHAIVHGHLTCVQLLLAASSRLDPVSETDHIPLNLACEHGSVEIVETLLQHGAQILADAEGLYPQHLVARSGQTPQLLRLLKHHGADLDQIDKLYGWTPLVHAASEGNVPCLQELLNVGVDPNILDEKDLPAMYYAAWEGHLACIQLLTPYQKDKTQSPLIMQTPGSLLAPISTGSGPVPMSLDVDAIPVLELPPPIIPLRRYGHNFLDTKTVVQISFEEDGEQPLVFFHDSKYPAARLTISSKLSDLIPKNIILPFQEDTRLVSFQVDNLDTFTLDFDVFPTYGAKIIAKTVALPNTFRASLSSSGKCCLPLFDPRLRAIGQITFNTQVIKPFRGAPLEITDFETYWKATSQSDQNPTMFVTGSSLSGDFVQLHIQHTCDGIPIVWPRWMIRCGDIDIPVTHLSYEQFIAVTSTSQARAELELIPTRGHEDIAQVHRVLSAAGVSLEHALSVLPSTMHVNLQILYPSEEERRQYSLGPTMNVNEFVDAILSIVFDHAREQRARTLSVPSPVRSVVFGSYNPTLCVTLNWKQPNFPVFLCNDLGMEDLMSAPNVIQSSGRRTLSVKEVVRIAQNNNLMGLICNARLLNMVPALVDAIKSHGLALVVDRSVDAQPDVDTFQRSPKGIDGVLKSNGVLRFNESIEV

SEQ ID NO: 33303 - DNA, 8311 bp, Muscodor strobelii
  misc_feature: SGI EST ID NO. CUFF.78867.1
  misc_feature: Variant of the nucleotide sequence at SEQ ID NO 33301
gaaaacttggtcgaatactgggaataatcaactgtctgcaacgaacttgcctacggctttgtacgacaccacgctcttcccccagatcgtagtgactttcgatagggtagtcaatatgtgatgcagtgggctaatccctgttgcccgaacggagcatcgccttatttatgcattggtctgtgaggtcaagcggcatgaaagcgagtaaccttgccaaatcatgtgggaatatacttgtagctattgatggtagaccgatgtaacaatagtgtagcgggcaagaggtgcggcagctgggctagtagactgagatctcggcgcgcgagtaatgcgtcccccatgagttatgacgacaagcagagggtacagcgcaagggttttatactttagttcttaattattatcacatctttgggccctgaagaatatcggtcggtctgcttgtagcattcgtggagcttcgctgctagcttccaggcttgtctcgacactgaggcggctggactaaaaaccccactggtttattctcacgagaaagcaccacctcaatgtaccaccacacaacgcaaactccgaaacgcccctcatgacagatactctcaagaatctcagtctcgtcccgttcacacacagaggaaatctaatccagcatctcctcgattttatgctgatcagctttcagccttgatcataacagcgttacacctattcgcactctgagtggtctagtcataacgaggtagagttccattggccctgcgacttagtatgtatgcattacatgtcccagcacatccaccacaatcactcacccagcatcccagcattggcacagaaaagcaccgcgggttttcgttccagctactcgtagcttgtctcgtcactgataaataatttgtagctttcaaaacttatcgaaagctaggtacatctcaacctcgggtcttgttccgcatattaaacggcgcgagtgctttcacctattctatggcctctgctacatccccaatcccaaacgtcacatcgatttcaagactctcatcagccgaggcgtatgacccctgatcacggcagtcatttctgggcctatcaacgcttttgagtataccttgtagatgtgtcgctgcccaaatagcttctcgacaacttcagctactagtttccattggcgtcttcccgtgccttaaggactagtcactgcgtatttgaaaataaatattgactacttaaagtgcccttcgtagtatacttgacccatgatcgtccattgaagctcatggtcgaacctaccgtcccgagtagcaccacaagtcaccgtatcaaccttgctatcttatgacgtctcactgcatgttgcgcttccctacgcttttcacacggcaatacctatgatcgtcacctgatacagtcagatccaattagggagcaatactgcaagatatccttttcggcatcccgtccgttgaccaagtcgttaaacgacatatgctgagatcaagccagtcctttggtctagcccgctttatccagtttcgatcgtgtagacctatccgatgagatttgtccagaagcattagcattgtaccccaagtctctccatgacgcagtgcagacatatctcctgcttccatctcgcggcttcaggcaaacactagcgtagactcgaaaaggttactggtcaagtcttactgataccgcttacctgcatactggctccaaccggaaacggccgttggttggtggttttaagccgccttgattccatatatcggacgcatataagagcaagaaggacaccatgaaattcggcaaacagattcagaagcggcagcttgaagtgcccgagtatgccgcgagttttgtgaattacaaggcactcaaaaagcttatcaaaaggctttctgctactccgactctcagcgcgcaaactgatcctcatctgctcacgacacccgcagacacccagactgcactacaggcgaataaagcaaagttcttctttcaattggaacgagaattagaaaaggtgaatgcgttctacctacagaaagaagcagagctcaaagtacgcctcaagactctgatcgacaagaagagggttttaaaatcacgacaagggctttcgaggcgttcagcaaagttcactactctcgaagaagggttccagcaattcgccaacgatttgaacaaactacagcagttcgtcgagatcaatgggacagctttctctaagattcttaaaaagtgggacaagacatcaaagtcgaagacaaaagagctgtacctttctcgcgcagttgaggttcagcctttcttcaatgctaccgtcattagtgaactttcggaccaggctacgacgagtctgcaagagcttggagcttgggcagagggtgaccatgttacatttgacgcccgaactgaacatgtcgtgagtagtcaacacctgcttggcactgacgaaggtgatgcggacagcttgctgcttgacaccgcaatttctggcaatctagagtctcttcaggatctactgtcgagaatgcaagcagcatcaagctcagcacccgccatggacattccattgagggaacgaataacacgtacgtttctcgcagctattcacgagggcccacaagcctctttagaagtcttgctcgcaacaaaccttgtcgatctccgatccgaggacgacataaacgagaggaactgccttcaccaagcgacaatctatggcaattctttcgtccttggtgtaggtctctctgcgggagttgaagtcaataggacagatgtatatggaagggtaccgctacattatgcgagcatgcatgggcggctagacatgctacaagcactgcttcaagctgatccatcaacgatcgacatgatcgaccatgataacttcactccgctcatccatgccatcgtccatggtcatcttacttgtgtgcagctccttttggccgcctcttcgcggctggatcctgtctcggagacggatcatatacccctgaatctggcatgtgaacatggatcagtggaaatagtagaaactctactacagcacggcgcgcagatactcgctgatgctgagggattgtacccgcaacatctcgtggcccgctcgggtcagacaccacagctgcttcgtctactaaagcatcatggagcagatctagatcagatcgataagctttatgggtggactccgctggttcatgctgcaagtgaaggcaatgttccctgtctccaagagttgttgaatgtgggagttgacccgaatattctcgacgagaaggatttacctgctatgtactacgccgcctgggaggggcacttggcatgtatacagttactcacgccgtatcaaaaggacaagacacaaagtcctttgataatgcaaacccctggttcgttattagcacctataagtactggtagcggacccgttcccatgtctttagatgttgatgctatccctgtactcgagttaccgccacccatcattccgttgcgccggtacggacacaattttctggacaccaagacagtcgtccagattagctttgaagaggatggagagcagcctcttgtgtttttccatgatagcaaataccctgctgctcgccttaccatatcgtctaagctctctgatctcattccgaagaacatcatactgccgttccaggaagacacacggctagtctccttccaagtcgataacctcgacactttcactctcgacttcgacgtatttccgacatacggtgcgaagatcattgctaagacggtcgcgcttccaaacacctttagagcttccctgagcagctcgggcaagtgttgtcttccgctctttgacccacgacttcgggccatcggccagatcacgtttaatacacaggtgatcaagcctttccgaggagcgccgctagagatcaccgattttgagacgtattggaaagcaactagccagtctgatcagaatccgacaatgttcgtaacgggttcgagtctgtctggtgattttgttcagctccacatccagcacacctgcgatggtattccgatcgtgtggccgcggtggatgataaggtgcggcgatattgacattccagtgacgcacttgtcgtatgaacagttcatcgccgtgacctcgacaagccaggctcgtgcggaactcgaactgatacctactcgtggtcatgaagacattgcgcaggttcatcgtgtactctctgccgcgggtgtctctctagagcatgctctctctgtactgccctctaccatgcatgtcaacttacagattctatatccatccgaggaggaaagaagacagtatagcctaggcccgaccatgaacgtcaacgagttcgtggatgcaatcctgagcatcgtgtttgatcacgccagagagcagcgtgctagaacattgtccgtcccaagcccggtcagatccgtcgtgtttgggtcgtataatcccacgttgtgcgtcactctcaactggaagcagcccaactttcccgtcttcctctgcaacgacctcggcatggaggacctgatgtcagcaccgaacgtgatccagagcagcggtcgtagaacgctctcagtgaaagaggtggtcaggattgcgcagaacaacaaccttatgggacttatctgtaacgcgcgtctcctgaatatggtccccgcgcttgtcgatgcgatcaagtctcacggattggcacttgtggtcgatagatcggtagacgcgcaaccagacgtcgacacattccaacgctcgcccaagggcatagacggtgtgttgaagagcaacggtgtgttgcggttcaatgagtcgatcgaggtatgagaaagatggtattggtgctccagagaaaagggggaaacggagtagagttaggagcacggaactaattttgagtgttccacgacacaaggtataatataagatacgagcgctgggggactggctctatttcgcatgacgggtatgctgcgcttctggtggctcattctacattaagtgtcaactggttgcttcttaggtggaggattgctgaatacccttgggtggcaggggggaaaattgggagcggatgcagcatgtgatgagcgcatgccacaaattgtgcttgtttatagattgtgcagtatcacagcgaaagaaattgagaaaatttcaaaactcatatctggggtatcactaggtaattatattatacgcaccacgcgcaagaccagagccaactctggtgcatagcaaaccgttccgttcttattacatatcccttagcccccgttgcccctagcaccggacaagaagagaagcaacgaaacacggcatgatcaagcacctttatactcgtaccgtaaagccgccaactctctctcgggatcaacactacccatgaacatcttggcgatgagcacaacggcgtacacgacagcgggcagattagcgagtcccacgtgtccccagtgctgctcctgaactcgtttgggggacaggaaaccagtcaggactagcacgcacgagagcccgaggttgaggaatgggaggtaggcttctaagggcgatcggtgctgagaccagaagacgcgcgtgttggtcccgctcaaccgtctgcgacgctgggcgtttgcgccgatggggatttgtaggtcgggcgtttgggtgtgggtggatgtggatgaggttggggatggtgatgtggatgcgggtttgacccaggcgtcgaggatcttgacgcctgtcacgcctggtgggaggaagtagagagaccaggcggtgcaggataggcttgagagggcgaggagggcggtccagaagtcggaggggcggcgggaggacgagaagagcagggttaggtaggggatggtggagagcagcgggacggagaggagaaagatgcggaattgggcgttgcgcgtgtcgttttgtcgggttaggtgttggattagggagtcttgctcttgctcgtcgagcgcgggcccgtctgagtcggagtctgggtgggatgttgttggtgttgttgtgtcggaggggtaggcgaatgttcgccgtagacgcgctgtggcgtcgcttaggtccatggtagacgtgaggttgtggatgcgactgatgtgacgaggagattcgaggtccggcgcggtgaggatgcgctgcgacgttgagtgaggtgctgtggaggggtcgttgaatcttgatcttattcgtcgtaagtctaagaggctgagcaaaggtgcgatagccgctatgatatcgtcatgttattactaccataggcaccgatggctacctaggcagccagattgtgtagatggaagggtttgcgcattcgaagatgccagtatggaagagacggctgaagggagcttgtgactctggaatggataggtgacgtagacgcacttttcagggtccaacaaagtgtggctgaggggacaatagcatcagcccccagtatgcttgggaaatacaccacctacggatactttgagagcctatctattgttgaatgatgtatcatagaaatgacaatcgaatgtcaaaatggtttcatgtcatatttcgagacactgctatatagagagagtgaatgtatctatgcgctctcccatgctcgggcaaataccctgaagttgttcgattccaatgtaaataggctctgatgggaatttaggcactgccgtaagcctagctcagatttcttttctcttcttgaaaatagcagtgattcgtatcgaattgttattcccaattattccagtaatgatcgcgcttcatgtttcgtgatatgatggtgcagagtggaaatgctgctatgggcttgatgatagaagatgtcaatattatctgcaagggtgtttgttgcgttgatccttttcgtacagttttagatagtctaatatctttacacatctccaagtttatatactctcttaagtcgcagggcgctgatgctctttcatgcttatctaggcaatagagatgaatggcataactctaaacactcgccactagtcaagtggtggacggtaaagttgaatagccatgattatgtaacactcttatgatacacataaaatacgttatgcaagtgaacattttggtacattatgtagaggtcgtggggaaattcttgaaatttccattgttatcgtatttggcttctgcaaaacgcaagcaagtcagtatctctcccttaaacatcgttaagataataccaacttactgaagaacgtataactcagcgtcacctcattaatcccccgcatattcaaatcatccaacaagtccggatcaaggtagaaaaacacgggcatatcgaccgtctccccggcattaagcctctgctcctcaaagcagaaacactggatcttgctgaagtacggcgccacctgtgccggcgtcacgctgtacgtcgctacgccgatgatgtcgctgtcgctgcggtttgtcgccgtgtagaacgccagcgccgtctcgccggggagcacccgcacttcgcgctgctggggtgtgaatttccaggggaggacgtcggagacggaggcgttgaacgtcacgcggatgcgccgtgcgtccttcactggtacgagccgtgatgctggatcttggtcgccgccgacgccgctgtggcctggtgctcggatgggttggccgccccagcctgttgtctggcagatctgtatcacgcagcgacatgtcagaaagattccctcgtataattgtggatgtatgacgcggagcggaagctttgtgcaagagccgcagatagggaggataagtcgcgaagacgaaccatcttatacataggcacagagccgtacgagaaagcgacggtgccgaggatgatgctgagcgtatagaacctgacatagcacttcgtcagctttccgtttcccgtaaccattggtctaagacatctcgtctagggaagtatttgcatacatggtcgttctattcttgtatttgtagtgctcccgcaggcgctccattgagggcgcactcgcctgctggtgctgctgttgcgttttggccgtggtcttcgagaatggtcttcgcggcgagcgattgggcgattgcctcgctggtgcgagtcctcggcgacatgatgcacatgcccaggacgaggtgctcgattggagcgccctccacgatatacggggtgctgagttcatgtttcgagcgtgacagaagctgttagtctttttacacgctgaatcaatgatcggtctttgaagctgtcatatgtttcgcagacttggagctctcaatcgataaaactgcgggcggcgcagatcgatgcaa

SEQ ID NO: 33304 - DNA, 1551 bp, Muscodor strobelii
  misc_feature: SGI cDNA ID NO. 571486
  misc_feature: Elevated expression when VOC is produced
  misc_feature: Encodes the peptide sequence at SEQ ID NO 33305
atggcgtcgtcacatatcgggacatacgtgctaattgcgattggttcggcaattgcttggcaggttgccaccgttatccgcaacctctactttcatagtctgagcagatttcccgggccatttattcagagggcatctggcattccgtttgcacttcagcattgtaccggagtgcaggctttcaacacacagaagctacatgatatgctaccgcaatctataaacctccgaatcatagtcttcgactatcagcaggaactctcacgtcaagattatccgaaggcatggaaagatatatatggacaccgtgtcggtggtgatattcacagctccgagaatccgaaggacgggacgttcaataactcaatcaaaaacatcccaaaacagatcttgaacgcagatcgcgaggaacactctcgttttcgccgtaccttgtctcatggattttcggacgcatccatgcgtgcccaagagtcggagatcgtgaaatacgtggacctgctcattaagcgtcttcacgaagaatgccatgatggtgccgagaagttgaacgtatgtagttttcccgataacattatcgaggcttggtacaactggacgacttttgacatcattggcaacttggttttcggacagtctttcaactgccttgaaaacgtccactaccatccttggattgagttcattttgaagactgtcagactcggctcgtttgctgtggcattaacctacgttggcttgtccgaagtggtgcagatgttgtacagaatgaatggctctgccatcaagcggacccagggtctcacgagagacttggtcgtctcgcgtttatccatggacacaccgcgaaatgatctatttgaaggtcttgtcaaaaagcgcgaagaatggaatctctctttcgaaaagctgtcatcaaatgcgttccttttggtacttgccgggtcagaaactactgctacgacactctcgggtgcaacatatctgctgttgactcacccggagattctagagaagctacaactcgaggtcagatcatcgtttacagagtcccatgaaatcacgatcaatactgtgagcaagctaccatacatgcttgccatactcaacgaagcattacgcatgtatcccccggtcacttcaggccttgttcgaaaagcacccaagggaggtgctacaattgccggtcattatgttccagaaggcacgagattcgagattcagcaatggtcaatgaatcatagcccagagaattgggccgacccttgggcgttcaagcccgagaggttcttgggcacgaccgaagaagccatgcaagctggtaacaagttggaggcgctccaagctttcagcgtgggtccgaggaattgtataggtcgcaatcttgcatatgccgagatgcgcatcattcttgctcgcattatcttcgattttgaccttgtgttgtccccggaatctcagcaatggatcgataggcaacatgcctattctctatgggaaagggttccactcaatgtcttcgcaaaacctgttcgtccggcgaagagatag

SEQ ID NO: 33305 - protein, 516 aa, Muscodor strobelii
  misc_feature: SGI Peptide ID NO. 571486
  misc_feature (69)..(510): Pfam Id: PF00067 Pfam Desc: Cytochrome P450
  misc_feature (299)..(489): Pfam Id: PF00067 Pfam Desc: Cytochrome P450
  misc_feature (23)..(511): NCBI GI: 242801846 Blast Desc: cytochrome P450, [Talaromyces stipitatus ATCC 10500] gi|218717198|gb|EED16619.1| cytochrome P450, [Talaromyces stipitatus ATCC 10500]
  misc_feature (93)..(511): NCBI GI: 212545777 Blast Desc: benzoate 4-monooxygenase cytochrome P450, [Penicillium marneffei ATCC 18224] gi|210064562|gb|EEA18657.1| benzoate 4-monooxygenase cytochrome P450, [Penicillium marneffei ATCC
  misc_feature (10)..(516): NCBI GI: 224969386 Blast Desc: cytochrome P450 ClCP1 [Glomerella lindemuthiana]
  misc_feature (14)..(461): NCBI GI: 261357983 Blast Desc: isotrichodermin C-15 hydroxylase [Verticillium albo-atrum VaMs.102]
  misc_feature (12)..(510): NCBI GI: 212545779 Blast Desc: cytochrome P450 monooxygenase, [Penicillium marneffei ATCC 18224] gi|210064563|gb|EEA18658.1| cytochrome P450 monooxygenase, [Penicillium marneffei ATCC 18224]
  misc_feature (1)..(512): NCBI GI: 242826764 Blast Desc: cytochrome P450, [Talaromyces stipitatus ATCC 10500] gi|242826769|ref|XP_002488699.1| cytochrome P450, [Talaromyces stipitatus ATCC 10500] gi|218712090|gb|EED11517.1| cytochrome
  misc_feature (13)..(512): NCBI GI: 239612397 Blast Desc: cytochrome P450 monooxygenase [Ajellomyces dermatitidis ER-3]
  misc_feature (13)..(512): NCBI GI: 261202730 Blast Desc: cytochrome P450 monooxygenase [Ajellomyces dermatitidis SLH14081] gi|239590676|gb|EEQ73257.1| cytochrome P450 monooxygenase [Ajellomyces dermatitidis SLH14081]
  misc_feature (11)..(510): NCBI GI: 242801842 Blast Desc: cytochrome P450, [Talaromyces stipitatus ATCC 10500] gi|218717197|gb|EED16618.1| cytochrome P450, [Talaromyces stipitatus ATCC 10500]
  misc_feature (8)..(513): NCBI GI: 145608550 Blast Desc: MGG_06544 [Magnaporthe grisea 70-15] gi|145016015|gb|EDK00505.1| MGG_06544 [Magnaporthe grisea 70-15]
  misc_feature (128)..(487): SWISSPROT Homolog: EC 1.14.14.1 Unspecific monooxygenase
  misc_feature: Useful for introducing or modulating the production of volatile compounds
MASSHIGTYVLIAIGSAIAWQVATVIRNLYFHSLSRFPGPFIQRASGIPFALQHCTGVQAFNTQKLHDMLPQSINLRIIVFDYQQELSRQDYPKAWKDIYGHRVGGDIHSSENPKDGTFNNSIKNIPKQILNADREEHSRFRRTLSHGFSDASMRAQESEIVKYVDLLIKRLHEECHDGAEKLNVCSFPDNIIEAWYNWTTFDIIGNLVFGQSFNCLENVHYHPWIEFILKTVRLGSFAVALTYVGLSEVVQMLYRMNGSAIKRTQGLTRDLVVSRLSMDTPRNDLFEGLVKKREEWNLSFEKLSSNAFLLVLAGSETTATTLSGATYLLLTHPEILEKLQLEVRSSFTESHEITINTVSKLPYMLAILNEALRMYPPVTSGLVRKAPKGGATIAGHYVPEGTRFEIQQWSMNHSPENWADPWAFKPERFLGTTEEAMQAGNKLEALQAFSVGPRNCIGRNLAYAEMRIILARIIFDFDLVLSPESQQWIDRQHAYSLWERVPLNVFAKPVRPAKR

SEQ ID NO: 33306 - DNA, 1208 bp, Muscodor strobelii
  misc_feature: SGI EST ID NO. CUFF.78737.0
  misc_feature: Variant of the nucleotide sequence at SEQ ID NO 33304
ggcttggtacaactggacgacttttgacatcattggcaacttggttttcggacagtctttcaactgccttgaaaacgtccactaccatccttggattgagttcattttgaagactgtcagactcggctcgtttgctgtggcattaacctacgttggcttgtccgaagtggtgcagatgttgtacagaatgaatggctctgccatcaagcggacccagggtctcacgagagacttggtcgtctcgcgtttatccatggacacaccgcgaaatgatctatttgaaggtcttgtcaaaaagcgcgaagaatggaatctctctttcgaaaagctgtcatcaaatgcgttccttttggtacttgccgggtcagaaactactgctacgacactctcgggtgcaacatatctgctgttgactcacccggagattctagagaagctacaactcgaggtcagatcatcgtttacagagtcccatgaaatcacgatcaatactgtgagcaagctaccatacatgcttgccatactcaacgaagcattacgcatgtatcccccggtcacttcaggccttgttcgaaaagcacccaagggaggtgctacaattgccggtcattatgttccagaaggcacgagattcgagattcagcaatggtcaatgaatcatagcccagagaattgggccgacccttgggcgttcaagcccgagaggttcttgggcacgaccgaagaagccatgcaagctggtaacaagttggaggcgctccaagctttcagcgtgggtccgaggaattgtataggtcgcaatcttgcatatgccgagatgcgcatcattcttgctcgcattatcttcgattttgaccttgtgttgtccccggaatctcagcaatggatcgataggcaacatgcctattctctatgggaaagggttccactcaatgtcttcgcaaaacctgttcgtccggcgaagagataggaataagtcaaaaggagcttcttcgacgtttgcaatccttctatattgggacattctggtgttatttgaagcggagttatgcataggtgtttgtgttattggtctcatcgctagagaaaagcttttggaagtttgtcctcgagaacccgaggatattgatagattgcattgtacaaaaatccagatttccaagtgtcaactacattatatctcggcctcttaagatcatgcatatggc

SEQ ID NO: 33307 - DNA, 1317 bp, Muscodor strobelii
  misc_feature: SGI cDNA ID NO. 571487
  misc_feature: Reduced expression when VOC is produced
  misc_feature: Encodes the peptide sequence at SEQ ID NO 33308
atgtcagctccttctgacacggagaaaaagaacagtcatcctactaccgcatcgcctgctcccgagtcgcccaccaccgtgcaccccttcgagatggacgatgacgacgttgttgagaccggtgtcctgaacaacgacgacaccaacacggcgcgccctgctgctcccgccacacagcaccaggcttccgtgacatctgcgccctcgacgcctatgcccgactcagcgactgcccccgcgaagcccccgcgcccgctcaccgagcagcagaagaatgagcagattctaaaggaggctttcccctccatagatgccaccgtcatcaaggctgtcctcgccgctagcggtggccagatcgacccggctttcaatgccctactgggcatgagtgaccccgacgccgtccagaacgagcccgcccgagagcctgcccctccgccacagcctcccagaccaaccggccgcgcccccatgtcccagatggaggccgacgagctctatgctcgccaacttgccgagcactacgacaacgtcggcgcctacgaagcaagaaccacaaaccgtgggcctggctcccagccgagacgacaggcaactggcttgaagcccaacgagatgtacgatcgggaacacagcttcatcgacgacgacctgcccgttattaccgagaatctacgcaagggcttcgtcgagacccagtccaaagtcaacacctggttcaccaacctgaagaagaagatcgacggagagtacaactcggatgaggacgagtctcagccctcgaaacaccaaccccaccacggcggcccgggacgaaggagtggagaagcgagtcgccggagcgccgattatcaccgttacgacgccgatcctcaagttctgagcgacgactttgccggcatcaggctccagcccggcggcaggtcgcctcaaccgggccgacaatcaagcaacccccatctgaataaacctctcccgaccgctacgtccccgagccctgacggccgaaaggtcgctttcaaggacaacaccgaagacatcggtccttacgacacgtctccaaagctgccgccgaaagacagcacagcaagcccggccgccagtaagcagagcaaatggcagcccttgtcaacagtagagcccagccccatgaccgagaacgatcccttcagccttggagatagtgaagacgagaaggaatccaagggcggcaacaaggacatcaagctggaagacaacgagaggctgcgactggcgactgctgacgctatggcggatgatctggtaggatcaagtcctgctaacaagaaggaatag

SEQ ID NO: 33308 - protein, 438 aa, Muscodor strobelii
  misc_feature: SGI Peptide ID NO. 571487
  misc_feature (88)..(130): Pfam Id: PF02845 Pfam Desc: CUE domain
  misc_feature (16)..(431): NCBI GI: 256730568 Blast Desc: NECHADRAFT_30457 [Nectria haematococca mpVI 77-13-4]
  misc_feature (20)..(429): NCBI GI: 116199543 Blast Desc: CHGG_07927 [Chaetomium globosum CBS 148.51] gi|88179206|gb|EAQ86674.1| CHGG_07927 [Chaetomium globosum CBS 148.51]
  misc_feature (1)..(438): NCBI GI: 261355128 Blast Desc: conserved [Verticillium albo-atrum VaMs.102]
  misc_feature (1)..(438): NCBI GI: 164422351 Blast Desc: NCU11427 [Neurospora crassa OR74A] gi|157069543|gb|EDO64870.1| [Neurospora crassa OR74A]
  misc_feature (1)..(429): NCBI GI: 171689518 Blast Desc: protein product [Podospora anserina] gi|170944721|emb|CAP70832.1| protein product [Podospora anserina]
  misc_feature (1)..(429): NCBI GI: 39968847 Blast Desc: MGG_02516 [Magnaporthe grisea 70-15] gi|145013865|gb|EDJ98506.1| MGG_02516 [Magnaporthe grisea 70-15]
  misc_feature (1)..(438): NCBI GI: 156044226 Blast Desc: SS1G_10216 [Sclerotinia sclerotiorum 1980] gi|154694605|gb|EDN94343.1| SS1G_10216 [Sclerotinia sclerotiorum 1980]
  misc_feature (25)..(438): NCBI GI: 154305460 Blast Desc: BC1G_08499 [Botryotinia fuckeliana B05.10] gi|150853286|gb|EDN28478.1| BC1G_08499 [Botryotinia fuckeliana B05.10]
  misc_feature (3)..(432): NCBI GI: 115402117 Blast Desc: conserved [Aspergillus terreus NIH2624] gi|114188981|gb|EAU30681.1| conserved [Aspergillus terreus NIH2624]
  misc_feature (21)..(433): NCBI GI: 225557769 Blast Desc: conserved [Ajellomyces capsulatus G186AR]
  misc_feature: Useful for introducing or modulating the production of volatile compounds
MSAPSDTEKKNSHPTTASPAPESPTTVHPFEMDDDDVVETGVLNNDDTNTARPAAPATQHQASVTSAPSTPMPDSATAPAKPPRPLTEQQKNEQILKEAFPSIDATVIKAVLAASGGQIDPAFNALLGMSDPDAVQNEPAREPAPPPQPPRPTGRAPMSQMEADELYARQLAEHYDNVGAYEARTTNRGPGSQPRRQATGLKPNEMYDREHSFIDDDLPVITENLRKGFVETQSKVNTWFTNLKKKIDGEYNSDEDESQPSKHQPHHGGPGRRSGEASRRSADYHRYDADPQVLSDDFAGIRLQPGGRSPQPGRQSSNPHLNKPLPTATSPSPDGRKVAFKDNTEDIGPYDTSPKLPPKDSTASPAASKQSKWQPLSTVEPSPMTENDPFSLGDSEDEKESKGGNKDIKLEDNERLRLATADAMADDLVGSSPANKKE

SEQ ID NO: 33309 - DNA, 1849 bp, Muscodor strobelii
  misc_feature: SGI EST ID NO. CUFF.79032.2
  misc_feature: Variant of the nucleotide sequence at SEQ ID NO 33307
cgccgctgacatctgtctggccctctgcctttacgtacgcgcatttcagtgcttgaggttatctatcggtcattgcctccagctcaacacgaatatcttttagacatcaaatcttcgcccatacaattctcctttagttctccgtcggcagtgagctacagtgctacgacatcctttggccgtccaacatcatcatgtcagctccttctgacacggagaaaaagaacagtcatcctactaccgcatcgcctgctcccgagtcgcccaccaccgtgcaccccttcgagatggacgatgacgacgttgttgagaccggtgtcctgaacaacgacgacaccaacacggcgcgccctgctgctcccgccacacagcaccaggcttccgtgacatctgcgccctcgacgcctatgcccgactcagcgactgcccccgcgaagcccccgcgcccgctcaccgagcagcagaagaatgagcagattctaaaggaggctttcccctccatagatgccaccgtcatcaaggctgtcctcgccgctagcggtggccagatcgacccggctttcaatgccctactgggcatgagtgaccccgacgccgtccagaacgagcccgcccgagagcctgcccctccgccacagcctcccagaccaaccggccgcgcccccatgtcccagatggaggccgacgagctctatgctcgccaacttgccgagcactacgacaacgtcggcgcctacgaagcaagaaccacaaaccgtgggcctggctcccagccgagacgacaggcaactggcttgaagcccaacgagatgtacgatcgggaacacagcttcatcgacgacgacctgcccgttattaccgagaatctacgcaagggcttcgtcgagacccagtccaaagtcaacacctggttcaccaacctgaagaagaagatcgacggagagtacaactcggatgaggacgagtctcagccctcgaaacaccaaccccaccacggcggcccgggacgaaggagtggagaagcgagtcgccggagcgccgattatcaccgttacgacgccgatcctcaagttctgagcgacgactttgccggcatcaggctccagcccggcggcaggtcgcctcaaccgggccgacaatcaagcaacccccatctgaataaacctctcccgaccgctacgtccccgagccctgacggccgaaaggtcgctttcaaggacaacaccgaagacatcggtccttacgacacgtctccaaagctgccgccgaaagacagcacagcaagcccggccgccagtaagcagagcaaatggcagcccttgtcaacagtagagcccagccccatgaccgagaacgatcccttcagccttggagatagtgaagacgagaaggaatccaagggcggcaacaaggacatcaagctggaagacaacgagaggctgcgactggcgactgctgacgctatggcggatgatctggtaggatcaagtcctgctaacaagaaggaatagcatactgtaccatgacagattacttgattcaattgtttcagatattcgctgtagttaggccaatcgacggcagagacggcagggcagcactagtattccctatcaatgtcgaattctgttgaggcttaaagcccgatgatcaatgcatcgcttttccccatatgttccgataaagaatcgtcgtggactgctgctgtgttctacgtattatggggttcgtgcgaaatacaaatataagatatgcatgagattagtgtagagtgcctatactctgtgtgtggcatgttccagatctgaatcgctgtgtctgacgcgcctgttttccctcgaggttcatg

SEQ ID NO: 33310 - DNA, 2004 bp, Muscodor strobelii
  misc_feature: SGI cDNA ID NO. 571488
  misc_feature: Reduced expression when VOC is produced
  misc_feature: Encodes the peptide sequence at SEQ ID NO 33311
atggctgattttgatttgagctcggccttcattccagctcttcacaaacctgctgcgctgcttcccattacgaagcatcacgacagtctgctctaccttattgagacttaccccgtcgtcatcgtcgtcggccagactggctccggaaagactacccagatacctcagtttctggagcatgccggctggtgttccgatggcaaggtcatcgcaatcacccagcctcggcgggttgcagcgaccactgttgccatcagagtggccgaggaatatggctgcgaggtgggcaaggaagttggatactccattcgattcgaggacaccacctctgctgctacccgtatcaagtttatgaccgatggcctgctcatccgagaggctctcgtagaccctttactctcacgctattctgtcatcatggttgacgaggcccatgaaaggtccatcagtaccgacattctcctggggcttctgaagaaaatcagaaagcggagacctgaactacgcataattatcagcagtgctacgcttcaggcagaagaattccttgatttcttcagcgaggattccagcgatacagtcaggcccggagatcaaggggcgacgggcacaataattagcctcgagggccggacgtatcccatcgatgtgctttacctagattcgcctgctgaagactatgtcgaaaaggctgtctcgacggtattcgacattcacaataccgagcccgagggcgatattcttgtcttcctaacaggacgtgaagaaattgatactgcagttcaagctatccgcgaacgatcagctcagctcgatcccgccatgcagtcacttttggcccttcccctatatgccggtttgtcgactgaacagcaaatgtacgtcttcgacgcgccacccgaaaacacaagaaaagttatcctctccacgaacatcgccgaagcgtctgtgactatcgacggtatcgtctatgtgattgattcgggcttcgtgaagctaagagcattcaatcctcgaaccggtatagaatcattaacggcgactgatgtatccaaagcttcagcagcgcagagagcgggtcgagctggtcgcacaaaaccagggaaatgttttcggctcttcactgaagacgcctaccaagctcttcctgatatgaacccacctgaaattcaaaggtccaatcttgcgccttttattctacagctcaaagcccttggcattgacaatgttgttcgtttcaattacctcacggcacctcccgcggaactcatgatcaaagcgacagaactactttactcactcggagcccttgatgactacgctaaactcacgaaaccactagggatgaggatggccgaacttgcagtggagccgatgatggcaaagacactgttgagtgcgtcttcctttgactgtctcagtgagattctcaccattgcgtctatgacgagtgttgggggctctatttggtactacgatgatggcgacaagaaacagatggaatctgcccgacgcaagtttgctgccgaagaaggcgatcatttaactctgctgaatgtttatcaagcattcgtgacgaaaggtaaaaaggaggccaggttttgtcacgataatcatctcaattataaagcgctgtgccgggccgtcagtattcgcggtcagctgaagcgctacttggaacggtttggtctcacggtagatgagaacctcgcaagtcgagcaccacgtgaaggtagaggtggtcaaattcgcaggtgtttgacaacaggctacttcgcgcatgcagcaaagatgcaacccgatggtagctttcgtactgctgaaggtggaacttcgctctacgctcatccaagctcattaatgttcaaccggaaagccgactgggtggtcttccatgagatcatggagactggcagcaagatctttatccgcgatgtcaccaagatcgagaaaagctggctgttggaatattcatcggggttttatcagattagaccaaagtga

SEQ ID NO: 33311 - protein, 667 aa, Muscodor strobelii
  misc_feature: SGI Peptide ID NO. 571488
  misc_feature (553)..(662): Pfam Id: PF07717 Pfam Desc: Domain of function (DUF1605)
  misc_feature (426)..(518): Pfam Id: PF04408 Pfam Desc: Helicase associated domain (HA2)
  misc_feature (272)..(366): Pfam Id: PF00271 Pfam Desc: Helicase conserved C-terminal domain
  misc_feature (1)..(663): NCBI GI: 171689394 Blast Desc: protein product [Podospora anserina] gi|170944659|emb|CAP70770.1| protein product [Podospora anserina]
  misc_feature (1)..(664): NCBI GI: 256730781 Blast Desc: NECHADRAFT_89726 [Nectria haematococca mpVI 77-13-4]
  misc_feature (2)..(662): NCBI GI: 85110535 Blast Desc: NCU06735 [Neurospora crassa OR74A] gi|28881369|emb|CAD70411.1| related to ATP-dependent RNA helicase [Neurospora crassa] gi|28925190|gb|EAA34271.1| NCU06735 crassa
  misc_feature (1)..(664): NCBI GI: 156066055 Blast Desc: SS1G_01039 [Sclerotinia sclerotiorum 1980] gi|154691897|gb|EDN91635.1| SS1G_01039 [Sclerotinia sclerotiorum 1980]
  misc_feature (1)..(663): NCBI GI: 145606134 Blast Desc: MGG_02518 [Magnaporthe grisea 70-15] gi|145013863|gb|EDJ98504.1| MGG_02518 [Magnaporthe grisea 70-15]
  misc_feature (3)..(664): NCBI GI: 212528124 Blast Desc: ATP dependent RNA helicase, [Penicillium marneffei ATCC 18224] gi|210073617|gb|EEA27704.1| ATP dependent RNA helicase, [Penicillium marneffei ATCC 18224]
  misc_feature (5)..(665): NCBI GI: 255939678 Blast Desc: Pc16g02360 [Penicillium chrysogenum Wisconsin 54-1255] gi|211585231|emb|CAP92906.1| Pc16g02360 [Penicillium chrysogenum Wisconsin 54-1255]
  misc_feature (2)..(665): NCBI GI: 115402115 Blast Desc: ATEG_08548 [Aspergillus terreus NIH2624] gi|114188980|gb|EAU30680.1| ATEG_08548 [Aspergillus terreus NIH2624]
  misc_feature (1)..(664): NCBI GI: 242767257 Blast Desc: ATP dependent RNA helicase, [Talaromyces stipitatus ATCC 10500] gi|218724530|gb|EED23947.1| ATP dependent RNA helicase, [Talaromyces stipitatus ATCC 10500]
  misc_feature (2)..(665): NCBI GI: 261198893 Blast Desc: ATP dependent RNA helicase [Ajellomyces dermatitidis SLH14081] gi|239595000|gb|EEQ77581.1| ATP dependent RNA helicase [Ajellomyces dermatitidis SLH14081] gi|239609889|gb|EEQ86876.1|
  misc_feature: Useful for introducing or modulating the production of volatile compounds
MADFDLSSAFIPALHKPAALLPITKHHDSLLYLIETYPVVIVVGQTGSGKTTQIPQFLEHAGWCSDGKVIAITQPRRVAATTVAIRVAEEYGCEVGKEVGYSIRFEDTTSAATRIKFMTDGLLIREALVDPLLSRYSVIMVDEAHERSISTDILLGLLKKIRKRRPELRIIISSATLQAEEFLDFFSEDSSDTVRPGDQGATGTIISLEGRTYPIDVLYLDSPAEDYVEKAVSTVFDIHNTEPEGDILVFLTGREEIDTAVQAIRERSAQLDPAMQSLLALPLYAGLSTEQQMYVFDAPPENTRKVILSTNIAEASVTIDGIVYVIDSGFVKLRAFNPRTGIESLTATDVSKASAAQRAGRAGRTKPGKCFRLFTEDAYQALPDMNPPEIQRSNLAPFILQLKALGIDNVVRFNYLTAPPAELMIKATELLYSLGALDDYAKLTKPLGMRMAELAVEPMMAKTLLSASSFDCLSEILTIASMTSVGGSIWYYDDGDKKQMESARRKFAAEEGDHLTLLNVYQAFVTKGKKEARFCHDNHLNYKALCRAVSIRGQLKRYLERFGLTVDENLASRAPREGRGGQIRRCLTTGYFAHAAKMQPDGSFRTAEGGTSLYAHPSSLMFNRKADWVVFHEIMETGSKIFIRDVTKIEKSWLLEYSSGFYQIRPK

SEQ ID NO: 33312 - DNA, 3221 bp, Muscodor strobelii
  misc_feature: SGI EST ID NO. CUFF.78733.0
  misc_feature: Variant of the nucleotide sequence at SEQ ID NO 33310
cgcctcaacatcttagttaccaatcgttgcaatactcatattgaatgaaatgtactatgcattctcatcatctacgcacgaatctcgggtcattcattgacatataagcattgggtggacacggccaagcggagcctgggccatctataagctgtcgggacttgctacttcgtcacaagtcagaaacgactaccaatggtgtattagtctctccgtagaatcatatgcatccatccaattctaacgtaccgcacgccatgggccaaggcagtccttagactactttgtacgtgaaggcagcattggacgcatacatctccagtgattgggaggggtcctgattatggctgattttgatttgagctcggccttcattccagctcttcacaaacctgctgcgctgcttcccattacgaagcatcacgacagtctgctctaccttattgagacttaccccgtcgtcatcgtcgtcggccagactggctccggaaagactacccagatacctcagtttctggagcatgccggctggtgttccgatggcaaggtcatcgcaatcacccagcctcggcgggttgcagcgaccactgttgccatcagagtggccgaggaatatggctgcgaggtgggcaaggaagttggatactccattcgattcgaggacaccacctctgctgctacccgtatcaagtttatgaccgatggcctgctcatccgagaggctctcgtagaccctttactctcacgctattctgtcatcatggttgacgaggcccatgaaaggtccatcagtaccgacattctcctggggcttctgaagaaaatcagaaagcggagacctgaactacgcataattatcagcagtgctacgcttcaggcagaagaattccttgatttcttcagcgaggattccagcgatacagtcaggcccggagatcaaggggcgacgggcacaataattagcctcgagggccggacgtatcccatcgatgtgctttacctagattcgcctgctgaagactatgtcgaaaaggctgtctcgacggtattcgacattcacaataccgagcccgagggcgatattcttgtcttcctaacaggacgtgaagaaattgatactgcagttcaagctatccgcgaacgatcagctcagctcgatcccgccatgcagtcacttttggcccttcccctatatgccggtttgtcgactgaacagcaaatgtacgtcttcgacgcgccacccgaaaacacaagaaaagttatcctctccacgaacatcgccgaagcgtctgtgactatcgacggtatcgtctatgtgattgattcgggcttcgtgaagctaagagcattcaatcctcgaaccggtatagaatcattaacggcgactgatgtatccaaagcttcagcagcgcagagagcgggtcgagctggtcgcacaaaaccagggaaatgttttcggctcttcactgaagacgcctaccaagctcttcctgatatgaacccacctgaaattcaaaggtccaatcttgcgccttttattctacagctcaaagcccttggcattgacaatgttgttcgtttcaattacctcacggcacctcccgcggaactcatgatcaaagcgacagaactactttactcactcggagcccttgatgactacgctaaactcacgaaaccactagggatgaggatggccgaacttgcagtggagccgatgatggcaaagacactgttgagtgcgtcttcctttgactgtctcagtgagattctcaccattgcgtctatgacgagtgttgggggctctatttggtactacgatgatggcgacaagaaacagatggaatctgcccgacgcaagtttgctgccgaagaaggcgatcatttaactctgctgaatgtttatcaagcattcgtgacgaaaggtaaaaaggaggccaggttttgtcacgataatcatctcaattataaagcgctgtgccgggccgtcagtattcgcggtcagctgaagcgctacttggaacggtttggtctcacggtagatgagaacctcgcaagtcgagcaccacgtgaaggtagaggtggtcaaattcgcaggtgtttgacaacaggctacttcgcgcatgcagcaaagatgcaacccgatggtagctttcgtactgctgaaggtggaacttcgctctacgctcatccaagctcattaatgttcaaccggaaagccgactgggtggtcttccatgagatcatggagactggcagcaagatctttatccgcgatgtcaccaagatcgagaaaagctggctgttggaatattcatcggggttttatcagattagaccaaagtgaagatggcagaaagtatttgacacaacgagtactaattatcaatgctaatttcaggtttccaaaaatagctaaataatacagatagatgacgacgaccaagcttgaaagctgccgaagaggcctttgatattattgagcaatatatcatcgcaaatttgcaatcggtactacctacattgaagcagtagagaaggattcggtggttttattattgtcccacaggactggtacagcacaaatcaagatctgtactccaacccacgactgcagtgcattcacaacagacgctaaagtcaaaggtcaacgttgcaagattctttcgttgcagatagacagtcttattgcttcaatccgagtacaagttgcagaggaggctcggaagaaatttgtgttcctgcattagtacaatcgaagcttcttcattggcgtcgcatggcgccgaccgttacatcctagctcagtggctagtcacgggtagccgtttcgctggtcgcagttgtgagcttcacgaaccatgaactcgccaagctacctatattgcattgacgtctatttaaggctatcaatcttgtgttacgaccaaggtatgagatgaggctctcgtgccatggtacggataccgaagcctcagctggcctgttcaccgttctcgcgtgtaggacaatggtaacacgtctgtggataaagctgtgtgccatgagcgtagcccgtgtgctggctactcccgctcgatcccggctccgattacatgtatactggatgactaaactccgaaatgtatgtatgtaggcgcgtgaggagtgaggtatgttcctcattctacctgtattttcggcctgtgcgaagaatccattcgagcatctctcgatgaaag

SEQ ID NO: 33313 - DNA, 2181 bp, Muscodor strobelii
  misc_feature: SGI cDNA ID NO. 571489
  misc_feature: Reduced expression when VOC is produced
  misc_feature: Encodes the peptide sequence at SEQ ID NO 33314
atgcattcccgacatatacatggccatagccatgcccatcatcatttgcacgcgagatttttgccacgggagctggaagagacgaatgcacccgaaacaccaattctagtagttcccgaaaccatcgacctgagaagcttcaatggacagctcgtatcacgtgaaaataacctagatgagaagccagctggcaattcaaatgccttgaccattgccctcagcatcgtgattccactgattgttgctgctgctggagttttctatgttgcccggcgaggtatgcttcgacgaagacaagaggatgctgcagctaccaacaagtacaaatcgatggactttgggttggatgaacccacagctcaaaacggcggcaagagaagaagtgcgtttttcggcaaggagaaaaacccgagccacaagacacagctctcgatggatatgaacttgtccagtccctatctgctgccaccaactgtccacggatcccgggagtccatgaactcgctgacaaagaatcttcacatgtatgaagacccataccgacatgttacggctcttgctggtagcgaggttggttcaattcgatcgttccagcggggacctactggcagtagaacttcgtctatctacaccaataagccaccacacctaaacagtgacccaacccgcagatcgcaacagagggatctcccaccttccggtcttgtctcacctccccctgttgctcagcgtcctagtgacgatggtgtcgctggtgaagcgccaattgtgccatccaaaaacgagtttcgatttgttgacaatggcccacgcgtcgatcaagttccaggcgttcaagagcctccggccgtcgcgaatagtgtttcccgcaaatcactaccacaggattctcgtccagcatcggagacatccaaaactggaccgcagcctcaagtagcggagttcgtgaatgagacggattctgtgtaccccttggaatctgagggacataagacacctgatggtctggggatcatggaacaccgagtctcgcacgcatcttcccagtccaggatgtcaggacggaatacactgaccgctgctgaacggcctccgcgaaaggagtctatgcccgttatccaagccaatgtgatggaggactacggaacctatgctgatcatttccaagtcgatgagcccatgtccgcgatgcaccaacaagacgatgagcttcacatgccacaacgggatcacctggaccaccctcactcggctggccttggtgttcctgaaactgacaatcgaaggctatcagttggacttcgaccactcccccctgacgatttcctcgagtcggaggatccagagttccgagccaaccgaattcgttccttctataaagagtactttgaggatatcacggcagagcaggatcgtcctcccatgccccaacaaccagcgggtggctattatgaggattacgatgcaggctacatgggtgacgctgcttattatgaccccgattcgaacgctttcgtcatgccatatgctcaacccgtgactcacaacgaggtcctcctggggcctcagggaggcatgcgcatgcctggtggcccgccaggcagacccagggcaggctcaactatgtcgggcggtcgatttggtcctatgagtcctcggccgggctcttcagcatcaaatccccgcttcggaggcaagccgaagaaggcattgccgcctcccgccgctctcagcacactcccaactccatcgaaactgagggacgattcatttgccatcttcaatgcggccgacttcgcccctcctccaacgttcaaagatcaagcggctggccgttctcagagtcccgtgggtgagcgtattgcttatcgggtgaacacgccggtccattcgcccttggtcagcgcgtttgaggagacggctactcttcctagccctcaccttctgcgcaaatctggcacatttacaggtttagacttcgcaccaccccgccgttttaaggaccccgagtcaatgagtgaaaccggcagcatacggagtatgcagagcggtatctcgaacgccgggttgagtgccattcgtgccggtgctggccgcattagtcgtcttccgggagaccaagtcttcacccaggctgctcttggtgaccaattgaagcctcaatggggcatgcgtccttaa

SEQ ID NO: 33314 - protein, 726 aa, Muscodor strobelii
  misc_feature: SGI Peptide ID NO. 571489
  misc_feature (33)..(725): NCBI GI: 39968853 Blast Desc: MGG_02519 [Magnaporthe grisea 70-15] gi|145013862|gb|EDJ98503.1| MGG_02519 [Magnaporthe grisea 70-15]
  misc_feature (60)..(725): NCBI GI: 261355126 Blast Desc: conserved [Verticillium albo-atrum VaMs.102]
  misc_feature (69)..(725): NCBI GI: 116199535 Blast Desc: CHGG_07923 [Chaetomium globosum CBS 148.51] gi|88179202|gb|EAQ86670.1| CHGG_07923 [Chaetomium globosum CBS 148.51]
  misc_feature (58)..(725): NCBI GI: 171689396 Blast Desc: protein product [Podospora anserina] gi|170944660|emb|CAP70771.1| protein product [Podospora anserina]
  misc_feature (418)..(725): NCBI GI: 156066049 Blast Desc: SS1G_01036 [Sclerotinia sclerotiorum 1980] gi|154691894|gb|EDN91632.1| SS1G_01036 [Sclerotinia sclerotiorum 1980]
  misc_feature (71)..(725): NCBI GI: 145256439 Blast Desc: An04g00270 [Aspergillus niger] gi|134058291|emb|CAK38482.1| protein product [Aspergillus niger]
  misc_feature (399)..(725): NCBI GI: 85110539 Blast Desc: NCU06737 [Neurospora crassa OR74A] gi|28881368|emb|CAD70410.1| [Neurospora crassa] gi|28925192|gb|EAA34273.1| NCU06737 [Neurospora crassa OR74A]
  misc_feature (32)..(725): NCBI GI: 115400817 Blast Desc: conserved [Aspergillus terreus NIH2624] gi|114191663|gb|EAU33363.1| conserved [Aspergillus terreus NIH2624]
  misc_feature (483)..(726): NCBI GI: 46109330 Blast Desc: FG01547.1 [Gibberella zeae PH-1]
  misc_feature (474)..(726): NCBI GI: 256730780 Blast Desc: NECHADRAFT_30328 [Nectria haematococca mpVI 77-13-4]
  misc_feature: Useful for introducing or modulating the production of volatile compounds
MHSRHIHGHSHAHHHLHARFLPRELEETNAPETPILVVPETIDLRSFNGQLVSRENNLDEKPAGNSNALTIALSIVIPLIVAAAGVFYVARRGMLRRRQEDAAATNKYKSMDFGLDEPTAQNGGKRRSAFFGKEKNPSHKTQLSMDMNLSSPYLLPPTVHGSRESMNSLTKNLHMYEDPYRHVTALAGSEVGSIRSFQRGPTGSRTSSIYTNKPPHLNSDPTRRSQQRDLPPSGLVSPPPVAQRPSDDGVAGEAPIVPSKNEFRFVDNGPRVDQVPGVQEPPAVANSVSRKSLPQDSRPASETSKTGPQPQVAEFVNETDSVYPLESEGHKTPDGLGIMEHRVSHASSQSRMSGRNTLTAAERPPRKESMPVIQANVMEDYGTYADHFQVDEPMSAMHQQDDELHMPQRDHLDHPHSAGLGVPETDNRRLSVGLRPLPPDDFLESEDPEFRANRIRSFYKEYFEDITAEQDRPPMPQQPAGGYYEDYDAGYMGDAAYYDPDSNAFVMPYAQPVTHNEVLLGPQGGMRMPGGPPGRPRAGSTMSGGRFGPMSPRPGSSASNPRFGGKPKKALPPPAALSTLPTPSKLRDDSFAIFNAADFAPPPTFKDQAAGRSQSPVGERIAYRVNTPVHSPLVSAFEETATLPSPHLLRKSGTFTGLDFAPPRRFKDPESMSETGSIRSMQSGISNAGLSAIRAGAGRISRLPGDQVFTQAALGDQLKPQWGMRP

SEQ ID NO: 33315 - DNA, 3282 bp, Muscodor strobelii
  misc_feature: SGI EST ID NO. CUFF.78767.0
  misc_feature: Variant of the nucleotide sequence at SEQ ID NO 33313
ctttagtgtcgtctgcctttccttttccttttaccacttcttccatcttcacctcgtgtagaagtcaagcagtccttcgacaatcggccaccggacccaactgcaagccagcgggcgtgtcattctttcaatccaactttcaagtcattcttttcaccttcggctcaccctaagtccatcgttataattcgaagtccgctaatagcactgggaccaccaagtcgacttgccagaccaatataccaaaaccaactaattcaaatctcgcaccctaatcgcacccattctcggttgaaacgaataagcagagaagaatgagatattagatatccgataacgagggcttatcatttttgcagacgtttgggttggacttgatcatgcaaaacgccccctaatcttggtacatccagagaacaacactagaaaactcgtcgacaatatgcattcccgacatatacatggccatagccatgcccatcatcatttgcacgcgagatttttgccacgggagctggaagagacgaatgcacccgaaacaccaattctagtagttcccgaaaccatcgacctgagaagcttcaatggacagctcgtatcacgtgaaaataacctagatgagaagccagctggcaattcaaatgccttgaccattgccctcagcatcgtgattccactgattgttgctgctgctggagttttctatgttgcccggcgaggtatgcttcgacgaagacaagaggatgctgcagctaccaacaagtacaaatcgatggactttgggttggatgaacccacagctcaaaacggcggcaagagaagaagtgcgtttttcggcaaggagaaaaacccgagccacaagacacagctctcgatggatatgaacttgtccagtccctatctgctgccaccaactgtccacggatcccgggagtccatgaactcgctgacaaagaatcttcacatgtatgaagacccataccgacatgttacggctcttgctggtagcgaggttggttcaattcgatcgttccagcggggacctactggcagtagaacttcgtctatctacaccaataagccaccacacctaaacagtgacccaacccgcagatcgcaacagagggatctcccaccttccggtcttgtctcacctccccctgttgctcagcgtcctagtgacgatggtgtcgctggtgaagcgccaattgtgccatccaaaaacgagtttcgatttgttgacaatggcccacgcgtcgatcaagttccaggcgttcaagagcctccggccgtcgcgaatagtgtttcccgcaaatcactaccacaggattctcgtccagcatcggagacatccaaaactggaccgcagcctcaagtagcggagttcgtgaatgagacggattctgtgtaccccttggaatctgagggacataagacacctgatggtctggggatcatggaacaccgagtctcgcacgcatcttcccagtccaggatgtcaggacggaatacactgaccgctgctgaacggcctccgcgaaaggagtctatgcccgttatccaagccaatgtgatggaggactacggaacctatgctgatcatttccaagtcgatgagcccatgtccgcgatgcaccaacaagacgatgagcttcacatgccacaacgggatcacctggaccaccctcactcggctggccttggtgttcctgaaactgacaatcgaaggctatcagttggacttcgaccactcccccctgacgatttcctcgagtcggaggatccagagttccgagccaaccgaattcgttccttctataaagagtactttgaggatatcacggcagagcaggatcgtcctcccatgccccaacaaccagcgggtggctattatgaggattacgatgcaggctacatgggtgacgctgcttattatgaccccgattcgaacgctttcgtcatgccatatgctcaacccgtgactcgtcgggcgatgacaccacctccgagcaatcgacgcccaatgcctggacccagacaacgaggtcctcctggggcctcagggaggcatgcgcatgcctggtggcccgccaggcagacccagggcaggctcaactatgtcgggcggtcgatttggtcctatgagtcctcggccgggctcttcagcatcaaatccccgcttcggaggcaagccgaagaaggcattgccgcctcccgccgctctcagcacactcccaactccatcgaaactgagggacgattcatttgccatcttcaatgcggccgacttcgcccctcctccaacgttcaaagatcaagcggctggccgttctcagagtcccgtgggtgagcgtattgcttatcgggtgaacacgccggtccattcgcccttggtcagcgcgtttgaggagacggctactcttcctagccctcaccttctgcgcaaatctggcacatttacaggtttagacttcgcaccaccccgccgttttaaggaccccgagtcaatgagtgaaaccggcagcatacggagtatgcagagcggtatctcgaacgccgggttgagtgccattcgtgccggtgctggccgcattagtcgtcttccgggagaccaagtcttcacccaggctgctcttggtgaccaattgaagcctcaatggggcatgcgtccttaatgtctcttctgggtttttgtgttccccatcacccagggattttcttccattttggcgcataaagacggctacatgaacgacttcggatagcaatcattggcatgggagtttctaatagatcggaatgggttaggttaagaaatagttttgatggccttggattacctcaaaacatgttcttgtatttgtttaatgtctttctacctttacctttcgactacatctgcttattggtgtcgtattactccacaccatttagacgcagcgaatacagagtcttgctcacgctctgtttcgaaacgatggctatgctctttctcaagtatatatagaagggtatgagcgcgtactcttgtcatctaaacaacaaagttaaaagtcaaatactcttcatgctcctccctggactcctcagtctcggatgtcgtttttgtaatcaatatgtcagcagactaaactggttatgaggatatctagatcagcaaatttgccattcgtaacccttgaaacgcctatgaatgaccgtcttatatttatatctgcggcgtctgactctgctaatctgctatgatatctctgagcccattgccgatataacgcatagccg

SEQ ID NO: 33316 - DNA, 1161 bp, Muscodor strobelii
  misc_feature: SGI cDNA ID NO. 571490
  misc_feature: Reduced expression when VOC is produced
  misc_feature: Encodes the peptide sequence at SEQ ID NO 33317
atgtccgccaacgcgaccagcaccgatcccacctcgggctcgtcatcctccatctcgagcactccgtcgtcatctccaagctccagttctacgcctccgtcaaccagtagtgatccctctacctccagcactagttcgactgaaagcccgacgagttccacgacaacttcagagtctagtagcaccacaagcagcagcacgagtgagtcgtcaacaaccacctcagactctacgacctccagcgaatcaccaacatcctcaacatcatcgccatcaacgactccaccgccaacatcttccacgagttcttccgcggagacatcgagcactcgctcgaccatcaccacaaagtcgaccaaaacagagaatggctcaacagtcgtgacgaccgtaacttctatagtctctcctaccggtgcctctaccagcgcgaccacctcggcgtctggctccggcggtctcatcggtggatcgggcgactcaacgggacacttgacccagtcaagcaagattgctgttgccgttgtggtccctattgcgggtgtcgctctgcttgttgtgattggcttcttcttctggaagaagcgcaaggctcgcaaggacgctgaggaggagcggagaaaagaagtggaggattatggttacaatccgaataacgaccctacgctcccagacgttggcgctgccggtgcttacgagatgaaggaggatgcggcgtcctcgggatatcgtggatggggatcgaccactcttgcgggctctaccgggcgcaaggcctcgactaccatgtcgggtggtgtagcaggcgaaccacttatgagcgacggatcctactcacccgagggcgagattctcggcgccatgggcccctcttccaccgagaatcgatccgcaaatgtgcaccgcggcccgtctaatgcatcctcgtcctacagcgctgcaggcagatccgacggctcggctgaaaatgcgccgttcggaggtgctggttactatgaccagtatggcagcagcaatccgtacagcgacccctacacggatcaaccaagcggcggatcagttcaacctataattcgagataacccagctcggcgtaacacacgtattgaaaacccggctcatttcccgcagcaaagtgccggcatatctcaaaacttttaa

SEQ ID NO: 33317 - protein, 386 aa, Muscodor strobelii
  misc_feature: SGI Peptide ID NO. 571490
  misc_feature (7)..(386): NCBI GI: 46109332 Blast Desc: FG01548.1 [Gibberella zeae PH-1]
  misc_feature (3)..(386): NCBI GI: 256730779 Blast Desc: NECHADRAFT_74214 [Nectria haematococca mpVI 77-13-4]
  misc_feature (95)..(386): NCBI GI: 171689388 Blast Desc: protein product [Podospora anserina] gi|170944656|emb|CAP70767.1| protein product [Podospora anserina]
  misc_feature (184)..(386): NCBI GI: 261355124 Blast Desc: conserved [Verticillium albo-atrum VaMs.102]
  misc_feature (95)..(386): NCBI GI: 116199589 Blast Desc: CHGG_07950 [Chaetomium globosum CBS 148.51] gi|88179229|gb|EAQ86697.1| CHGG_07950 [Chaetomium globosum CBS 148.51]
  misc_feature (184)..(386): NCBI GI: 85075620 Blast Desc: NCU11425 [Neurospora crassa OR74A] gi|28881226|emb|CAD70464.1| [Neurospora crassa] gi|28916806|gb|EAA26557.1| NCU11425 [Neurospora crassa OR74A]
  misc_feature (191)..(386): NCBI GI: 39968855 Blast Desc: MGG_02520 [Magnaporthe grisea 70-15] gi|145013860|gb|EDJ98501.1| MGG_02520 [Magnaporthe grisea 70-15]
  misc_feature (191)..(386): NCBI GI: 156044074 Blast Desc: SS1G_10140 [Sclerotinia sclerotiorum 1980] gi|154694529|gb|EDN94267.1| SS1G_10140 [Sclerotinia sclerotiorum 1980]
  misc_feature (101)..(386): NCBI GI: 169604288 Blast Desc: SNOG_05155 [Phaeosphaeria nodorum SN15] gi|111066426|gb|EAT87546.1| SNOG_05155 [Phaeosphaeria nodorum SN15]
  misc_feature (89)..(386): NCBI GI: 189196382 Blast Desc: conserved [Pyrenophora tritici-repentis Pt-1C-BFP] gi|187980408|gb|EDU47034.1| conserved [Pyrenophora tritici-repentis Pt-1C-BFP]
  misc_feature: Useful for introducing or modulating the production of volatile compounds
MSANATSTDPTSGSSSSISSTPSSSPSSSSTPPSTSSDPSTSSTSSTESPTSSTTTSESSSTTSSSTSESSTTTSDSTTSSESPTSSTSSPSTTPPPTSSTSSSAETSSTRSTITTKSTKTENGSTVVTTVTSIVSPTGASTSATTSASGSGGLIGGSGDSTGHLTQSSKIAVAVVVPIAGVALLVVIGFFFWKKRKARKDAEEERRKEVEDYGYNPNNDPTLPDVGAAGAYEMKEDAASSGYRGWGSTTLAGSTGRKASTTMSGGVAGEPLMSDGSYSPEGEILGAMGPSSTENRSANVHRGPSNASSSYSAAGRSDGSAENAPFGGAGYYDQYGSSNPYSDPYTDQPSGGSVQPIIRDNPARRNTRIENPAHFPQQSAGISQNF

SEQ ID NO: 33318 - DNA, 3527 bp, Muscodor strobelii
  misc_feature: SGI EST ID NO. CUFF.79105.1
  misc_feature: Variant of the nucleotide sequence at SEQ ID NO 33316
tgaaaaccaaaccagccaattacgttaaacggctcgagatatccgaggttgcactcgaacgcaaaacttggcaaccaacccagtactcactcgaataaaaagatgacgagcgtgactgcgcgcatcctattagttgtcaagtgcggcgaaatatggcttgactgcccattcattcatgactgcaagcctgaagaagacgaccgtgagtccgcttgacattaattgagtagacgcaatgttttcgctatgatgtatccgtcaccataggatcaaagccctcgaccgtcaagccgccattggcgattatctgtaagtcataaaccaaacctctcgagtgaaaatagcttgcaagcaggagggtgtaatgaagaaaaaccatctcgggagagaactgatgtggaaggcgatttgtcgcggtaagtctgaaacctgtatgctctcccacataagaagaggcactttacgcaatcccaagacatgtcccgagacacttgaactagaattttagatataatctagctgagcacctttctgtcggccaatgcccgtgagcctgattcgataggatctgacggcgattgggactaagtagagacacagatcgagagagtgtttcatctggaggcctgttctgtccgtccgctcaccagggttatgattttcccactgcgtcattattcatgcctggtttccgctatgatttactgtgcctctagcgggggtacatggattcgaaagagctcgagggcgaacaagacacttcgcgccgcgatatcttaagtttaaccttgaagacggagagaagacgacagtgacggtaacaacggtgcacatggagctggcgcttctctggcctatgtaggcgggttagcagaacgttcatcgtcgtcgtctcttcgcttcttaccgacatccatgataagtacatgtggatagatagcccccggagccttgggcatggctagcacaagacgggacggtgcaaatgagaaaagcccgcgagtccactcgcaaaccatgtcggccatcttgcttgtcttctgccaacttgctcgcgtcgtcaatccttcggaccaagcagcgtctccaatttccaattgcactgccgtcctttccacctgttcgggaggtcaccctcgcttttaccgagcgctttccttcttcctaactttaaactgtagttgcactactgctcatctctctcgctcattgccggtgaattgaacactgactgtactcatctcaccctgctggcctgttcattctttactcgcctttccaggcgtcagcgtcagcacctccaccctcactcgtagcactcgggccgctgtcagtctgtactgtagatcagtgaggccgcgctgtgtctctgtcctatcatttgtccccaatctgtccccatcgacacgagcgcaggcgacacagcagaaacacgagagcgtccactccgccacgctacgtgcattagcccgcccagtccgctgcaacccttcagtttgtgtattacgagtggctattcttgcactattcttacgttctctgtacgctatcctcgcccaagcgtcccactgtctcatctttcatcgtccctcgtcctgccaaacgcctcctgccggcgtctcatcgcaaacactacgcacatttttgggaacattcacttgtccattgccgccctgccatccccttctccagctctggagacgctctctaggccgtcgccgcttgctcaagcagacaacgttccaggttaaaactcgctacgaagcgtcaattcaccatgtccgccaacgcgaccagcaccgatcccacctcgggctcgtcatcctccatctcgagcactccgtcgtcatctccaagctccagttctacgcctccgtcaaccagtagtgatccctctacctccagcactagttcgactgaaagcccgacgagttccacgacaacttcagagtctagtagcaccacaagcagcagcacgagtgagtcgtcaacaaccacctcagactctacgacctccagcgaatcaccaacatcctcaacatcatcgccatcaacgactccaccgccaacatcttccacgagttcttccgcggagacatcgagcactcgctcgaccatcaccacaaagtcgaccaaaacagagaatggctcaacagtcgtgacgaccgtaacttctatagtctctcctaccggtgcctctaccagcgcgaccacctcggcgtctggctccggcggtctcatcggtggatcgggcgactcaacgggacacttgacccagtcaagcaagattgctgttgccgttgtggtccctattgcgggtgtcgctctgcttgttgtgattggcttcttcttctggaagaagcgcaaggctcgcaaggacgctgaggaggagcggagaaaagaagtggaggattatggttacaatccgaataacgaccctacgctcccagacgttggcgctgccggtgcttacgagatgaaggaggatgcggcgtcctcgggatatcgtggatggggatcgaccactcttgcgggctctaccgggcgcaaggcctcgactaccatgtcgggtggtgtagcaggcgaaccacttatgagcgacggatcctactcacccgagggcgagattctcggcgccatgggcccctcttccaccgagaatcgatccgcaaatgtgcaccgcggcccgtctaatgcatcctcgtcctacagcgctgcaggcagatccgacggctcggctgaaaatgcgccgttcggaggtgctggttactatgaccagtatggcagcagcaatccgtacagcgacccctacacggatcaaccaagcggcggatcagttcaacctataattcgagataacccagctcggcgtaacacacgtattgaaaacccggctcatttcccgcagcaaagtgccggcatatctcaaaacttttaaatgaacacaaaagtcatcaaccgtccgattccgcttgttaatatcaactgataccctacacctccgaaaccacacccgttcttcaaccagcagagatatagcgatctgttgttgctggttaagaatttcgcaccacgctgaccatttccattcaacactctgtttataatctgtgcgaataccacacgactcatcttgagctcagtatcaatgaagctgtctggtcatgttttgatggctatttccgtatataagcctctgttggacatcgttgccttgatgttttatcacctacgacataataatcgattttttctacacgactgccttgtttttttgcaattcatgaaaagggagagaggaaggctcgccgcaaggaaagaagttctacgatttgactgttgtgtagagcttgagcagtgcctgggcgaaagtgtatatatcgacgagtccgagaaaaagggagttggggagaacatagtacacaaaatagtgactgaatagaagacataccgccatgatgagtatccctatggtgtttgacgtctctgggcacgatttacagacaagcaggaatcgaaaatgaatg

SEQ ID NO: 33319 - DNA, 720 bp, Muscodor strobelii
  misc_feature: SGI cDNA ID NO. 571491
  misc_feature: Encodes the peptide sequence at SEQ ID NO 33320
atgtcatctctaatcccatcgttgaatgaaacggacatcgatatcatcgacaatgtcctatacccggacccaacgaacacaacgggaggtaaagccctgtatgccacaaaaaacgacgccaccggctttgggacgcagttctggcgcctcagtgatgcatattcgcactacgcatacatttgcccaatattacagacagcgcattatgcctcgactgcgtccgatgctgcgcccgtatacttataccacttcgcagcccggtcagcagaatacggcgccgcggaccatggagacgagtccaactttttgacgcatgacgtggcggccctaaagaagtaccatggggtgaccgcaaccgcagacgtcatggtcgaggctttcagtcgatttgtcgcaactggcgatccaaattcctccaaatccaagtccggtttcacctggcccaaatacatcagtccattaacagactctggcgacaacagctccactaagaatgagaaggccgggaagttggcattgttcggtaacggcaacaccgagcagatgggttccaaaggcacacaagatcccggtgtcgctgctgaagttgaaatcttatctgaacgcaggcgaaagatggcacagttctggtggccgaggatttacctgagcgaaggctatggcaacgggacgtcgtctatctctccggagcagaagttcgtggtaaagtccaagctttga

SEQ ID NO: 33320 - protein, 239 aa, Muscodor strobelii
  misc_feature: SGI Peptide ID NO. 571491
  misc_feature (36)..(174): Pfam Id: PF00135 Pfam Desc: Carboxylesterase
  misc_feature (1)..(217): NCBI GI: 171689362 Blast Desc: protein product [Podospora anserina] gi|170944643|emb|CAP70754.1| protein product [Podospora anserina]
  misc_feature (3)..(221): NCBI GI: 164428222 Blast Desc: NCU01839 [Neurospora crassa OR74A] gi|157072060|gb|EAA27387.2| conserved [Neurospora crassa OR74A]
  misc_feature (3)..(221): NCBI GI: 28881233 Blast Desc: related to cholinesterase [Neurospora crassa]
  misc_feature (1)..(218): NCBI GI: 238842505 Blast Desc: acetylcholinesterase [Microsporum canis CBS 113480]
  misc_feature (1)..(218): NCBI GI: 225681241 Blast Desc: cholinesterase [Paracoccidioides brasiliensis Pb03]
  misc_feature (1)..(218): NCBI GI: 226292045 Blast Desc: cholinesterase [Paracoccidioides brasiliensis Pb18]
  misc_feature (3)..(218): NCBI GI: 226282786 Blast Desc: cholinesterase [Paracoccidioides brasiliensis Pb01]
  misc_feature (1)..(218): NCBI GI: 169785371 Blast Desc: [Aspergillus oryzae RIB40] gi|238506365|ref|XP_002384384.1| extracellular lipase, [Aspergillus flavus NRRL3357] gi|83775894|dbj|BAE66013.1| protein
  misc_feature (4)..(218): NCBI GI: 261205420 Blast Desc: extracellular lipase [Ajellomyces dermatitidis SLH14081] gi|239592506|gb|EEQ75087.1| extracellular lipase [Ajellomyces dermatitidis SLH14081] gi|239611339|gb|EEQ88326.1|
  misc_feature (4)..(218): NCBI GI: 154298082 Blast Desc: BC1G_12006 [Botryotinia fuckeliana B05.10] gi|150858192|gb|EDN33384.1| BC1G_12006 [Botryotinia fuckeliana B05.10]
MSSLIPSLNETDIDIIDNVLYPDPTNTTGGKALYATKNDATGFGTQFWRLSDAYSHYAYICPILQTAHYASTASDAAPVYLYHFAARSAEYGAADHGDESNFLTHDVAALKKYHGVTATADVMVEAFSRFVATGDPNSSKSKSGFTWPKYISPLTDSGDNSSTKNEKAGKLALFGNGNTEQMGSKGTQDPGVAAEVEILSERRRKMAQFWWPRIYLSEGYGNGTSSISPEQKFVVKSKL

SEQ ID NO: 33321 - DNA, 3006 bp, Muscodor strobelii
  misc_feature: SGI EST ID NO. CUFF.78789.0
  misc_feature: Variant of the nucleotide sequence at SEQ ID NO 33319
ccgccaggcacctatgtatcaacaccaacgatggccttgattactggacgttagtggtcccgatgtcaaagcttgcatggatgagttgatgtgttgttaggccgggaagcacgtgtggtcgtctcccgcccacgcatccgggcattttagctaggaagcacccgcttctgagtctgagtgattattcccagcatttccggcgcactttcttgttcctgttccaatcacttttctccatcgatcggtctgtatcacattagcgcttgttttacttgtcgatcaagtggaaaacagaggttgatgacgctcaagatcggaaaatattcaatattgtcaacggctcctgttgatcagcaaagccaagagatctactgatcttattaagaacttcggtgcctgccaattgctctgcaatcgcatgccaagctttctttgccctccatccgtctgtcccccagcgccgccaagatctcaccacgccaagcttcagtcacaggccgtcaatccttctcagctgttgtacagtgcaattgggtccgtgagtcccgcgacaaatgaggtggaacaaggccgacttgccatcatggccgccgcaaatccatcacagcatcttccgccgcggccgcccggggcctcacgacgaagaaaaaaacagcgccagcggcagtgattccgaatctggaccgcacaatagcaccatgttgtctccggcatcttcagatttatcgatcgcatcttatgacaagcgccgccggctgccgcgcttcctacaggcgaccggaagtctcagggcgcgacgccttcgtcgcacgctcctatttggcttcctcttcgttggcgtcagcgtcacactcctcacgacgctcctattacgaggcggcaacataagttatgacacgctattcaagaaaacctgcaatcttactctggcccaaggcaactacctggggtcaggtaatagaagcaaatgccaattatcctcgtgccatacaagcatatcagggtgtaccatttgctcagtcaacggcgtatgagaatcgcttcaagcctcctcaggccttgactacgacggcgaaacctggggtggtcacccatgccatcaactatggccaaatatgcccgcagggttcgggcagcagcgggcagggcgagaattgtctgaactcgaatatttaccgcccgcattttggcgacacaccagaagaaattgctgcggaggaaaagaggcaaggtgtggatagcacaaatctcccggttgtgatctacgtgcatggcggagcgttcaacgagggcgcaggaaagaagaggaacatggctagtttcgcgtcatgggcggaatcgccactcatcgcgattagtttcaactatcgtgttggcgctctgggcttcttgcccagctccgtgaccgagaaagaaggattgctgaacctcgggttgaaagatcagcagttcttcttcgaatgggcgagagtcaatcttccggcaataggcggtaatcccaataacgtgacaatcatgggtcaaagtgccggcgcacactccgttgggcatcacctcgtgtcttactcgccggcaaacacgctcatctctgactcgccaccattccagaaggcgattatggaatctggggcgaccaccgctcgcgctgtatatgtgccgaaccaccctcttcacgagcaacagttccaggaatacattaacaaatgtgggctgggaagcgtgccaaatgatgagctctttgctgaactccgcaaattgtcttactcgaaggtcgtaggcgcgtcacagtacgtgtggaagaattacgaggacagtttgcgttggccctttcagccggtcattgatggcaaaggtggcatcattccggacctaccgatcaattcgtggaagaagggtaacgtgctacgcatccccataatcgcaggtttcaacaccaatgaaggtaccgtctttgtgccaaagggggaagacagctcgtctgccgtgagcgatctaatgtcatctctaatcccatcgttgaatgaaacggacatcgatatcatcgacaatgtcctatacccggacccaacgaacacaacgggaggtaaagccctgtatgccacaaaaaacgacgccaccggctttgggacgcagttctggcgcctcagtgatgcatattcgcactacgcatacatttgcccaatattacagacagcgcattatgcctcgactgcgtccgatgctgcgcccgtatacttataccacttcgcagcccggtcagcagaatacggcgccgcggaccatggagacgagtccaactttttgacgcatgacgtggcggccctaaagaagtaccatggggtgaccgcaaccgcagacgtcatggtcgaggctttcagtcgatttgtcgcaactggcgatccaaattcctccaaatccaagtccggtttcacctggcccaaatacatcagtccattaacagactctggcgacaacagctccactaagaatgagaaggccgggaagttggcattgttcggtaacggcaacaccgagcagatgggttccaaaggcacacaagatcccggtgtcgctgctgaagttgaaatcttatctgaacgcaggcgaaagatggcacagttctggtggccgaggatttacctgagcgaaggctatggcaacgggacgtcgtctatctctccggagcagaagttcgtggtaaagtccaagctttgaagtgtcgacatggttttgtcgctggatatttcccctttttttccctgcattatataccccaggcatactaccgcgagacgggtagtgatgttgcattctatagattgcatccagcggtttcgttcggcgttttgagggattcattttttggtctgcatgccatcgaatagactggcaattgggtttccgtgttatgaaagggagcatgatgtatatacacatacgaggcaactcgatagatcctgtcacatactacctacctagctcacgacgaaatgacatactcttgaa

SEQ ID NO: 33322 - DNA, 1143 bp, Muscodor strobelii
  misc_feature: SGI cDNA ID NO. 571492
  misc_feature: Reduced expression when VOC is produced
  misc_feature: Encodes the peptide sequence at SEQ ID NO 33323
atggcgcggacggtgatcaccaatgttcgcgtcttcgatggcaaggctctaataccaggggcgaagacagtggtcatagaagactccaggatcgggtcgatcacagatgacttaaacaatgagagcgaaaatgggtttatcatagatggaagtggctgcacactactgccaggcttcatcgacacacacgtccacattgagacgcctgacgatctcaaagcatgcgctgcacatggtgtcacgacggtgtgcgacatggcatgtatgccattctcgaagtacgatgaactgagggccatttccagagccgggacagcccctacttcatggctaggcacaaatctgccagcatactctgcctcaagccgtcacggcaaattatttcgcttcaatggtattggagatgagcattctctttcagcaccggaccaagtaccagcattcatagaggcgcgcaagaaagacgaggtggactacgtaaagatcattggagaccagccaggtctcccgcaagatgtcctggacgcgatccaagtcgaggcacgcaagtatgggatgagaacagtggctcatgcggcccattatgaagcttttgagtgtggacttaaggcgggattcgatgtcttaacgcatgtacccatggacagggcagttgacgctgcgatggcggataaaatggcctcgaatgatattgtcgcgatacctacgttaacgatgatggagggtttcaaaaagagctggatcttatggccattatactataagagagactttcatgtcgcccttcgtagcgttaccgcaatgaaggaagcgggcgtgatgatactcgctggaacagatgcaaatccgttttgggttatcgatgtaagagctggcattgctatgcatcgagaacttgagttgctcgtcgactctggcttgacgcctgttgaagcgctaggagcagcaacagcgttacctgccgcatattttaagctacatgatcgtggtcgtgtggagactggtcttaaggcggatttggtgctggtcgagggcgatccaacagttaacatcagtgcaacaagaacgataaggcaggtttggagcgcaggagttaaaatagagcctcctgccaataggcagagttattgttcagtaatgtag

SEQ ID NO: 33323 - protein, 380 aa, Muscodor strobelii
  misc_feature: SGI Peptide ID NO. 571492
  misc_feature (54)..(344): Pfam Id: PF01979 Pfam Desc: Amidohydrolase family
  misc_feature (54)..(342): Pfam Id: PF07969 Pfam Desc: Amidohydrolase family
  misc_feature (288)..(344): Pfam Id: PF01979 Pfam Desc: Amidohydrolase family
  misc_feature (54)..(86): Pfam Id: PF01979 Pfam Desc: Amidohydrolase family
  misc_feature (4)..(368): NCBI GI: 226364749 Blast Desc: hydrolase [Rhodococcus opacus B4] gi|226243238|dbj|BAH53586.1| hydrolase [Rhodococcus opacus B4]
  misc_feature (5)..(365): NCBI GI: 280962368 Blast Desc: amidohydrolase [Frankia sp. EuI1c] gi|270733603|gb|EFA61810.1| amidohydrolase [Frankia sp. EuI1c]
  misc_feature (1)..(367): NCBI GI: 256671626 Blast Desc: hydrolase [Streptomyces sp. AA4]
  misc_feature (3)..(366): NCBI GI: 256375015 Blast Desc: amidohydrolase [Actinosynnema mirum DSM 43827] gi|255919318|gb|ACU34829.1| amidohydrolase [Actinosynnema mirum DSM 43827]
  misc_feature (4)..(366): NCBI GI: 239983297 Blast Desc: hydrolase [Streptomyces albus J1074]
  misc_feature (3)..(364): NCBI GI: 226362713 Blast Desc: hydrolase [Rhodococcus opacus B4] gi|226241198|dbj|BAH51546.1| hydrolase [Rhodococcus opacus B4]
  misc_feature (1)..(366): NCBI GI: 256667920 Blast Desc: StAA4_12265 [Streptomyces sp. AA4]
  misc_feature (3)..(366): NCBI GI: 271966265 Blast Desc: amidohydrolase [Streptosporangium roseum DSM 43021] gi|270509440|gb|ACZ87718.1| amidohydrolase [Streptosporangium roseum DSM 43021]
  misc_feature (2)..(368): NCBI GI: 348315 Blast Desc: amidohydrolase [Streptosporangium roseum DSM 43021] gi|270509440|gb|ACZ87718.1| amidohydrolase [Streptosporangium roseum DSM 43021]
  misc_feature (5)..(364): NCBI GI: 116625627 Blast Desc: amidohydrolase [Solibacter usitatus Ellin6076] gi|116228789|gb|ABJ87498.1| amidohydrolase [Candidatus Solibacter usitatus Ellin6076]
  misc_feature (41)..(363): SWISSPROT Homolog: EC 3.5.4.2 Adenine deaminase
  misc_feature: Useful for introducing or modulating the production of volatile compounds
MARTVITNVRVFDGKALIPGAKTVVIEDSRIGSITDDLNNESENGFIIDGSGCTLLPGFIDTHVHIETPDDLKACAAHGVTTVCDMACMPFSKYDELRAISRAGTAPTSWLGTNLPAYSASSRHGKLFRFNGIGDEHSLSAPDQVPAFIEARKKDEVDYVKIIGDQPGLPQDVLDAIQVEARKYGMRTVAHAAHYEAFECGLKAGFDVLTHVPMDRAVDAAMADKMASNDIVAIPTLTMMEGFKKSWILWPLYYKRDFHVALRSVTAMKEAGVMILAGTDANPFWVIDVRAGIAMHRELELLVDSGLTPVEALGAATALPAAYFKLHDRGRVETGLKADLVLVEGDPTVNISATRTIRQVWSAGVKIEPPANRQSYCSVM

SEQ ID NO: 33324 - DNA, 1620 bp, Muscodor strobelii
  misc_feature: SGI EST ID NO. CUFF.78773.0
  misc_feature: Variant of the nucleotide sequence at SEQ ID NO 33322
ccatagtccaagcgttaggcgagcgatgggatttagaacttgcgatcggatgagatcatcaaagttcagcctcagataattacttacgcagacgagaccctccgcgacgatcactccacgcttctgctatctctttggttccagtaatgacctagacctattcatcaacttgagttacgaacgtaatttagtaccagactatcgattatctgtatccacatctgcagatacgatggcgcggacggtgatcaccaatgttcgcgtcttcgatggcaaggctctaataccaggggcgaagacagtggtcatagaagactccaggatcgggtcgatcacagatgacttaaacaatgagagcgaaaatgggtttatcatagatggaagtggctgcacactactgccaggcttcatcgacacacacgtccacattgagacgcctgacgatctcaaagcatgcgctgcacatggtgtcacgacggtgtgcgacatggcatgtatgccattctcgaagtacgatgaactgagggccatttccagagccgggacagcccctacttcatggctaggcacaaatctgccagcatactctgcctcaagccgtcacggcaaattatttcgcttcaatggtattggagatgagcattctctttcagcaccggaccaagtaccagcattcatagaggcgcgcaagaaagacgaggtggactacgtaaagatcattggagaccagccaggtctcccgcaagatgtcctggacgcgatccaagtcgaggcacgcaagtatgggatgagaacagtggctcatgcggcccattatgaagcttttgagtgtggacttaaggcgggattcgatgtcttaacgcatgtacccatggacagggcagttgacgctgcgatggcggataaaatggcctcgaatgatattgtcgcgatacctacgttaacgatgatggagggtttcaaaaagagctggatcttatggccattatactataagagagactttcatgtcgcccttcgtagcgttaccgcaatgaaggaagcgggcgtgatgatactcgctggaacagatgcaaatccgttttgggttatcgatgtaagagctggcattgctatgcatcgagaacttgagttgctcgtcgactctggcttgacgcctgttgaagcgctaggagcagcaacagcgttacctgccgcatattttaagctacatgatcgtggtcgtgtggagactggtcttaaggcggatttggtgctggtcgagggcgatccaacagttaacatcagtgcaacaagaacgataaggcaggtttggagcgcaggagttaaaatagagcctcctgccaataggcagagttattgttcagtaatgtaggtatacggatgtatgtggatggacgacccggcaccccgggattatttaacagtatttcaagttttcatcccatgtcctcggttcgaagcttgtttcacaatgacaagcgtgcagttcgttggagacccaaagggcagggatgagagctacccagtatatcgcagtcacaactgagcagtatcgcgaaccacagctttggtgtttacacaacacataatcatgtccgagaaatcagtagtaatcga

SEQ ID NO: 33325 - DNA, 1329 bp, Muscodor strobelii
  misc_feature: SGI cDNA ID NO. 571493
  misc_feature: Encodes the peptide sequence at SEQ ID NO 33326
atgccttctagctgccgatttgaccgagttttggagaccaagcatcctactacattaaaagacatccacatcggagtcaattacttaccaaaggtccaggactgctctcccaataagcacactttactgtgtgcattcatagaacccatgggctctgaaggatggagacttgtacaacacggatccgaaatcgaggctttggatcaactagaggagcagctcgaagctttcggtgatgtccagtatgtaaacgccgaaccagcccgcttggccggaaggccaacgcttggagatgaccgggccgaatccagcccatctgtgaggtttacaacaccgcagccgaagcgaaatactgcaaggatgacgccggcttctctccgggtcagaccagtcactgaaccaaggagacctatgctacgcaaatcaacatctatgttactggactcaccgaaactcaaagctgaagaaaaggctcttctacaagcaccaccaaagcaaacagctaagaaaacagtagcaagcttacgtcccccaccagcaatcaccaagtcaacgaaaaaaccaacttcgcctacattcgagcttccaggtgaagctgttgctcgacagttgaaggagaagaaggaatcgcggtcagctgcaacttcacgggcgacccagccaactgctgcaagcctacgacgatccaagtcggctaagttactaacgcagcctacgtttgaactgccaggtgaggcaatctctcgccgaaaacgcgaggaacacgaggcgagactcaaagcccaagaggaagaggagcgaaaaagacgagagttcaaagcacgacctctacccgctcacatcactccggggacagtaccacgtgacactattgctagcagggctcgacaggttcgaccaggcctttcagagaacgttggctattatgctaccccaaccaaacgctcaagtgcagttgctgattcacacgctcgccctccccttttgagcgcaggtaatcaactgaacgctcgtggccgcattgcaaaaccagaaggatcaccgatccagactagtcgagccacttctgcgtccacctgcattgtcagtggaccacgtacctcactctcgacacaagacgtacagatgcagaaacaacgaggacacgagatctatagacgagataactcatggtccgacgatcgtctacgggagaagcatgaacgcgaaactatcgccaaactcgctcgtgaggaagccgccgagaagtctcggcttcagagtcgtgaatgggccgccaagcaagcacggaaacggcagactatcagctctcttcgcgacctcgtgtga

SEQ ID NO: 33326 - protein, 442 aa, Muscodor strobelii
  misc_feature: SGI Peptide ID NO. 571493
  misc_feature (64)..(432): NCBI GI: 156044174 Blast Desc: SS1G_10190 [Sclerotinia sclerotiorum 1980] gi|154694579|gb|EDN94317.1| SS1G_10190 [Sclerotinia sclerotiorum 1980]
  misc_feature (161)..(432): NCBI GI: 145606130 Blast Desc: MGG_11885 [Magnaporthe grisea 70-15] gi|145013858|gb|EDJ98499.1| MGG_11885 [Magnaporthe grisea 70-15]
  misc_feature (64)..(442): NCBI GI: 256730567 Blast Desc: NECHADRAFT_30227 [Nectria haematococca mpVI 77-13-4]
  misc_feature (64)..(431): NCBI GI: 261354860 Blast Desc: [Verticillium albo-atrum VaMs.102]
  misc_feature (64)..(428): NCBI GI: 116199605 Blast Desc: CHGG_07958 [Chaetomium globosum CBS 148.51] gi|88179237|gb|EAQ86705.1| CHGG_07958 [Chaetomium globosum CBS 148.51]
  misc_feature (122)..(431): NCBI GI: 154299279 Blast Desc: BC1G_11125 [Botryotinia fuckeliana B05.10] gi|150857390|gb|EDN32582.1| BC1G_11125 [Botryotinia fuckeliana B05.10]
  misc_feature (64)..(428): NCBI GI: 46109334 Blast Desc: FG01549.1 [Gibberella zeae PH-1]
  misc_feature (64)..(431): NCBI GI: 85080887 Blast Desc: NCU01840 [Neurospora crassa OR74A] gi|28917695|gb|EAA27388.1| [Neurospora crassa OR74A]
  misc_feature (64)..(431): NCBI GI: 28881232 Blast Desc: [Neurospora crassa]
  misc_feature (229)..(428): NCBI GI: 226290738 Blast Desc: conserved [Paracoccidioides brasiliensis Pb18]
MPSSCRFDRVLETKHPTTLKDIHIGVNYLPKVQDCSPNKHTLLCAFIEPMGSEGWRLVQHGSEIEALDQLEEQLEAFGDVQYVNAEPARLAGRPTLGDDRAESSPSVRFTTPQPKRNTARMTPASLRVRPVTEPRRPMLRKSTSMLLDSPKLKAEEKALLQAPPKQTAKKTVASLRPPPAITKSTKKPTSPTFELPGEAVARQLKEKKESRSAATSRATQPTAASLRRSKSAKLLTQPTFELPGEAISRRKREEHEARLKAQEEEERKRREFKARPLPAHITPGTVPRDTIASRARQVRPGLSENVGYYATPTKRSSAVADSHARPPLLSAGNQLNARGRIAKPEGSPIQTSRATSASTCIVSGPRTSLSTQDVQMQKQRGHEIYRRDNSWSDDRLREKHERETIAKLAREEAAEKSRLQSREWAAKQARKRQTISSLRDLV

SEQ ID NO: 33327 - DNA, 3229 bp, Muscodor strobelii
  misc_feature: SGI EST ID NO. CUFF.78777.0
  misc_feature: Variant of the nucleotide sequence at SEQ ID NO 33325
gtgaactgttagaacgtccagtcgtcacctattcctcgcatacgattcgcgttgtcttaattacgcctgaagtctgaactagactcggtggagatctcaaggattcagcacattatacctatcagaaatcagagaagatatgagactctacatcatcagccacccgactcacagattcatacctttgcctcgataaatgtatgaaatttgagtgtcctgtcgcttttccccctcatcactctgcacgatccttagcctcgcataacaatggccttctctacccggaatgtgtcaggccatctgcgccaaggctcttcaaccagcaatcctaatgcccagtccaccagccagtctaccgctctgcttgcccgcgtgaatgaaaagaaggccgagctcgacaatctgaagcagctacgggagctcagtgctgccgttgcagaccagatggaagctttgcagcagcagctcgctactttgtccgacggaacagaagccatcgccactgtgttagggaattggcacaatgtcatccaagccatcaatatggcctcagtcaagatccccgctccccgcggaagtggccagtcgaccactgagcaagcaccgcaagtgccactgccacaaactctggttcgaatccctaccgagcatgctcctgcgttgcaagcgcaagctgagaatgccatggaaatcgacaagacccagccaccctcgccttgagtcttgtgagaaagtcattatgttgtgatggggtggaggtgatctttacaccaagatacttgcctgctagaaacatgtattcaaagaaatcaacacggcggcaatcaccagggcgaaggcgtatagctcttaccaaggctatatacacaatgaataaaacaattccaatgtccacaatgtgattaataaagtgacacattatacggcttgtagctatttgctcgtaatttgaataatcatccgctatattcaactaatcgtaacctggcgaaaaaaagggcagggtgactggtagtatatcttcaaacccctaaacgtaaatcaacatgtatcaataagactgcctcttatgaagaccaaattcattgtatatataaaacagcataacatctagatggaaaaaaaaatacacattactttactaatggtactgtgtcaatacttgagttacaacacaattgattgctcggatctaaacctggttgatcattcgggtcattgtacaggggaataaaatataccgggtaggacatcgcgtcaaaccccacgaacctaccacgcgttctgtgttgtcattacccgttgtaaatcacacaacctgggtcattatggaaagagcaaatggcaatggccatcagttaaatgtaagaggactgctctcccaataagcacactttactgtgtgcattcatagaacccatgggctctgaaggatggagacttgtacaacacggatccgaaatcgaggctttggatcaactagaggagcagctcgaagctttcggtgatgtccagtatgtaaacgccgaaccagcccgcttggccggaaggccaacgcttggagatgaccgggccgaatccagcccatctgtgaggtttacaacaccgcagccgaagcgaaatactgcaaggatgacgccggcttctctccgggtcagaccagtcactgaaccaaggagacctatgctacgcaaatcaacatctatgttactggactcaccgaaactcaaagctgaagaaaaggctcttctacaagcaccaccaaagcaaacagctaagaaaacagtagcaagcttacgtcccccaccagcaatcaccaagtcaacgaaaaaaccaacttcgcctacattcgagcttccaggtgaagctgttgctcgacagttgaaggagaagaaggaatcgcggtcagctgcaacttcacgggcgacccagccaactgctgcaagcctacgacgatccaagtcggctaagttactaacgcagcctacgtttgaactgccaggtgaggcaatctctcgccgaaaacgcgaggaacacgaggcgagactcaaagcccaagaggaagaggagcgaaaaagacgagagttcaaagcacgacctctacccgctcacatcactccggggacagtaccacgtgacactattgctagcagggctcgacaggttcgaccaggcctttcagagaacgttggctattatgctaccccaaccaaacgctcaagtgcagttgctgattcacacgctcgccctccccttttgagcgcaggtaatcaactgaacgctcgtggccgcattgcaaaaccagaaggatcaccgatccagactagtcgagccacttctgcgtccacctgcattgtcagtggaccacgtacctcactctcgacacaagacgtacagatgcagaaacaacgaggacacgagatctatagacgagataactcatggtccgacgatcgtctacgggagaagcatgaacgcgaaactatcgccaaactcgctcgtgaggaagccgccgagaagtctcggcttcagagtcgtgaatgggccgccaagcaagcacggaaacggcagactatcagctctcttcgcgacctcgtgtgaaggagtatcggacattgtcccagagttcaaagtttgtgagacaacaagattgtactatattcgcattgtgtatgcattgtacatgcataaaactcagaagcagcttgcaatggcgttggttgggttgacatgggacttcatctagcaaagattggcgtcctcggacttgctagattatatcatcaccttgaaggaagtagctcaataatggcgaggctacataggtatgctatacctatcgttgtgtattcattataagcacaggttgtcacacagcagtgtgaagggtaggtctagcctaatacaaaattcatcgactgtttacacatattatatcgcgcgtacgtttctttgtgaccgagtggtgaacttgacgctgagttattgcgatcaatattgattccggccatcgcctctacaacaaagtttcaacaatgaaagaaccccaaaatgaagacaaacgtgatctttctgattgtaatagaatccccggtgagatagccggcaaaagtcatatattggatttctattagccttgatgtcggatcgaatacaagaggtatgaaaatagtgtgccacttcttgatacaacgggtgacaacctctatgattttgtaatcgtcgtcca

SEQ ID NO: 33328 - DNA, 453 bp, Muscodor strobelii
  misc_feature: SGI cDNA ID NO. 571494
  misc_feature: Encodes the peptide sequence at SEQ ID NO 33329
atggccttctctacccggaatgtgtcaggccatctgcgccaaggctcttcaaccagcaatcctaatgcccagtccaccagccagtctaccgctctgcttgcccgcgtgaatgaaaagaaggccgagctcgacaatctgaagcagctacgggagctcagtgctgccgttgcagaccagatggaagctttgcagcagcagctcgctactttgtccgacggaacagaagccatcgccactgtgttagggaattggcacaatgtcatccaagccatcaatatggcctcagtcaagatccccgctccccgcggaagtggccagtcgaccactgagcaagcaccgcaagtgccactgccacaaactctggttcgaatccctaccgagcatgctcctgcgttgcaagcgcaagctgagaatgccatggaaatcgacaagacccagccaccctcgccttga

SEQ ID NO: 33329 - protein, 150 aa, Muscodor strobelii
  misc_feature: SGI Peptide ID NO. 571494
  misc_feature (31)..(127): Pfam Id: PF08654 Pfam Desc: DASH complex subunit Dad2
  misc_feature (1)..(150): NCBI GI: 261354859 Blast Desc: conserved [Verticillium albo-atrum VaMs.102]
  misc_feature (1)..(144): NCBI GI: 39968859 Blast Desc: MGG_02522 [Magnaporthe grisea 70-15] gi|145013857|gb|EDJ98498.1| MGG_02522 [Magnaporthe grisea 70-15]
  misc_feature (2)..(141): NCBI GI: 171689368 Blast Desc: protein product [Podospora anserina] gi|170944646|emb|CAP70757.1| protein product [Podospora anserina]
  misc_feature (19)..(133): NCBI GI: 85080891 Blast Desc: NCU01841 [Neurospora crassa OR74A] gi|28881231|emb|CAD70469.1| conserved [Neurospora crassa] gi|28917696|gb|EAA27389.1| conserved [Neurospora crassa OR74A]
  misc_feature (1)..(132): NCBI GI: 46109336 Blast Desc: FG01550.1 [Gibberella zeae PH-1]
  misc_feature (31)..(133): NCBI GI: 154299277 Blast Desc: BC1G_11124 [Botryotinia fuckeliana B05.10] gi|150857389|gb|EDN32581.1| BC1G_11124 [Botryotinia fuckeliana B05.10]
  misc_feature (1)..(128): NCBI GI: 256730566 Blast Desc: NECHADRAFT_30360 [Nectria haematococca mpVI 77-13-4]
  misc_feature (1)..(136): NCBI GI: 169604594 Blast Desc: SNOG_05311 [Phaeosphaeria nodorum SN15] gi|111066582|gb|EAT87702.1| SNOG_05311 [Phaeosphaeria nodorum SN15]
  misc_feature (1)..(139): NCBI GI: 189196694 Blast Desc: conserved [Pyrenophora tritici-repentis Pt-1C-BFP] gi|187980564|gb|EDU47190.1| conserved [Pyrenophora tritici-repentis Pt-1C-BFP]
  misc_feature (2)..(133): NCBI GI: 116199603 Blast Desc: CHGG_07957 [Chaetomium globosum CBS 148.51] gi|88179236|gb|EAQ86704.1| CHGG_07957 [Chaetomium globosum CBS 148.51]
MAFSTRNVSGHLRQGSSTSNPNAQSTSQSTALLARVNEKKAELDNLKQLRELSAAVADQMEALQQQLATLSDGTEAIATVLGNWHNVIQAINMASVKIPAPRGSGQSTTEQAPQVPLPQTLVRIPTEHAPALQAQAENAMEIDKTQPPSP

SEQ ID NO: 33330 - DNA, 3229 bp, Muscodor strobelii; identical to SEQ ID NO: 33327
  misc_feature: SGI EST ID NO. CUFF.78777.0
  misc_feature: Variant of the nucleotide sequence at SEQ ID NO 33328

SEQ ID NO: 33331 - DNA, 2241 bp, Muscodor strobelii
  misc_feature: SGI cDNA ID NO. 571495
  misc_feature: Encodes the peptide sequence at SEQ ID NO 33332
atggcacgcctcaacgagcccatagtgtcaacagacaccctagaaacattacgtcgaaagttcttgcggcagaatagagacattgcccgcaccaattcaacacagtccctgaagatacgcagtctggaaaacgaatgcgcccgcctcctatccgagaaccttgagctgcgcggccaagttctgcatctgcagaccgaactcaaaggcagccatgcccaaagggtcgccaatcatgctctccagatcaaggaaaagatggaagcccagttggtcgaatggggtgcaatgctggctggtctcggccacgagcccatacccagaaaccgctctcccagggccctcaagaaacaaaagatccaccgaaacagcctgtctcgccctgccatgtccgactggaggaggcgtgagaccctgagttccatgcaggaccttgaagcagctgcccttcaggagggccggttgccgccgctgtgggaaaataagtcttaccctcgtgagacgctcaagtatgctccaccgcccgtgtgtcttcgaccttatgctgacgccaattacagccgagaagaaattctagcattacgcatagaggcggaggaaaacaccgattcccctgacttgggcccaccgcctgtatctcgaatactcgacgaggatcctgtcaagctcgatctatctacgctgaccagacttctgaagcccgcccttagtgaatccgagtatagcgaccaagacgaggcgacctccaagcccaaatcagctccggcttcgcctcctgcgcacacacttccagaagcatcacccaaagacaaaccagagccgactgaagctagaaatcatgaaccttcagttaaaagccctacgccgcctgactcttcatctcccagacaagacgctaaagccaacttgaagagaaaagatagagacgacgacgagggagataaccatacggtcgttgaaccgatactcccatccagtatgatgaagaagacccagccagataaagcagcaggcgccaacccgaagtccacgaatcgtcccatcaaagatttaccatcgctgaaaaaggacggcagagaaaggccaatgaatacagcaggcagaaaaccactgggatccaagagtacaaatgaggcacttcgtacttcccctaagaagtctgcgaaggtaccaggccaaggtgaaaagcccagggccgcgagcaaagccggcaataccactgtcaaacataccaaatcggaacccgagcctgcggtggtagaggtctcggttcctgcttctcctcttcctatcgctgttgttgatatcgaacccgagagtccaacagcagaacccgatactgttgtccccaactccccggaaccatctgtgccaaccaacgaggttaaggatacgccgccgcctgtcgatatttcatctcagggagagaccacgcgaggaaaccgtcgtgcccgagctgcagtcagttacgcggagccgaatcttcgggataagatgcgaaggcctaacactaagcaactctttgatgcagtggcaggcgaggggaagaatattcgtcgtgccagcacgtccaggaaagacgagcccgcttcagcacctgcgtccgcagctcggtctgccacttcttcagcatttcgatatccattatcgcctagcaggtctcctgctccagaaagccgagaggcgcatgttatggcgagccctctggtccagaagaccacgcgccagtccgctgctacagagctctcgacaaccatggatggcggaagtcaaaggaatacttcccccgtagatgagagagaggagcagacgaaagccacattgaagagcgcaagtcgacgtttggaagcgatcacatcccaggaggacgaagtgaccaagagttacgatgagttggacgtgtacgagatcaacacctcatccatacacagcgtctctaaggattcgactccagaacacgaaaccaagcaaacgaaaaacaatcgtcaagctcgatcacggaggctttcgtcgatggtgcgcgaggacctgcagcccgatgctacagaatcgggcgaaaagtctactagcaagcgctgtacggccaaaaaacgagcctcgatggtggtaacgaagtccgccaagatcgatacggatgacagtccatcagtagagggagacagtatgagtagcacctcgactgtggagggtgaggggacatcacgggataaggtgtccagtcgcaggaggagtatgatgttatga

SEQ ID NO: 33332 - protein, 746 aa, Muscodor strobelii
  misc_feature: SGI Peptide ID NO. 571495
  misc_feature (476)..(501): Pfam Id: PF07557 Pfam Desc: Shugoshin C terminus
  misc_feature (9)..(64): Pfam Id: PF07558 Pfam Desc: Shugoshin N terminus
  misc_feature (1)..(746): NCBI GI: 116199601 Blast Desc: CHGG_07956 [Chaetomium globosum CBS 148.51] gi|88179235|gb|EAQ86703.1| CHGG_07956 [Chaetomium globosum CBS 148.51]
  misc_feature (1)..(640): NCBI GI: 256730778 Blast Desc: NECHADRAFT_29796 [Nectria haematococca mpVI 77-13-4]
  misc_feature (1)..(519): NCBI GI: 85080895 Blast Desc: NCU01842 [Neurospora crassa OR74A] gi|74619924|sp|Q872U8.1|SGO1_NEUCR RecName: Full=Shugoshin gi|28881230|emb|CAD70468.1| [Neurospora crassa] [Neurospora
  misc_feature (1)..(643): NCBI GI: 46109338 Blast Desc: FG01551.1 [Gibberella zeae PH-1]
  misc_feature (1)..(515): NCBI GI: 154299275 Blast Desc: BC1G_11123 [Botryotinia fuckeliana B05.10] gi|150857388|gb|EDN32580.1| BC1G_11123 [Botryotinia fuckeliana B05.10]
  misc_feature (3)..(746): NCBI GI: 156065975 Blast Desc: SS1G_00998 [Sclerotinia sclerotiorum 1980] gi|154691857|gb|EDN91595.1| SS1G_00998 [Sclerotinia sclerotiorum 1980]
  misc_feature (1)..(221): NCBI GI: 171689370 Blast Desc: protein product [Podospora anserina] gi|170944647|emb|CAP70758.1| protein product [Podospora anserina]
  misc_feature (1)..(542): NCBI GI: 145606128 Blast Desc: MGG_02523 [Magnaporthe grisea 70-15] gi|145013856|gb|EDJ98497.1| MGG_02523 [Magnaporthe grisea 70-15]
  misc_feature (1)..(388): NCBI GI: 261354858 Blast Desc: shugoshin [Verticillium albo-atrum VaMs.102]
  misc_feature (1)..(526): NCBI GI: 261187352 Blast Desc: shugoshin C terminal domain-containing protein [Ajellomyces dermatitidis SLH14081] gi|239594722|gb|EEQ77303.1| shugoshin C terminal domain-containing protein [Ajellomyces
MARLNEPIVSTDTLETLRRKFLRQNRDIARTNSTQSLKIRSLENECARLLSENLELRGQVLHLQTELKGSHAQRVANHALQIKEKMEAQLVEWGAMLAGLGHEPIPRNRSPRALKKQKIHRNSLSRPAMSDWRRRETLSSMQDLEAAALQEGRLPPLWENKSYPRETLKYAPPPVCLRPYADANYSREEILALRIEAEENTDSPDLGPPPVSRILDEDPVKLDLSTLTRLLKPALSESEYSDQDEATSKPKSAPASPPAHTLPEASPKDKPEPTEARNHEPSVKSPTPPDSSSPRQDAKANLKRKDRDDDEGDNHTVVEPILPSSMMKKTQPDKAAGANPKSTNRPIKDLPSLKKDGRERPMNTAGRKPLGSKSTNEALRTSPKKSAKVPGQGEKPRAASKAGNTTVKHTKSEPEPAVVEVSVPASPLPIAVVDIEPESPTAEPDTVVPNSPEPSVPTNEVKDTPPPVDISSQGETTRGNRRARAAVSYAEPNLRDKMRRPNTKQLFDAVAGEGKNIRRASTSRKDEPASAPASAARSATSSAFRYPLSPSRSPAPESREAHVMASPLVQKTTRQSAATELSTTMDGGSQRNTSPVDEREEQTKATLKSASRRLEAITSQEDEVTKSYDELDVYEINTSSIHSVSKDSTPEHETKQTKNNRQARSRRLSSMVREDLQPDATESGEKSTSKRCTAKKRASMVVTKSAKIDTDDSPSVEGDSMSSTSTVEGEGTSRDKVSSRRRSMML

SEQ ID NO: 33333 - DNA, 666 bp, Muscodor strobelii
  misc_feature: SGI EST ID NO. CUFF.78779.0
  misc_feature: Variant of the nucleotide sequence at SEQ ID NO 33331
tgccaacacagcttgtttgaatcgggactggtaggtggagatgccgacatattcgacctagccaaatgttcaactgcccacctgctccattgccaggtcgcaataagcactgggcagcaaaacttgagagcttgttgaccgcaatttcgtaacagcactctatctgtacatggtgctatcatctttgaccttcaagttgagaacattgctgttgtctcgcgcatctaattctacatatcagtataccaattctctccaacctccttcaccgcatcggtaccccatacgcccctgacaacattgacgtctctcttcacgacaacactggcgatagctccctggccctcatgaatctgtacacaccatggcacgcctcaacgagcccatagtgtcaacagacaccctagaaacattacgtcgaaagttcttgcggcagaatagagacattgcccgcaccaattcaacacagtccctgaagatacgcagtctggaaaacgaatgcgcccgcctcctatccgagaaccttgagctgcgcggccaagttctgcatctgcagaccgaactcaaaggcagccatgcccaaagggtcgccaatcatgctctccagatcaaggaaaagatggaagcccagttggtcgaatggggtgcaatgctggctggtctcgg

SEQ ID NO: 33334 - DNA, 2190 bp, Muscodor strobelii
  misc_feature: SGI cDNA ID NO. 571496
  misc_feature: Encodes the peptide sequence at SEQ ID NO 33335
atggcacgcctcaacgagcccatagtgtcaacagacaccctagaaacattacgtcgaaagttcttgcggcagaatagagacattgcccgcaccaattcaacacagtccctgaagatacgcagtctggaaaacgaatgcgcccgcctcctatccgagaaccttgagctgcgcggccaagttctgcatctgcagaccgaactcaaaggcagccatgcccaaagggtcgccaatcatgctctccagatcaaggaaaagatggaagcccagttggtcgaatggggtgcaatgctggctggtctcggccacgagcccatacccagaaaccgctctcccagggccctcaagaaacaaaagatccaccgaaacagcctgtctcgccctgccatgtccgactggaggaggcgtgagaccctgagttccatgcaggaccttgaagcagctgcccttcaggagggccggttgccgccgctgtgggaaaataagtcttaccctcgtgagacgctcaaccgagaagaaattctagcattacgcatagaggcggaggaaaacaccgattcccctgacttgggcccaccgcctgtatctcgaatactcgacgaggatcctgtcaagctcgatctatctacgctgaccagacttctgaagcccgcccttagtgaatccgagtatagcgaccaagacgaggcgacctccaagcccaaatcagctccggcttcgcctcctgcgcacacacttccagaagcatcacccaaagacaaaccagagccgactgaagctagaaatcatgaaccttcagttaaaagccctacgccgcctgactcttcatctcccagacaagacgctaaagccaacttgaagagaaaagatagagacgacgacgagggagataaccatacggtcgttgaaccgatactcccatccagtatgatgaagaagacccagccagataaagcagcaggcgccaacccgaagtccacgaatcgtcccatcaaagatttaccatcgctgaaaaaggacggcagagaaaggccaatgaatacagcaggcagaaaaccactgggatccaagagtacaaatgaggcacttcgtacttcccctaagaagtctgcgaaggtaccaggccaaggtgaaaagcccagggccgcgagcaaagccggcaataccactgtcaaacataccaaatcggaacccgagcctgcggtggtagaggtctcggttcctgcttctcctcttcctatcgctgttgttgatatcgaacccgagagtccaacagcagaacccgatactgttgtccccaactccccggaaccatctgtgccaaccaacgaggttaaggatacgccgccgcctgtcgatatttcatctcagggagagaccacgcgaggaaaccgtcgtgcccgagctgcagtcagttacgcggagccgaatcttcgggataagatgcgaaggcctaacactaagcaactctttgatgcagtggcaggcgaggggaagaatattcgtcgtgccagcacgtccaggaaagacgagcccgcttcagcacctgcgtccgcagctcggtctgccacttcttcagcatttcgatatccattatcgcctagcaggtctcctgctccagaaagccgagaggcgcatgttatggcgagccctctggtccagaagaccacgcgccagtccgctgctacagagctctcgacaaccatggatggcggaagtcaaaggaatacttcccccgtagatgagagagaggagcagacgaaagccacattgaagagcgcaagtcgacgtttggaagcgatcacatcccaggaggacgaagtgaccaagagttacgatgagttggacgtgtacgagatcaacacctcatccatacacagcgtctctaaggattcgactccagaacacgaaaccaagcaaacgaaaaacaatcgtcaagctcgatcacggaggctttcgtcgatggtgcgcgaggacctgcagcccgatgctacagaatcgggcgaaaagtctactagcaagcgctgtacggccaaaaaacgagcctcgatggtggtaacgaagtccgccaagatcgatacggatgacagtccatcagtagagggagacagtatgagtagcacctcgactgtggagggtgaggggacatcacgggataaggtgtccagtcgcaggaggagtatgatgttatga

SEQ ID NO: 33335 - protein, 729 aa, Muscodor strobelii
  misc_feature: SGI Peptide ID NO. 571496
  misc_feature (459)..(484): Pfam Id: PF07557 Pfam Desc: Shugoshin C terminus
  misc_feature (9)..(64): Pfam Id: PF07558 Pfam Desc: Shugoshin N terminus
  misc_feature (1)..(729): NCBI GI: 116199601 Blast Desc: CHGG_07956 [Chaetomium globosum CBS 148.51] gi|88179235|gb|EAQ86703.1| CHGG_07956 [Chaetomium globosum CBS 148.51]
  misc_feature (1)..(623): NCBI GI: 256730778 Blast Desc: NECHADRAFT_29796 [Nectria haematococca mpVI 77-13-4]
  misc_feature (1)..(502): NCBI GI: 85080895 Blast Desc: NCU01842 [Neurospora crassa OR74A] gi|74619924|sp|Q872U8.1|SGO1_NEUCR RecName: Full=Shugoshin gi|28881230|emb|CAD70468.1| [Neurospora crassa] [Neurospora
  misc_feature (1)..(626): NCBI GI: 46109338 Blast Desc: FG01551.1 [Gibberella zeae PH-1]
  misc_feature (1)..(204): NCBI GI: 171689370 Blast Desc: protein product [Podospora anserina] gi|170944647|emb|CAP70758.1| protein product [Podospora anserina]
  misc_feature (3)..(729): NCBI GI: 156065975 Blast Desc: SS1G_00998 [Sclerotinia sclerotiorum 1980] gi|154691857|gb|EDN91595.1| SS1G_00998 [Sclerotinia sclerotiorum 1980]
  misc_feature (1)..(498): NCBI GI: 154299275 Blast Desc: BC1G_11123 [Botryotinia fuckeliana B05.10] gi|150857388|gb|EDN32580.1| BC1G_11123 [Botryotinia fuckeliana B05.10]
  misc_feature (1)..(523): NCBI GI: 145606128 Blast Desc: MGG_02523 [Magnaporthe grisea 70-15] gi|145013856|gb|EDJ98497.1| MGG_02523 [Magnaporthe grisea 70-15]
  misc_feature (1)..(371): NCBI GI: 261354858 Blast Desc: shugoshin [Verticillium albo-atrum VaMs.102]
  misc_feature (1)..(509): NCBI GI: 240274180 Blast Desc: shugoshin [Ajellomyces capsulatus H143]
MARLNEPIVSTDTLETLRRKFLRQNRDIARTNSTQSLKIRSLENECARLLSENLELRGQVLHLQTELKGSHAQRVANHALQIKEKMEAQLVEWGAMLAGLGHEPIPRNRSPRALKKQKIHRNSLSRPAMSDWRRRETLSSMQDLEAAALQEGRLPPLWENKSYPRETLNREEILALRIEAEENTDSPDLGPPPVSRILDEDPVKLDLSTLTRLLKPALSESEYSDQDEATSKPKSAPASPPAHTLPEASPKDKPEPTEARNHEPSVKSPTPPDSSSPRQDAKANLKRKDRDDDEGDNHTVVEPILPSSMMKKTQPDKAAGANPKSTNRPIKDLPSLKKDGRERPMNTAGRKPLGSKSTNEALRTSPKKSAKVPGQGEKPRAASKAGNTTVKHTKSEPEPAVVEVSVPASPLPIAVVDIEPESPTAEPDTVVPNSPEPSVPTNEVKDTPPPVDISSQGETTRGNRRARAAVSYAEPNLRDKMRRPNTKQLFDAVAGEGKNIRRASTSRKDEPASAPASAARSATSSAFRYPLSPSRSPAPESREAHVMASPLVQKTTRQSAATELSTTMDGGSQRNTSPVDEREEQTKATLKSASRRLEAITSQEDEVTKSYDELDVYEINTSSIHSVSKDSTPEHETKQTKNNRQARSRRLSSMVREDLQPDATESGEKSTSKRCTAKKRASMVVTKSAKIDTDDSPSVEGDSMSSTSTVEGEGTSRDKVSSRRRSMML

SEQ ID NO: 33336 - DNA, 2014 bp, Muscodor strobelii
  misc_feature: SGI EST ID NO. CUFF.78782.0
  misc_feature: Variant of the nucleotide sequence at SEQ ID NO 33334
ggcgtgagaccctgagttccatgcaggaccttgaagcagctgcccttcaggagggccggttgccgccgctgtgggaaaataagtcttaccctcgtgagacgctcaaccgagaagaaattctagcattacgcatagaggcggaggaaaacaccgattcccctgacttgggcccaccgcctgtatctcgaatactcgacgaggatcctgtcaagctcgatctatctacgctgaccagacttctgaagcccgcccttagtgaatccgagtatagcgaccaagacgaggcgacctccaagcccaaatcagctccggcttcgcctcctgcgcacacacttccagaagcatcacccaaagacaaaccagagccgactgaagctagaaatcatgaaccttcagttaaaagccctacgccgcctgactcttcatctcccagacaagacgctaaagccaacttgaagagaaaagatagagacgacgacgagggagataaccatacggtcgttgaaccgatactcccatccagtatgatgaagaagacccagccagataaagcagcaggcgccaacccgaagtccacgaatcgtcccatcaaagatttaccatcgctgaaaaaggacggcagagaaaggccaatgaatacagcaggcagaaaaccactgggatccaagagtacaaatgaggcacttcgtacttcccctaagaagtctgcgaaggtaccaggccaaggtgaaaagcccagggccgcgagcaaagccggcaataccactgtcaaacataccaaatcggaacccgagcctgcggtggtagaggtctcggttcctgcttctcctcttcctatcgctgttgttgatatcgaacccgagagtccaacagcagaacccgatactgttgtccccaactccccggaaccatctgtgccaaccaacgaggttaaggatacgccgccgcctgtcgatatttcatctcagggagagaccacgcgaggaaaccgtcgtgcccgagctgcagtcagttacgcggagccgaatcttcgggataagatgcgaaggcctaacactaagcaactctttgatgcagtggcaggcgaggggaagaatattcgtcgtgccagcacgtccaggaaagacgagcccgcttcagcacctgcgtccgcagctcggtctgccacttcttcagcatttcgatatccattatcgcctagcaggtctcctgctccagaaagccgagaggcgcatgttatggcgagccctctggtccagaagaccacgcgccagtccgctgctacagagctctcgacaaccatggatggcggaagtcaaaggaatacttcccccgtagatgagagagaggagcagacgaaagccacattgaagagcgcaagtcgacgtttggaagcgatcacatcccaggaggacgaagtgaccaagagttacgatgagttggacgtgtacgagatcaacacctcatccatacacagcgtctctaaggattcgactccagaacacgaaaccaagcaaacgaaaaacaatcgtcaagctcgatcacggaggctttcgtcgatggtgcgcgaggacctgcagcccgatgctacagaatcgggcgaaaagtctactagcaagcgctgtacggccaaaaaacgagcctcgatggtggtaacgaagtccgccaagatcgatacggatgacagtccatcagtagagggagacagtatgagtagcacctcgactgtggagggtgaggggacatcacgggataaggtgtccagtcgcaggaggagtatgatgttatgatgatggatacgcacttttaggcacgcagctgtcttgtttctttatgatgaacagcctcggcgagagatccggcaataccgtggaatcagtttattcaatcgtgttgaatatttttgtgttggaaaagcctggctggatacttgttttgtttccttttctactatatccatagcgttggcgtctcccgtcttccgcctataagggggcttttatgatatgccaag

SEQ ID NO: 33337 - DNA, 1158 bp, Muscodor strobelii
  misc_feature: SGI cDNA ID NO. 571498
  misc_feature: Encodes the peptide sequence at SEQ ID NO 33338
atgtcgtcgcagccaagccacccaaccctgctcatcccgggtcccatcgaattcgacgatgccgttctgcagtccatgagccacttcagcgagtcgcatgttgggccaggcttcgttgcgacttttggagaggttctgtccatgcttcgcaagctattccagacaacatcgtcttcatcacagccctttgtcatctccggctcgggcaccctgggctgggacttagtcgccgctaatttggtcgaggccggcgagaatgctctagttcttagcaccggctatttcggtgaaggtttcgccgactgtctcaaggtctacggcgccaacgttgatatcctgaccgcacccgttggcggccggccccaactccccgagatcgagaaagcattgaagagtaagaagtacaagatcatcactgtcacgcacgttgacacgtccaccggtgtgctcagtgaactgcaaaagcttactgagactgtcaagagtgtctctcccgatactctggttatcgtagatggcgtctgcagtgtggctagcgaggagatcgatttcgatgcctggaaactggatggtgttgtcacagccagtcaaaaggctattggatgcccagcagggttgtcgatatccatgttcagtggcaaggccatggaggcattcaaggctcgcaagagcccgccggcctcttatttcgcttccatgaaaaattggacacccatcatgcaaaattacgaggctaagaagccttcctactttgctactccatcgccacaactcatccatgctttacatacggcactctcccagattctcaagaagcctatctccgagagatttgccatacacaaggaggtgtcagacaagatcaagaaggcggttaccgatctcggattaaagcaggtcgccagcagccctgaaaaccaggctcacggcatgactgcgatatacgttcccgagacagtcaagcccacagatttactacctaagcttgccaacagtggcgttgtgtttgccggtggtatccacaaggaaattgccaccaaatacgtgcgatttggacatatgggtgtgagcgtaactgatcctggccggggcgatattgacaaagcgattactgctttgactaatggtctttcagaacttggttacaaaaaagcatag

SEQ ID NO: 33338 - protein, 385 aa, Muscodor strobelii
  misc_feature: SGI Peptide ID NO. 571498
  misc_feature (10)..(369): Pfam Id: PF00266 Pfam Desc: Aminotransferase class-V
  misc_feature (107)..(190): Pfam Id: PF00266 Pfam Desc: Aminotransferase class-V
  misc_feature (1)..(384): NCBI GI: 116199597 Blast Desc: alanine--glyoxylate aminotransferase [Chaetomium globosum CBS 148.51] gi|88179233|gb|EAQ86701.1| alanine--glyoxylate aminotransferase [Chaetomium globosum CBS
  misc_feature (1)..(385): NCBI GI: 39968865 Blast Desc: MGG_02525 [Magnaporthe grisea 70-15] gi|145013854|gb|EDJ98495.1| MGG_02525 [Magnaporthe grisea 70-15]
  misc_feature (3)..(385): NCBI GI: 171689374 Blast Desc: protein product [Podospora anserina] gi|170944649|emb|CAP70760.1| protein product [Podospora anserina]
  misc_feature (1)..(385): NCBI GI: 85076386 Blast Desc: NCU01821 [Neurospora crassa OR74A] gi|28916949|gb|EAA26682.1| NCU01821 [Neurospora crassa OR74A]
  misc_feature (1)..(383): NCBI GI: 261354856 Blast Desc: alanine-glyoxylate aminotransferase [Verticillium albo-atrum VaMs.102]
  misc_feature (1)..(383): NCBI GI: 256729077 Blast Desc: [Nectria haematococca mpVI 77-13-4]
  misc_feature (1)..(383): NCBI GI: 46138757 Blast Desc: FG10893.1 [Gibberella zeae PH-1]
  misc_feature (1)..(385): NCBI GI: 156044132 Blast Desc: SS1G_10169 [Sclerotinia sclerotiorum 1980] gi|154694558|gb|EDN94296.1| SS1G_10169 [Sclerotinia sclerotiorum 1980]
  misc_feature (1)..(383): NCBI GI: 189196254 Blast Desc: purine catabolism protein pucG [Pyrenophora tritici-repentis Pt-1C-BFP] gi|187980344|gb|EDU46970.1| purine catabolism protein pucG [Pyrenophora tritici-repentis Pt-1C-BFP]
  misc_feature (1)..(380): NCBI GI: 226291494 Blast Desc: alanine-glyoxylate aminotransferase [Paracoccidioides brasiliensis Pb18]
  misc_feature (9)..(360): SWISSPROT Homolog: EC 2.6.1.44 Alanine--glyoxylate transaminase
MSSQPSHPTLLIPGPIEFDDAVLQSMSHFSESHVGPGFVATFGEVLSMLRKLFQTTSSSSQPFVISGSGTLGWDLVAANLVEAGENALVLSTGYFGEGFADCLKVYGANVDILTAPVGGRPQLPEIEKALKSKKYKIITVTHVDTSTGVLSELQKLTETVKSVSPDTLVIVDGVCSVASEEIDFDAWKLDGVVTASQKAIGCPAGLSISMFSGKAMEAFKARKSPPASYFASMKNWTPIMQNYEAKKPSYFATPSPQLIHALHTALSQILKKPISERFAIHKEVSDKIKKAVTDLGLKQVASSPENQAHGMTAIYVPETVKPTDLLPKLANSGVVFAGGIHKEIATKYVRFGHMGVSVTDPGRGDIDKAITALTNGLSELGYKKA

SEQ ID NO: 33339 - DNA, 2347 bp, Muscodor strobelii
  misc_feature: SGI EST ID NO. CUFF.78800.0
  misc_feature: Variant of the nucleotide sequence at SEQ ID NO 33337
ggaactttggccgcgatttggcccagactaacaagccagagagatttctagcaattatccatcttattgatattttctttcctgtttgtcagattgtccttcggagccttccccgtagttaacctaccctcctattcttgacattgctcatccaaatcgtttgggacgagattcggtccaattagaccaacattaccgacttcttatttcccgaaaccaaagtgtctgctttctaactaccccttgaaagtgtatagagttcactagccatcttggtgatctacctatcacatcctcgacgttctccaaagctgcccctcacggcgtattgggacacgccgaggacacccgtagtcaattggtctattcgatgcttggccgggcagccgtgttcggcacggccgtaccccgccgtgctggtatccggagtggaagcttctcctccattataatgacgagcgaccccgcgtcgcgcgtatccctcctgtcgggacatctcgcttctacttccccagcttctgcgcttcctcctccccgtcacgctcgcagtctctcatcctcgtcctccaacatgtcgtcgcagccaagccacccaaccctgctcatcccgggtcccatcgaattcgacgatgccgttctgcagtccatgagccacttcagcgagtcgcatgttgggccaggcttcgttgcgacttttggagaggttctgtccatgcttcgcaagctattccagacaacatcgtcttcatcacagccctttgtcatctccggctcgggcaccctgggctgggacttagtcgccgctaatttggtcgaggccggcgagaatgctctagttcttagcaccggctatttcggtgaaggtttcgccgactgtctcaaggtctacggcgccaacgttgatatcctgaccgcacccgttggcggccggccccaactccccgagatcgagaaagcattgaagagtaagaagtacaagatcatcactgtcacgcacgttgacacgtccaccggtgtgctcagtgaactgcaaaagcttactgagactgtcaagagtgtctctcccgatactctggttatcgtagatggcgtctgcagtgtggctagcgaggagatcgatttcgatgcctggaaactggatggtgttgtcacagccagtcaaaaggctattggatgcccagcagggttgtcgatatccatgttcagtggcaaggccatggaggcattcaaggctcgcaagagcccgccggcctcttatttcgcttccatgaaaaattggacacccatcatgcaaaattacgaggctaagaagccttcctactttgctactccatcgccacaactcatccatgctttacatacggcactctcccagattctcaagaagcctatctccgagagatttgccatacacaaggaggtgtcagacaagatcaagaaggcggttaccgatctcggattaaagcaggtcgccagcagccctgaaaaccaggctcacggcatgactgcgatatacgttcccgagacagtcaagcccacagatttactacctaagcttgccaacagtggcgttgtgtttgccggtggtatccacaaggaaattgccaccaaatacgtgcgatttggacatatgggtgtgagcgtaactgatcctggccggggcgatattgacaaagcgattactgctttgactaatggtctttcagaacttggttacaaaaaagcatagatctcagcacataaaagtgttcatcgctctgtcgcacattcaaataaggcagagataaagaatagaatgtatatgatgtacgtagaaactaaataaactagaactggtcaagtcccggtgcaattcattacaaaaaatcaggagcatagaatttagtacacaaattttcaagatccaacaaacctgcgtggtagcaagttgcacctaccggtttcaggaaattataggagctcaatttatactgcctagcaatgtatacatgttgcaaaatatcaaagcatagctgcctttggtaggtgacaactcaattatcacgtgtatgacatttcgtaagtttgcttcgaggtaaaagggcctcttggggcactacatgtagcaatactcgtgtcttataggcaaagtttgtgaatacgacaaccaatattcacaaggagcagcgggtggtttgcgataacacaaatccgggttggtcggatcgtgatgccaggtgctgctatttcggcttgggtactagggtgcgtatggtgttatgtgccaaggccttgtcgctacctcggctctgtcgctacctcagcccgagatgagacgtgaaagaaaaggtggcaagcgaggtttgtg

SEQ ID NO: 33340 - DNA, 297 bp, Muscodor strobelii
  misc_feature: SGI cDNA ID NO. 571499
  misc_feature: Encodes the peptide sequence at SEQ ID NO 33341
atgtcttctgaacagcgaaacgatgagctgcccctcaaggcaagacttgacgaggcggccaaagaagctcataaccccgcagagcctcaaggcccaaccatcgtcgagaaagttgccgagtatattcccggaagctccaagttccttggtaccaagagcgatcaacaacacgcccagcacccctcgtctggttctgaagccgttcctccggaacggcccgatcatgatgagcatatcgcagaattcgtcagggatcagcaccgaagccagaagcctgatggtacattgacagattga

SEQ ID NO: 33341 - protein, 98 aa, Muscodor strobelii
  misc_feature: SGI Peptide ID NO. 571499
  misc_feature (12)..(96): NCBI GI: 256731466 Blast Desc: NECHADRAFT_101685 [Nectria haematococca mpVI 77-13-4]
  misc_feature (13)..(93): NCBI GI: 145602566 Blast Desc: MGG_09473 [Magnaporthe grisea 70-15] gi|145010969|gb|EDJ95625.1| MGG_09473 [Magnaporthe grisea 70-15]
  misc_feature (13)..(95): NCBI GI: 116198147 Blast Desc: [Chaetomium globosum CBS 148.51] gi|88178508|gb|EAQ85976.1| [Chaetomium globosum CBS 148.51]
  misc_feature (34)..(90): NCBI GI: 85101293 Blast Desc: NCU03780 [Neurospora crassa OR74A] gi|28922665|gb|EAA31890.1| [Neurospora crassa OR74A]
  misc_feature (8)..(95): NCBI GI: 261351591 Blast Desc: [Verticillium albo-atrum VaMs.102]
MSSEQRNDELPLKARLDEAAKEAHNPAEPQGPTIVEKVAEYIPGSSKFLGTKSDQQHAQHPSSGSEAVPPERPDHDEHIAEFVRDQHRSQKPDGTLTD

SEQ ID NO: 33342 - DNA, 8188 bp, Muscodor strobelii
  misc_feature: SGI EST ID NO. CUFF.80449.1
  misc_feature: Variant of the nucleotide sequence at SEQ ID NO 33340
tccaacatgaaaatcggctaacgggtgtttacgtgtggaatctgataattgatcgagctgaaacagcagtattatgtagggggaaatgtcttgatctaaagacacaagaggatatcactaccttgcctattgcataccgtcgtgttatcttatcgataatggcaataaccaaaagggctgaatccaaactccctgcctccggtactacatagaccgaagataattcctactagtattccagtattggtccgctaaacagagaggtattttggcattaaccaagtggtcagttgcaagaagatgcaaccgagttcgtatttagaggagggcgaagaccactaaatcataaaagcctccgtgcagcagctgtacaaacccctcttatgaccgaaaacatgctgaacggagaggattgacccattaacgccaaatgtctatgctcttatgttactctcatctatactcgagagtgcctgtcgctcgtaatgaggctatatcccttgcaccttcctatacgatggcggcttcatcgtcctcctaatcaacttgccggcgtaaggagggacaagggaaatcgcgctgatggcgagaacacgccagtagaaccccctggtaccaatgtcagctggatcacttcgtttggcaactttgacagcggaataccgggcacaactaaccatgtctcaagaaattcgagatcaaaataccctcccaaaaagggcacggagccaacataaatcagaaatgtgcccacaatactcataatcatgacgggatgccatgtagttatctcaatagccaccatgagcagctcgttgagcaccaacaccgtgaaactcaccgccaccattctcggcccgtctacctcggtcaggatctgcgacaggccttggatgatgcttccctggtatacagacacaaacacccatacgaagaacgtgcggtatgacaatgatcgtcccgatgtaagctccttgtataattctgggtacaagttggccacgtcctcgtcgacgtctttgtccaggacaagggaaagcacaggtgctgccgtgtagactgttgcataccccacgagtagccaatcctgcaggtcagcgagttagcctaacagaatcaaatgaaaaatccgagatcctcgacttgccttgtagagaccttcaggctcgaacttgatagcgatactgtacacggtttgacagacggcaatgatcagaccgcgatgaatcacgaactgtgcaagtttagcgctcctcttgtagctattgcggccatgccagacgagaagcttggttaagtgatagaattgctcaatagagaaatcggcggccaagctagcctgacgaccctccttgccgacgatgcccaccccgacatcagcggcttgaatcatggacacatcgttgccgccgtcgcctatacagcaaactcgtttcttggtgaattccttgattaatttagcgatatcagccttttgtgtaggtgagcatcgacaggccacaaccgtgggcagctgtacagctgccgatatgaattcggtcccgaaatgcgtcagaaatagcgacaaactttcaccgtcgaccagcaagcaagaatcgggcttgctccgaaggaagtcgagatggtcttgggcgttgtccttgcgcttgagtttggcgacagtgtagatatactgccctcgagcaaccaattttgagcttacagcaacgcaccgtgccgtctccaccttatcacctgtcagcatccagatcttgatgccggcattgcgtaggagttctagagaaggcttgacatctttctgcagcttgtcctctacgcctgtgacccccagcagctcgaggtcgtgttctaaaaagcgggcgacaacgcgctgagtagcggcatcgcgaccgctaatggcaagtgcagcgtctttgtagctgttcgagaactcttggtactggtcgaaggagagttttttacgtccaacaaccaaggttctcaaaccctcccttgccatgtttgcggtctcctcgtctaaccaatcgttcgaggccacaatggaacccatgacggtatctgcgcccttctggtagaaccagatttcgccattctccagggatggcggtgacgagcttgccgcctggtagaactggacgatgatgcccatgcgtttcccatccgacgtgaaagggaagacatcgagtatccgtacctggacaacgctcttgccggtttctgttgactttagtaccatacccttccgatctcgataagcgagtcgcaggccaatatgctcggtccatcgtactattgcaatctcgtcgggcgaggacgcttgatatgaagtggtagtctgaccgtccacttcctctgttgttggtgtgacattgtggcagagcgcgagcgccatgactacatcgcgtacccgggatccgatctctcgacgtgtccgagtagcggaggctccagcggcgacgctgtgggtggacgacggtgttacgagcatctggctatttgccttgatcccgaagccttgccgcacatatgatgccacctcatccatcgcatcattggcataagacacagtgcctacatgtatcttcttcatctccatctcgttctgagtcagagtaccggttttgtcgctcaacaaatattcgatgcgccccaggtcctcaggaatggtgctggtgcgtactacagctccgaaaatccccggatccctttgaatcagccatgaatagacgctcttccccaaatctaggtttaccctgagacttatgggcacgatggtcgagaacaggaccagaaagcgcataatcttgacataccagacattgccttcggtgttactgaagccctcgagggcaacgagaacaatggagagcgcgagggtgagcgcacacagtatcttagtcaacgagttgatctcaaactctaacaagcctgttttggaacgcgaaggagcagtagacagtgcggaccgagtctgaggacccgtgtagacgactacagccatcgtagccacttgggaggcaatcaccgtattgacccacgctgtattgtcaatggacagcgggacgctgtgatctgttccagacgcatctctgccttgagaggccagctcaatggtgcccacaaactcgttgaccttcttatccggcttccccccggtcacccggacgttgactagctcctccaaggggagtgcctgggtgagagccgaagccactcgaagtttccaatctgtctcaccgtccagctggtctgtcctgataaaagtctcgcccgtcgagccaccttcggccacattcgaaccgtccaaacccgtcgtcttccctttgctatccatcgagttgtcccgtaccgccgcatgatcagctgtgtctaccaacggcacatcggtctccggttcgggggtcgcctgcagtgcttcacctgcagagcattgaagaatgacaacatcggcgggcacgcgttgccctttgcccagctttaacacatcgccgactttgacatcacgagacttcttgctcatttcgcgcacgtgggatgatggttgatgcaagcccatgccctgggcccgctcttcttcttcctggacatccgacagccggtcgttgcgtcttgagctgtctctgtagcggtggcgcaaggtggacgacatgaatctgctcgcggtgccggacgcggtggcgtcgctgaagtggagaacagtgtactcctccgagttggcctcgttatctctccggcgcctctcgacgtcgtcgtaagcttccttgcccatggtgatgaccagcacgaacgctaagggggcgatatatgtggataggtagcctatgcgtagtgcgggaatggcctgggagagggcgacaagcaggaaatacaggttgaagaagaaggagaactcgttgtacagagtgacgggcaggaaagtcagggccgtgtacttggcgttggagatcaagttgggcgggtatcgcatgggttgcaccgagccgacgtggacagttctggaggcggaagggtcgtcttgctccaggtccagctcgtcgtcggcgttgtcgtcgatgtggccgtcggagaggcgagcgctgctggcggacatgaagctgggcatcctcagggtcgagcgcagcttggagagagggccggggcgggaagagacacgacggccgggcggcgggtgctggcgcagcagaggcgcatcgtcgccggcggtggcgctgccatcggagtagcgctgggggtgggagtcggggtcgagcagggcgagggcgtcgtcgtcggtgggtgcgtgggaagcgaggtcgccgtagcgggggttgcgtttggcggatcgcctcaggccgcccatccggaggcttctgagggcgatgctgcggggggctctttgttctcgcgcggcgtctggggcaagcagactggcgccatgaggccggggcttgggaggaggagggatctagctcgtcgagatcgaggtcgagatcggcgtccgagtcggagtcgggctggggcgagtcgggcggttcagtcgggcgatagggaggtgtaggcggcattcccgcatcggggtcatgccctgcagaggggcaggggagcacggaggagcgaggagggcgagggatttggtaagcggtgtcgtcgttgtcgtcgttgtcgtcttgcgccggcacaggttcgcacggtcggcgtgtccagagatgggagcaataagctatcagaagagtcggtagcgcagcgatacgggcatgttgctaccccaggccgcgtcccgtgagcgtgagtctctggctctgtccgcagtggtgtggatggccgaatagtatgcagagattatggcttggagtgcgttgggtcatgacatggatgggaactcagatacgaggtaggtactctagcttgtagacaagttgcagttgacagaaacggcagtcacctacacgtgtaaagaggtgcaggaagacgccaggcaagcccaggcagacagaaaacacggcccagggactttgaccaactgttacactggcgctgctcccaggtagctcctctcgcacccgccgtggttcacctctgttacgatacaatgtggccagcagcaagcgacacatccaggctgatccgtatagatacttatcagcaaagttcttgagaactcctctgtttctttccatgccgcacctcatccaggtctcctaccaagccgcatgtccagattcctctttcgggatgtcgtagacaggaggagaagaaatgcatgcatccatccgctttcttcgccagagtcaagcgaagagtcagcaggcaagctggatactatatcatgctatccgctacgccaagtgcgctgcctgccgtggatatatgatttgcgaatagatgcgtgacacctaaccacttcgccgtagaaagtcgacatatcaggtagccagtcgacctggccaaccagactgacgtgttcaatttaaggggatctataagtcttttgtgtctcccattcctaacccgcctcgtgtttgaacttcactatcaagtatgaccgccgtatcgtggggaggcacttattctcaactcacacaacttttctcacctctagatcgcccttgttatccccactcagcgccagtaaactgcccgtttccagcttcttcttccatttgttactttcgtacggcgctagaatcagagtcatgcgaagcgcaatcccttgacttgacccatgctccactgcctctgcacctagaggcgtgaacacccatcggccaaaagcccaattcaagatatagcgttgctgtgccgtcgtaggcgggataagtgacgcttccccgtccgaattacagaccccggacatcgttgtcatgacggacttgatcctgtagacttcatccctcggggccgtcttgagcaacatcatgagcttgcctgcgtcgacgacggcgtcttcaggcccagaaagcgtaaccgatagaacctcaacttcggcttgatggtgttcacggctgtcatgactgtggccatttggcatgagcagagactcgtcagttaatgtgcgcgcaagtccgccatcgatgcccaagagtaactcggcggggacacgacccttgtcgctcttaacccaggcaacatcaacccctaggtcaccgactcgatcgcgaaccgcgtccattcgactctcgtcacagttctcccatttgttgtagacaatcaggtccgtgtagcgtgcctgtatgccagcggtgacgctggaatcctcataccccgcccagttctcgacgtccagaacgctgacgaccccatcaagagagaaatgtccggtctgccgggcgacacgattgacctctatggccaaggttgccggaaaggcactgcccgacgtttcgattacgatgcgatcgggatgaaaagcatcgcggagctcgttaagggcagcgcttaactgcccgacgagattgcaacagatacaaccgttgagcagctcttgaacgcctgaaacggcgctggcttgggcgagctgagagtcaattgcgacatcgcctaattcatttttgcaaagggctaggcgataggacgggttaatggcgcgcaactgcgggaccaaattcaggaggagggtcgttttgcctgagcccagaaaccccgtgacgatggtaacgggaatggggtcgcccattgattgacgatctagcaggcccggcgagcccggtttaggtatttactgtgattaagacttagacctgccaacacagtctcgaattggatgagagagcagggagaagcgaaggcaaatcagaggcgagaacgcatgccaagcttgtgatggaggggccgaactccgattcctaggcaactagatctgctaatctccaaacctacctatgcaattatcggccgatactttcaccatcggccataattctttgtttgaagtgattatgccaagccgtcatctcttccctccattaagccgtcttttgcgcctccgcaaacctctagactcctgcactctgaatgaattaatgcatcatacagtgagtgtcgtttgcttcacttacacgcaaaagccaccacagcggatgcagccgacggagtgagcacaactgcgatacaactattaagaggtaatcaatagcgcatcaacacccacatacacaaatatgaggatagatttcgtgtcaatgccacgtgaactgactccgctatttttactcacactgcgcgatgacgttgcatgccaagcagatgccgacgagcagactaggtatcccacctgttgcatctcgcacacgaagcctgtgtgaacaaagtctcgaattcaaatctgaaaaatcatctcctagccgaaatttataacgaatcagctggcatgtcttctgaacagcgaaacgatgagctgcccctcaaggcaagacttgacgaggcggccaaagaagctcataaccccgcagagcctcaaggcccaaccatcgtcgagaaagttgccgagtatattcccggaagctccaagttccttggtaccaagagcgatcaacaacacgcccagcacccctcgtctggttctgaagccgttcctccggaacggcccgatcatgatgagcatatcgcagaattcgtcagggatcagcaccgaagccagaagcctgatggtacattgacagattgagacactgtccgtagcgtacgagctacgaagaacgtgtatcatggcgatatgatattgctcgtgggggccagtaaaagacataagcagctcggcaggcacagcagggtgcttcgctcgattcccaccttgtgcctaacctcccttcacaagcggtctgctcttatggtcattttcaaggttgtgtgctgggctaagtttccatttaaggcatctgggctttcatttccgagccagacggtttcgagacgcaattgattgttctccagtactatcgcgccatggggcttttcaacggccctactttcactacttctatactattttataattgaaaatcatcctcaaccttatgactaccgagtgtcgtcttgtggtacaagtaggcaagcaacgacaagaagcgatcttgcaaccacgacaactcatatgtccaccgacgaaataacattccaagtactacctctgattaattatcatttaggccgtgtgtgtgtgttagtgtgtgtatgtgtattgtttaacgccgcaggaaagaatcgagttccc

SEQ ID NO: 33343 - DNA, 1098 bp, Muscodor strobelii
  misc_feature: SGI cDNA ID NO. 571500
  misc_feature: Reduced expression when VOC is produced
  misc_feature: Encodes the peptide sequence at SEQ ID NO 33344
atgggcgaccccattcccgttaccatcgtcacggggtttctgggctcaggcaaaacgaccctcctcctgaatttggtcccgcagttgcgcgccattaacccgtcctatcgcctagccctttgcaaaaatgaattaggcgatgtcgcaattgactctcagctcgcccaagccagcgccgtttcaggcgttcaagagctgctcaacggttgtatctgttgcaatctcgtcgggcagttaagcgctgcccttaacgagctccgcgatgcttttcatcccgatcgcatcgtaatcgaaacgtcgggcagtgcctttccggcaaccttggccatagaggtcaatcgtgtcgcccggcagaccggacatttctctcttgatggggtcgtcagcgttctggacgtcgagaactgggcggggtatgaggattccagcgtcaccgctggcatacaggcacgctacacggacctgattgtctacaacaaatgggagaactgtgacgagagtcgaatggacgcggttcgcgatcgagtcggtgacctaggggttgatgttgcctgggttaagagcgacaagggtcgtgtccccgccgagttactcttgggcatcgatggcggacttgcgcgcacattaactgacgagtctctgctcatgccaaatggccacagtcatgacagccgtgaacaccatcaagccgaagttgaggttctatcggttacgctttctgggcctgaagacgccgtcgtcgacgcaggcaagctcatgatgttgctcaagacggccccgagggatgaagtctacaggatcaagtccgtcatgacaacgatgtccggggtctgtaattcggacggggaagcgtcacttatcccgcctacgacggcacagcaacgctatatcttgaattgggcttttggccgatgggtgttcacgcctctaggtgcagaggcagtggagcatgggtcaagtcaagggattgcgcttcgcatgactctgattctagcgccgtacgaaagtaacaaatggaagaagaagctggaaacgggcagtttactggcgctgagtggggataacaagggcgatctagaggtgagaaaagttgtgtga

SEQ ID NO: 33344 - protein, 365 aa, Muscodor strobelii
  misc_feature: SGI Peptide ID NO. 571500
  misc_feature (6)..(187): Pfam Id: PF02492 Pfam Desc: CobW/HypB/UreG, nucleotide-binding domain
  misc_feature (4)..(364): NCBI GI: 116198145 Blast Desc: CHGG_07228 [Chaetomium globosum CBS 148.51] gi|88178507|gb|EAQ85975.1| CHGG_07228 [Chaetomium globosum CBS 148.51]
  misc_feature (4)..(364): NCBI GI: 85101297 Blast Desc: NCU03781 [Neurospora crassa OR74A] gi|12718488|emb|CAC28817.1| conserved [Neurospora crassa] gi|28922666|gb|EAA31891.1| NCU03781 [Neurospora crassa OR74A]
  misc_feature (5)..(365): NCBI GI: 46121533 Blast Desc: FG05145.1 [Gibberella zeae PH-1]
  misc_feature (4)..(365): NCBI GI: 256731071 Blast Desc: [Nectria haematococca mpVI 77-13-4]
  misc_feature (4)..(364): NCBI GI: 145602564 Blast Desc: MGG_12989 [Magnaporthe grisea 70-15] gi|145010968|gb|EDJ95624.1| MGG_12989 [Magnaporthe grisea 70-15]
  misc_feature (4)..(364): NCBI GI: 258578141 Blast Desc: conserved [Uncinocarpus reesii 1704] gi|237903518|gb|EEP77919.1| conserved [Uncinocarpus reesii 1704]
  misc_feature (4)..(365): NCBI GI: 119500934 Blast Desc: CobW domain protein [Neosartorya fischeri NRRL 181] gi|119415389|gb|EAW25327.1| CobW domain protein [Neosartorya fischeri NRRL 181]
  misc_feature (4)..(365): NCBI GI: 70994494 Blast Desc: CobW domain protein [Aspergillus fumigatus Af293] gi|66849660|gb|EAL89988.1| CobW domain protein [Aspergillus fumigatus Af293]
  misc_feature (4)..(365): NCBI GI: 159125061 Blast Desc: CobW domain protein [Aspergillus fumigatus A1163]
  misc_feature (4)..(364): NCBI GI: 119180250 Blast Desc: CIMG_08777 [Coccidioides immitis RS]
  misc_feature: Useful for introducing or modulating the production of volatile compounds
MGDPIPVTIVTGFLGSGKTTLLLNLVPQLRAINPSYRLALCKNELGDVAIDSQLAQASAVSGVQELLNGCICCNLVGQLSAALNELRDAFHPDRIVIETSGSAFPATLAIEVNRVARQTGHFSLDGVVSVLDVENWAGYEDSSVTAGIQARYTDLIVYNKWENCDESRMDAVRDRVGDLGVDVAWVKSDKGRVPAELLLGIDGGLARTLTDESLLMPNGHSHDSREHHQAEVEVLSVTLSGPEDAVVDAGKLMMLLKTAPRDEVYRIKSVMTTMSGVCNSDGEASLIPPTTAQQRYILNWAFGRWVFTPLGAEAVEHGSSQGIALRMTLILAPYESNKWKKKLETGSLLALSGDNKGDLEVRKVV

SEQ ID NO: 33345 - DNA, 8227 bp, Muscodor strobelii
  misc_feature: SGI EST ID NO. CUFF.80448.0
  misc_feature: Variant of the nucleotide sequence at SEQ ID NO 33343
gggaactcgattctttcctgcggcgttaaacaatacacatacacacactaacacacacacacggcctaaatgataattaatcagaggtagtacttggaatgttatttcgtcggtggacatatgagttgtcgtggttgcaagatcgcttcttgtcgttgcttgcctacttgtaccacaagacgacactcggtagtcataaggttgaggatgattttcaattataaaatagtatagaagtagtgaaagtagggccgttgaaaagccccatggcgcgatagtactggagaacaatcaattgcgtctcgaaaccgtctggctcggaaatgaaagcccagatgccttaaatggaaacttagcccagcacacaaccttgaaaatgaccataagagcagaccgcttgtgaagggaggttaggcacaaggtgggaatcgagcgaagcaccctgctgtgcctgccgagctgcttatgtcttttactggcccccacgagcaatatcatatcgccatgatacacgttcttcgtagctcgtacgctacggacagtgtctcaatctgtcaatgtaccatcaggcttctggcttcggtgctgatccctgacgaattctgcgatatgctcatcatgatcgggccgttccggaggaacggcttcagaaccagacgaggggtgctgggcgtgttgttgatcgctcttggtaccaaggaacttggagcttccgggaatatactcggcaactggggagaatctagggtcaaaaagttcgttcttgatgtcggtatgcatttcaaggataacaagggcaagcgtgataaaaggggcaaagagaaatataactcacctttctcgacgatggttgggccttgaggctctgcggggttatgagcttctttggccgcctcgtcaagtcttgccttgaggggcagctcatcgtttcgctgttcagaagacatgccagctgattcgttataaatttcggctaggagatgatttttcagatttgaattcgagactttgttcacacaggcttcgtgtgcgagatgcaacaggtgggatacctagtctgctcgtcggcatctgcttggcatgcaacgtcatcgcgcagtgtgagtaaaaatagcggagtcagttcacgtggcattgacacgcttatcacggcgtcagtcacgatcgcactcgacacgcaaaccgatggacctgcaggtacgtacaaatctatcctcatatttgtgtatgtgggtgttgatgcgctattgattacctcttaatagttgtatcgcagttgtgctcactccgtcggctgcatccgctgtggtggcttttgcgtgtaagtgaagcaaacgacactcactgtatgatgcattaattcattcagagtgcaggagtctagaggtttgcggaggcgcaaaagacggcttaatggagggaagagatgacggcttggcataatcacttcaaacaaagaattatggccgatggtgaaagtatcggccgataattgcataggtaggtttggagattagcagatctagttgcctaggaatcggagttcggcccctccatcacaagcttggcatgcgttctcgcctctgatttgccttcgcttctccctgctctctcatccaattcgagactgtgttggcaggtctaagtcttaatcacagtaaatacctaaaccgggctcgccgggcctgctagatcgtcaatcaatgggcgaccccattcccgttaccatcgtcacggggtttctgggctcaggcaaaacgaccctcctcctgaatttggtcccgcagttgcgcgccattaacccgtcctatcgcctagccctttgcaaaaatgaattaggcgatgtcgcaattgactctcagctcgcccaagccagcgccgtttcaggcgttcaagagctgctcaacggttgtatctgttgcaatctcgtcgggcagttaagcgctgcccttaacgagctccgcgatgcttttcatcccgatcgcatcgtaatcgaaacgtcgggcagtgcctttccggcaaccttggccatagaggtcaatcgtgtcgcccggcagaccggacatttctctcttgatggggtcgtcagcgttctggacgtcgagaactgggcggggtatgaggattccagcgtcaccgctggcatacaggcacgctacacggacctgattgtctacaacaaatgggagaactgtgacgagagtcgaatggacgcggttcgcgatcgagtcggtgacctaggggttgatgttgcctgggttaagagcgacaagggtcgtgtccccgccgagttactcttgggcatcgatggcggacttgcgcgcacattaactgacgagtctctgctcatgccaaatggccacagtcatgacagccgtgaacaccatcaagccgaagttgaggttctatcggttacgctttctgggcctgaagacgccgtcgtcgacgcaggcaagctcatgatgttgctcaagacggccccgagggatgaagtctacaggatcaagtccgtcatgacaacgatgtccggggtctgtaattcggacggggaagcgtcacttatcccgcctacgacggcacagcaacgctatatcttgaattgggcttttggccgatgggtgttcacgcctctaggtgcagaggcagtggagcatgggtcaagtcaagggattgcgcttcgcatgactctgattctagcgccgtacgaaagtaacaaatggaagaagaagctggaaacgggcagtttactggcgctgagtggggataacaagggcgatctagaggtgagaaaagttgtgtgagttgagaataagtgcctccccacgatacggcggtcatacttgatagtgaagttcaaacacgaggcgggttaggaatgggagacacaaaagacttatagatccccttaaattgaacacgtcagtctggttggccaggtcgactggctacctgatatgtcgactttctacggcgaagtggttaggtgtcacgcatctattcgcaaatcatatatccacggcaggcagcgcacttggcgtagcggatagcatgatatagtatccagcttgcctgctgactcttcgcttgactctggcgaagaaagcggatggatgcatgcatttcttctcctcctgtctacgacatcccgaaagaggaatctggacatgcggcttggtaggagacctggatgaggtgcggcatggaaagaaacagaggagttctcaagaactttgctgataagtatctatacggatcagcctggatgtgtcgcttgctgctggccacattgtatcgtaacagaggtgaaccacggcgggtgcgagaggagctacctgggagcagcgccagtgtaacagttggtcaaagtccctgggccgtgttttctgtctgcctgggcttgcctggcgtcttcctgcacctctttacacgtgtaggtgactgccgtttctgtcaactgcaacttgtctacaagctagagtacctacctcgtatctgagttcccatccatgtcatgacccaacgcactccaagccataatctctgcatactattcggccatccacaccactgcggacagagccagagactcacgctcacgggacgcggcctggggtagcaacatgcccgtatcgctgcgctaccgactcttctgatagcttattgctcccatctctggacacgccgaccgtgcgaacctgtgccggcgcaagacgacaacgacgacaacgacgacaccgcttaccaaatccctcgccctcctcgctcctccgtgctcccctgcccctctgcagggcatgaccccgatgcgggaatgccgcctacacctccctatcgcccgactgaaccgcccgactcgccccagcccgactccgactcggacgccgatctcgacctcgatctcgacgagctagatccctcctcctcccaagccccggcctcatggcgccagtctgcttgccccagacgccgcgcgagaacaaagagccccccgcagcatcgccctcagaagcctccggatgggcggcctgaggcgatccgccaaacgcaacccccgctacggcgacctcgcttcccacgcacccaccgacgacgacgccctcgccctgctcgaccccgactcccacccccagcgctactccgatggcagcgccaccgccggcgacgatgcgcctctgctgcgccagcacccgccgcccggccgtcgtgtctcttcccgccccggccctctctccaagctgcgctcgaccctgaggatgcccagcttcatgtccgccagcagcgctcgcctctccgacggccacatcgacgacaacgccgacgacgagctggacctggagcaagacgacccttccgcctccagaactgtccacgtcggctcggtgcaacccatgcgatacccgcccaacttgatctccaacgccaagtacacggccctgactttcctgcccgtcactctgtacaacgagttctccttcttcttcaacctgtatttcctgcttgtcgccctctcccaggccattcccgcactacgcataggctacctatccacatatatcgcccccttagcgttcgtgctggtcatcaccatgggcaaggaagcttacgacgacgtcgagaggcgccggagagataacgaggccaactcggaggagtacactgttctccacttcagcgacgccaccgcgtccggcaccgcgagcagattcatgtcgtccaccttgcgccaccgctacagagacagctcaagacgcaacgaccggctgtcggatgtccaggaagaagaagagcgggcccagggcatgggcttgcatcaaccatcatcccacgtgcgcgaaatgagcaagaagtctcgtgatgtcaaagtcggcgatgtgttaaagctgggcaaagggcaacgcgtgcccgccgatgttgtcattcttcaatgctctgcaggtgaagcactgcaggcgacccccgaaccggagaccgatgtgccgttggtagacacagctgatcatgcggcggtacgggacaactcgatggatagcaaagggaagacgacgggtttggacggttcgaatgtggccgaaggtggctcgacgggcgagacttttatcaggacagaccagctggacggtgagacagattggaaacttcgagtggcttcggctctcacccaggcactccccttggaggagctagtcaacgtccgggtgaccggggggaagccggataagaaggtcaacgagtttgtgggcaccattgagctggcctctcaaggcagagatgcgtctggaacagatcacagcgtcccgctgtccattgacaatacagcgtgggtcaatacggtgattgcctcccaagtggctacgatggctgtagtcgtctacacgggtcctcagactcggtccgcactgtctactgctccttcgcgttccaaaacaggcttgttagagtttgagatcaactcgttgactaagatactgtgtgcgctcaccctcgcgctctccattgttctcgttgccctcgagggcttcagtaacaccgaaggcaatgtctggtatgtcaagattatgcgctttctggtcctgttctcgaccatcgtgcccataagtctcagggtaaacctagatttggggaagagcgtctattcatggctgattcaaagggatccggggattttcggagctgtagtacgcaccagcaccattcctgaggacctggggcgcatcgaatatttgttgagcgacaaaaccggtactctgactcagaacgagatggagatgaagaagatacatgtaggcactgtgtcttatgccaatgatgcgatggatgaggtggcatcatatgtgcggcaaggcttcgggatcaaggcaaatagccagatgctcgtaacaccgtcgtccacccacagcgtcgccgctggagcctccgctactcggacacgtcgagagatcggatcccgggtacgcgatgtagtcatggcgctcgcgctctgccacaatgtcacaccaacaacagaggaagtggacggtcagactaccacttcatatcaagcgtcctcgcccgacgagattgcaatagtacgatggaccgagcatattggcctgcgactcgcttatcgagatcggaagggtatggtactaaagtcaacagaaaccggcaagagcgttgtccaggtacggatactcgatgtcttccctttcacgtcggatgggaaacgcatgggcatcatcgtccagttctaccaggcggcaagctcgtcaccgccatccctggagaatggcgaaatctggttctaccagaagggcgcagataccgtcatgggttccattgtggcctcgaacgattggttagacgaggagaccgcaaacatggcaagggagggtttgagaaccttggttgttggacgtaaaaaactctccttcgaccagtaccaagagttctcgaacagctacaaagacgctgcacttgccattagcggtcgcgatgccgctactcagcgcgttgtcgcccgctttttagaacacgacctcgagctgctgggggtcacaggcgtagaggacaagctgcagaaagatgtcaagccttctctagaactcctacgcaatgccggcatcaagatctggatgctgacaggtgataaggtggagacggcacggtgcgttgctgtaagctcaaaattggttgctcgagggcagtatatctacactgtcgccaaactcaagcgcaaggacaacgcccaagaccatctcgacttccttcggagcaagcccgattcttgcttgctggtcgacggtgaaagtttgtcgctatttctgacgcatttcgggaccgaattcatatcggcagctgtacagctgcccacggttgtggcctgtcgatgctcacctacacaaaaggctgatatcgctaaattaatcaaggaattcaccaagaaacgagtttgctgtataggcgacggcggcaacgatgtgtccatgattcaagccgctgatgtcggggtgggcatcgtcggcaaggagggtcgtcaggctagcttggccgccgatttctctattgagcaattctatcacttaaccaagcttctcgtctggcatggccgcaatagctacaagaggagcgctaaacttgcacagttcgtgattcatcgcggtctgatcattgccgtctgtcaaaccgtgtacagtatcgctatcaagttcgagcctgaaggtctctacaaggattggctactcgtggggtatgcaacagtctacacggcagcacctgtgctttcccttgtcctggacaaagacgtcgacgaggacgtggccaacttgtacccagaattatacaaggagcttacatcgggacgatcattgtcataccgcacgttcttcgtatgggtgtttgtgtctgtataccagggaagcatcatccaaggcctgtcgcagatcctgaccgaggtagacgggccgagaatggtggcggtgagtttcacggtgttggtgctcaacgagctgctcatggtggctattgagataactacatggcatcccgtcatgattatgagtattgtgggcacatttctgatttatgttggctccgtgccctttttgggagggtattttgatctcgaatttcttgagacatgggggttctactggcgtgttctcgccatcagcgcgatttcccttgtccctccttacgccggcaagttgattaggaggacgatgaagccgccatcgtataggaaggtgcaagggatatagcctcattacgagcgacaggcactctcgagtatagatgagagtaacataagagcatagacatttggcgttaatgggtcaatcctctccgttcagcatgttttcggtcataagaggggtttgtacagctgctgcacggaggcttttatgatttagtggtcttcgccctcctctaaatacgaactcggttgcatcttcttgcaactgaccacttggttaatgccaaaatacctctctgtttagcggaccaatactggaatactagtaggaattatcttcggtctatgtagtaccggaggcagggagtttggattcagcccttttggttattgccattatcgataagataacacgacggtatgcaataggcaaggtagtgatatcctcttgtgtctttagatcaagacatttccccctacataatactgctgtttcagctcgatcaattatcagattccacacgtaaacacccgttagccgattttcatgttgga

SEQ ID NO: 33346 - DNA, 3867 bp, Muscodor strobelii
  misc_feature: SGI cDNA ID NO. 571501
  misc_feature: Encodes the peptide sequence at SEQ ID NO 33347
atgccgcctacacctccctatcgcccgactgaaccgcccgactcgccccagcccgactccgactcggacgccgatctcgacctcgatctcgacgagctagatccctcctcctcccaagccccggcctcatggcgccaaagcctccggatgggcggcctgaggcgatccgccaaacgcaacccccgctacggcgacctcgcttcccacgcacccaccgacgacgacgccctcgccctgctcgaccccgactcccacccccagcgctactccgatggcagcgccaccgccggcgacgatgcgcctctgctgcgccagcacccgccgcccggccgtcgtgtctcttcccgccccggccctctctccaagctgcgctcgaccctgaggatgcccagcttcatgtccgccagcagcgctcgcctctccgacggccacatcgacgacaacgccgacgacgagctggacctggagcaagacgacccttccgcctccagaactgtccacgtcggctcggtgcaacccatgcgatacccgcccaacttgatctccaacgccaagtacacggccctgactttcctgcccgtcactctgtacaacgagttctccttcttcttcaacctgtatttcctgcttgtcgccctctcccaggccattcccgcactacgcataggctacctatccacatatatcgcccccttagcgttcgtgctggtcatcaccatgggcaaggaagcttacgacgacgtcgagaggcgccggagagataacgaggccaactcggaggagtacactgttctccacttcagcgacgccaccgcgtccggcaccgcgagcagattcatgtcgtccaccttgcgccaccgctacagagacagctcaagacgcaacgaccggctgtcggatgtccaggaagaagaagagcgggcccagggcatgggcttgcatcaaccatcatcccacgtgcgcgaaatgagcaagaagtctcgtgatgtcaaagtcggcgatgtgttaaagctgggcaaagggcaacgcgtgcccgccgatgttgtcattcttcaatgctctgcaggtgaagcactgcaggcgacccccgaaccggagaccgatgtgccgttggtagacacagctgatcatgcggcggtacgggacaactcgatggatagcaaagggaagacgacgggtttggacggttcgaatgtggccgaaggtggctcgacgggcgagacttttatcaggacagaccagctggacggtgagacagattggaaacttcgagtggcttcggctctcacccaggcactccccttggaggagctagtcaacgtccgggtgaccggggggaagccggataagaaggtcaacgagtttgtgggcaccattgagctggcctctcaaggcagagatgcgtctggaacagatcacagcgtcccgctgtccattgacaatacagcgtgggtcaatacggtgattgcctcccaagtggctacgatggctgtagtcgtctacacgggtcctcagactcggtccgcactgtctactgctccttcgcgttccaaaacaggcttgttagagtttgagatcaactcgttgactaagatactgtgtgcgctcaccctcgcgctctccattgttctcgttgccctcgagggcttcagtaacaccgaaggcaatgtctggtatgtcaagattatgcgctttctggtcctgttctcgaccatcgtgcccataagtctcagggtaaacctagatttggggaagagcgtctattcatggctgattcaaagggatccggggattttcggagctgtagtacgcaccagcaccattcctgaggacctggggcgcatcgaatatttgttgagcgacaaaaccggtactctgactcagaacgagatggagatgaagaagatacatgtaggcactgtgtcttatgccaatgatgcgatggatgaggtggcatcatatgtgcggcaaggcttcgggatcaaggcaaatagccagatgctcgtaacaccgtcgtccacccacagcgtcgccgctggagcctccgctactcggacacgtcgagagatcggatcccgggtacgcgatgtagtcatggcgctcgcgctctgccacaatgtcacaccaacaacagaggaagtggacggtcagactaccacttcatatcaagcgtcctcgcccgacgagattgcaatagtacgatggaccgagcatattggcctgcgactcgcttatcgagatcggaagggtatggtactaaagtcaacagaaaccggcaagagcgttgtccaggtacggatactcgatgtcttccctttcacgtcggatgggaaacgcatgggcatcatcgtccagttctaccaggcggcaagctcgtcaccgccatccctggagaatggcgaaatctggttctaccagaagggcgcagataccgtcatgggttccattgtggcctcgaacgattggttagacgaggagaccgcaaacatggcaagggagggtttgagaaccttggttgttggacgtaaaaaactctccttcgaccagtaccaagagttctcgaacagctacaaagacgctgcacttgccattagcggtcgcgatgccgctactcagcgcgttgtcgcccgctttttagaacacgacctcgagctgctgggggtcacaggcgtagaggacaagctgcagaaagatgtcaagccttctctagaactcctacgcaatgccggcatcaagatctggatgctgacaggtgataaggtggagacggcacggtgcgttgctgtaagctcaaaattggttgctcgagggcagtatatctacactgtcgccaaactcaagcgcaaggacaacgcccaagaccatctcgacttccttcggagcaagcccgattcttgcttgctggtcgacggtgaaagtttgtcgctatttctgacgcatttcgggaccgaattcatatcggcagctgtacagctgcccacggttgtggcctgtcgatgctcacctacacaaaaggctgatatcgctaaattaatcaaggaattcaccaagaaacgagtttgctgtataggcgacggcggcaacgatgtgtccatgattcaagccgctgatgtcggggtgggcatcgtcggcaaggagggtcgtcaggctagcttggccgccgatttctctattgagcaattctatcacttaaccaagcttctcgtctggcatggccgcaatagctacaagaggagcgctaaacttgcacagttcgtgattcatcgcggtctgatcattgccgtctgtcaaaccgtgtacagtatcgctatcaagttcgagcctgaaggtctctacaaggattggctactcgtggggtatgcaacagtctacacggcagcacctgtgctttcccttgtcctggacaaagacgtcgacgaggacgtggccaacttgtacccagaattatacaaggagcttacatcgggacgatcattgtcataccgcacgttcttcgtatgggtgtttgtgtctgtataccagggaagcatcatccaaggcctgtcgcagatcctgaccgaggtagacgggccgagaatggtggcggtgagtttcacggtgttggtgctcaacgagctgctcatggtggctattgagataactacatggcatcccgtcatgattatgagtattgtgggcacatttctgatttatgttggctccgtgccctttttgggagggtattttgatctcgaatttcttgagacatgggggttctactggcgtgttctcgccatcagcgcgatttcccttgtccctccttacgccggcaagttgattaggaggacgatgaagccgccatcgtataggaaggtgcaagggatatag

SEQ ID NO: 33347 - protein, 1288 aa, Muscodor strobelii
  misc_feature: SGI Peptide ID NO. 571501
  misc_feature (615)..(1046): Pfam Id: PF00702 Pfam Desc: haloacid dehalogenase-like hydrolase
  misc_feature (46)..(1288): NCBI GI: 116198257 Blast Desc: CHGG_07284 [Chaetomium globosum CBS 148.51] gi|88178563|gb|EAQ86031.1| CHGG_07284 [Chaetomium globosum CBS 148.51]
  misc_feature (1)..(1286): NCBI GI: 256731468 Blast Desc: [Nectria haematococca mpVI 77-13-4]
  misc_feature (1)..(1286): NCBI GI: 46121541 Blast Desc: FG05149.1 [Gibberella zeae PH-1]
  misc_feature (1)..(1288): NCBI GI: 85101739 Blast Desc: NCU03818 [Neurospora crassa OR74A] gi|16944576|emb|CAC18258.2| related to neomycin resistance protein NEO1 [Neurospora crassa] gi|28922748|gb|EAA31971.1|
  misc_feature (30)..(1247): NCBI GI: 171693679 Blast Desc: protein product [Podospora anserina] gi|170946788|emb|CAP73592.1| protein product [Podospora anserina]
  misc_feature (26)..(1286): NCBI GI: 145607199 Blast Desc: MGG_04066 [Magnaporthe grisea 70-15] gi|145014791|gb|EDJ99359.1| MGG_04066 [Magnaporthe grisea 70-15]
  misc_feature (1)..(1221): NCBI GI: 156048552 Blast Desc: SS1G_09007 [Sclerotinia sclerotiorum 1980] gi|154693404|gb|EDN93142.1| SS1G_09007 [Sclerotinia sclerotiorum 1980]
  misc_feature (7)..(1195): NCBI GI: 154300765 Blast Desc: BC1G_10682 [Botryotinia fuckeliana B05.10] gi|150856430|gb|EDN31622.1| BC1G_10682 [Botryotinia fuckeliana B05.10]
  misc_feature (46)..(1288): NCBI GI: 189195040 Blast Desc: PTRG_03525 [Pyrenophora tritici-repentis Pt-1C-BFP] gi|187979737|gb|EDU46363.1| PTRG_03525 [Pyrenophora tritici-repentis Pt-1C-BFP]
  misc_feature (46)..(1287): NCBI GI: 70984334 Blast Desc: phospholipid-translocating P-type ATPase [Aspergillus fumigatus Af293] gi|66845309|gb|EAL85644.1| phospholipid-translocating P-type ATPase, [Aspergillus fumigatus
  misc_feature (321)..(1286): SWISSPROT Homolog: EC 3.6.3.1 Phospholipid-translocating ATPase
MPPTPPYRPTEPPDSPQPDSDSDADLDLDLDELDPSSSQAPASWRQSLRMGGLRRSAKRNPRYGDLASHAPTDDDALALLDPDSHPQRYSDGSATAGDDAPLLRQHPPPGRRVSSRPGPLSKLRSTLRMPSFMSASSARLSDGHIDDNADDELDLEQDDPSASRTVHVGSVQPMRYPPNLISNAKYTALTFLPVTLYNEFSFFFNLYFLLVALSQAIPALRIGYLSTYIAPLAFVLVITMGKEAYDDVERRRRDNEANSEEYTVLHFSDATASGTASRFMSSTLRHRYRDSSRRNDRLSDVQEEEERAQGMGLHQPSSHVREMSKKSRDVKVGDVLKLGKGQRVPADVVILQCSAGEALQATPEPETDVPLVDTADHAAVRDNSMDSKGKTTGLDGSNVAEGGSTGETFIRTDQLDGETDWKLRVASALTQALPLEELVNVRVTGGKPDKKVNEFVGTIELASQGRDASGTDHSVPLSIDNTAWVNTVIASQVATMAVVVYTGPQTRSALSTAPSRSKTGLLEFEINSLTKILCALTLALSIVLVALEGFSNTEGNVWYVKIMRFLVLFSTIVPISLRVNLDLGKSVYSWLIQRDPGIFGAVVRTSTIPEDLGRIEYLLSDKTGTLTQNEMEMKKIHVGTVSYANDAMDEVASYVRQGFGIKANSQMLVTPSSTHSVAAGASATRTRREIGSRVRDVVMALALCHNVTPTTEEVDGQTTTSYQASSPDEIAIVRWTEHIGLRLAYRDRKGMVLKSTETGKSVVQVRILDVFPFTSDGKRMGIIVQFYQAASSSPPSLENGEIWFYQKGADTVMGSIVASNDWLDEETANMAREGLRTLVVGRKKLSFDQYQEFSNSYKDAALAISGRDAATQRVVARFLEHDLELLGVTGVEDKLQKDVKPSLELLRNAGIKIWMLTGDKVETARCVAVSSKLVARGQYIYTVAKLKRKDNAQDHLDFLRSKPDSCLLVDGESLSLFLTHFGTEFISAAVQLPTVVACRCSPTQKADIAKLIKEFTKKRVCCIGDGGNDVSMIQAADVGVGIVGKEGRQASLAADFSIEQFYHLTKLLVWHGRNSYKRSAKLAQFVIHRGLIIAVCQTVYSIAIKFEPEGLYKDWLLVGYATVYTAAPVLSLVLDKDVDEDVANLYPELYKELTSGRSLSYRTFFVWVFVSVYQGSIIQGLSQILTEVDGPRMVAVSFTVLVLNELLMVAIEITTWHPVMIMSIVGTFLIYVGSVPFLGGYFDLEFLETWGFYWRVLAISAISLVPPYAGKLIRRTMKPPSYRKVQGI

SEQ ID NO: 33348 - DNA, 8227 bp, Muscodor strobelii; identical to SEQ ID NO: 33345
  misc_feature: SGI EST ID NO. CUFF.80448.0
  misc_feature: Variant of the nucleotide sequence at SEQ ID NO 33346

SEQ ID NO: 33349 - DNA, 2127 bp, Muscodor strobelii
  misc_feature: SGI cDNA ID NO. 571502
  misc_feature: Encodes the peptide sequence at SEQ ID NO 33350
atggctagcgacaacggggacaggcctcctcgcgaggtgaagaatcacatcctcttcgagatcgcgactgaagtcgcccaccgtgtcggcggcatctactcggtcatcaagtcaaaagctcccgtcacgactgctgaatatggcgaccggtataccctcatcggccccctcaaccaccaatcggctgccgtcgaagtcgaggagctcgagcccaccaacccggagatcgctgccagtatcgaggcgatgcgcagccgcggcatcggtatcctctacggccgctggctgatagaaggcgcccctcgcgtcctgctgatcgacaccaagacggcgtacaagtacatggacgagtggaaggccgatctgtggaatgtcgccagcatccccgccccgccaggcgacgacgagaccaacgagaccatcgtcttcggctatctggtcgcctggttcctcggcgagtatgtctgccacgagaagaacaaagccgtcattgcccacttccacgagtggctcgccggcgtcgccctgccgcttgtcaaaaagcgccgcatagacatcaccaccgtcttcaccacgcacgccactctgctgggccgatacctgtgtgcgggctcggtcgacttctacaacaacctgcagtggttcgacgtcgacgccgaggctggcaagcgtggcatctaccaccgctattgcatcgagcgcgcggccgcccactcgtgcgatgtcttcaccaccgtctcccacatcaccgccttcgagagcgagcacctcctcaagcgcaagcccgacggcgtgctgcccaacggcctcaacgtgaccaagttctccgctatgcacgagttccagaatctgcatcagcagtccaaggagaagatccacgacttcgtccgcggccatttctatggccactacgacttcgtgcccgaggacactctctatttcttcaccgccggccgctacgaattccgcaacaagggcgtcgacatgttcatcgagtctctcgcccgcttgaaccacaggctcaagagcgtgggcagcaaaaccaccgtcgtggcttttgtcatcatgccagcacagacgacctctctgacagtcgaggctcttaaagggcaggcggtcatcaagtcattgagagacacggtggacgtgatcgagcgaggcatcggccgtcgcatcttcgagagatcgctcaagtggcacgatggcgacccgatgcctgacgagaaggagctcatcaccagtgcggatcgcgtggtgctgcgccgtcgtctcttcgccatgaagcgccactctctgcctccgatcgtcactcacaatatgatcaacgatcaggaagatcccatcctcaaccagatccgtcgtgtacagctattcaaccatcccacggaccgagtcaagatcgtcttccaccccgaattcttgaactcttccaaccccatcctgccactcgactacgacgacttcgtccgtggtaccaatctgggtgtttttgcatcttattacgagccttggggctacacgccggccgagtgcacggtcatgggagtccccagtatcacgacgaatctgtcaggcttcggttgctacatggaggagcttatcgagaactcgagcgactacggtatctacattgtggatcgtcgcagcaagggcgtggacgactcggtcaaccagcttacctcgcacatgtttgacttctgccagaagagccggcgccagcgcatcaaccagcgcaaccgaaccgagagacttagtgatctcctggactggaagaggatgggcatggagtacgtgaaggcgcgacagctggcactgcgccgagcgtaccccgcgtcgttcggaggcgaggaggaggaagacttcatccccggcgtggagcagaagatatccagacctttctcagtgccgggctcgcctcgcgacaggacagggatgatgacgcctggtgatttcgccagcctacaggaggggcgagaagggttgagcacagaagattacgtggcgtggaaactacctgaggaggaggacccagacgaatacccgttccctttgaccctgcggacgggcaagtcgaacttttcgggcccggcctcgcccctcgacggcattcaacgcaatggaagctag

SEQ ID NO: 33350 - protein, 708 aa, Muscodor strobelii
  misc_feature: SGI Peptide ID NO. 571502
  misc_feature (20)..(663): Pfam Id: PF05693 Pfam Desc: Glycogen synthase
  misc_feature (1)..(708): NCBI GI: 116199189 Blast Desc: glycogen synthase [Chaetomium globosum CBS 148.51] gi|88179029|gb|EAQ86497.1| glycogen synthase [Chaetomium globosum CBS 148.51]
  misc_feature (3)..(699): NCBI GI: 171694035 Blast Desc: protein product [Podospora anserina] gi|170946966|emb|CAP73770.1| protein product [Podospora anserina]
  misc_feature (3)..(708): NCBI GI: 39971947 Blast Desc: glycogen synthase [Magnaporthe grisea 70-15] gi|145019793|gb|EDK04021.1| glycogen synthase [Magnaporthe grisea 70-15]
  misc_feature (1)..(708): NCBI GI: 85100648 Blast Desc: glycogen synthase [Neurospora crassa OR74A] gi|12230121|sp|O93869.2|GYS_NEUCR RecName: Full=Glycogen [starch] synthase gi|4995969|gb|AAC98780.2| glycogen synthase [Neurospora
  misc_feature (1)..(708): NCBI GI: 15808971 Blast Desc: AF417205_1 glycogen synthase [Neurospora crassa]
  misc_feature (11)..(704): NCBI GI: 156050463 Blast Desc: glycogen synthase [Sclerotinia sclerotiorum 1980] gi|154692219|gb|EDN91957.1| glycogen synthase [Sclerotinia sclerotiorum 1980]
  misc_feature (11)..(708): NCBI GI: 154298285 Blast Desc: glycogen synthase [Botryotinia fuckeliana B05.10] gi|150858173|gb|EDN33365.1| glycogen synthase [Botryotinia fuckeliana B05.10]
  misc_feature (7)..(703): NCBI GI: 261355627 Blast Desc: glycogen synthase [Verticillium albo-atrum VaMs.102]
  misc_feature (3)..(708): NCBI GI: 256731381 Blast Desc: glycosyltransferase family 3 [Nectria haematococca mpVI 77-13-4]
  misc_feature (5)..(708): NCBI GI: 46124889 Blast Desc: GYS_NEUCR Glycogen [starch] synthase [Gibberella zeae PH-1]
  misc_feature (1)..(708): SWISSPROT Homolog: EC 2.4.1.11 Glycogen(starch) synthase
MASDNGDRPPREVKNHILFEIATEVAHRVGGIYSVIKSKAPVTTAEYGDRYTLIGPLNHQSAAVEVEELEPTNPEIAASIEAMRSRGIGILYGRWLIEGAPRVLLIDTKTAYKYMDEWKADLWNVASIPAPPGDDETNETIVFGYLVAWFLGEYVCHEKNKAVIAHFHEWLAGVALPLVKKRRIDITTVFTTHATLLGRYLCAGSVDFYNNLQWFDVDAEAGKRGIYHRYCIERAAAHSCDVFTTVSHITAFESEHLLKRKPDGVLPNGLNVTKFSAMHEFQNLHQQSKEKIHDFVRGHFYGHYDFVPEDTLYFFTAGRYEFRNKGVDMFIESLARLNHRLKSVGSKTTVVAFVIMPAQTTSLTVEALKGQAVIKSLRDTVDVIERGIGRRIFERSLKWHDGDPMPDEKELITSADRVVLRRRLFAMKRHSLPPIVTHNMINDQEDPILNQIRRVQLFNHPTDRVKIVFHPEFLNSSNPILPLDYDDFVRGTNLGVFASYYEPWGYTPAECTVMGVPSITTNLSGFGCYMEELIENSSDYGIYIVDRRSKGVDDSVNQLTSHMFDFCQKSRRQRINQRNRTERLSDLLDWKRMGMEYVKARQLALRRAYPASFGGEEEEDFIPGVEQKISRPFSVPGSPRDRTGMMTPGDFASLQEGREGLSTEDYVAWKLPEEEDPDEYPFPLTLRTGKSNFSGPASPLDGIQRNGS

SEQ ID NO: 33351 - DNA, 6929 bp, Muscodor strobelii
  misc_feature: SGI EST ID NO. CUFF.81035.2
  misc_feature: Variant of the nucleotide sequence at SEQ ID NO 33349
gggctgcgtcgagttctgcgtcgagctccatcagaggctgcatctcacgaaccccaactttgcaggtcgcggcaggttgacgtaaagcgccatttgcgacaatcaaatccttactttctctcgtggttgctcccgcgcctctccacctccacctcgacgccctcctcaatcgcccactgcccgccgccctcacgcccacccccagatcggcccagtctggagcttctatctcccaattgctctccattctgcaacaatccctcgctagcttagactacatacctaacctacttatctcttgtctcgtctagtgtctcgtgtatcttctcgcgtcttcttctctcttgttctctatttccaatcactcccgctcgactccctcgctgccatggctagcgacaacggggacaggcctcctcgcgaggtgaagaatcacatcctcttcgagatcgcgactgaagtcgcccaccgtgtcggcggcatctactcggtcatcaagtcaaaagctcccgtcacgactgctgaatatggcgaccggtataccctcatcggccccctcaaccaccaatcggctgccgtcgaagtcgaggagctcgagcccaccaacccggagatcgctgccagtatcgaggcgatgcgcagccgcggcatcggtatcctctacggccgctggctgatagaaggcgcccctcgcgtcctgctgatcgacaccaagacggcgtacaagtacatggacgagtggaaggccgatctgtggaatgtcgccagcatccccgccccgccaggcgacgacgagaccaacgagaccatcgtcttcggctatctggtcgcctggttcctcggcgagtatgtctgccacgagaagaacaaagccgtcattgcccacttccacgagtggctcgccggcgtcgccctgccgcttgtcaaaaagcgccgcatagacatcaccaccgtcttcaccacgcacgccactctgctgggccgatacctgtgtgcgggctcggtcgacttctacaacaacctgcagtggttcgacgtcgacgccgaggctggcaagcgtggcatctaccaccgctattgcatcgagcgcgcggccgcccactcgtgcgatgtcttcaccaccgtctcccacatcaccgccttcgagagcgagcacctcctcaagcgcaagcccgacggcgtgctgcccaacggcctcaacgtgaccaagttctccgctatgcacgagttccagaatctgcatcagcagtccaaggagaagatccacgacttcgtccgcggccatttctatggccactacgacttcgtgcccgaggacactctctatttcttcaccgccggccgctacgaattccgcaacaagggcgtcgacatgttcatcgagtctctcgcccgcttgaaccacaggctcaagagcgtgggcagcaaaaccaccgtcgtggcttttgtcatcatgccagcacagacgacctctctgacagtcgaggctcttaaagggcaggcggtcatcaagtcattgagagacacggtggacgtgatcgagcgaggcatcggccgtcgcatcttcgagagatcgctcaagtggcacgatggcgacccgatgcctgacgagaaggagctcatcaccagtgcggatcgcgtggtgctgcgccgtcgtctcttcgccatgaagcgccactctctgcctccgatcgtcactcacaatatgatcaacgatcaggaagatcccatcctcaaccagatccgtcgtgtacagctattcaaccatcccacggaccgagtcaagatcgtcttccaccccgaattcttgaactcttccaaccccatcctgccactcgactacgacgacttcgtccgtggtaccaatctgggtgtttttgcatcttattacgagccttggggctacacgccggccgagtgcacggtcatgggagtccccagtatcacgacgaatctgtcaggcttcggttgctacatggaggagcttatcgagaactcgagcgactacggtatctacattgtggatcgtcgcagcaagggcgtggacgactcggtcaaccagcttacctcgcacatgtttgacttctgccagaagagccggcgccagcgcatcaaccagcgcaaccgaaccgagagacttagtgatctcctggactggaagaggatgggcatggagtacgtgaaggcgcgacagctggcactgcgccgagcgtaccccgcgtcgttcggaggcgaggaggaggaagacttcatccccggcgtggagcagaagatatccagacctttctcagtgccgggctcgcctcgcgacaggacagggatgatgacgcctggtgatttcgccagcctacaggaggggcgagaagggttgagcacagaagattacgtggcgtggaaactacctgaggaggaggacccagacgaatacccgttccctttgaccctgcggacgggcaagtcgaacttttcgggcccggcctcgcccctcgacggcattcaacgcaatggaagctaggagccgagccgagccggatatgcgtcgatgcagaaacccacgtgtagtcgccccgaagattcgctggattcgataatgaggctagattctgaacctgacgagtgtctcggttctctggtaccaatgcgcgtggctcaggaggccctcaggctgtagagtatttgtgtctcaacttggcaccacgatctcgaaggggcgcaatgtccacctgacgttctgaatggggccgccggaggtgtgtcgctgcaggcgtgtgcggcccggggttcattgcatagcaagtgcatcagcaggttgtttctgtgtctttgcgcttctgtattttgttctgtaattttcccgtcctgcatccaaattccacgggggcttcatcgtctctttttcccacttctccgtatctacatggctgtcgaactggatccttgctccgttgaccatgcgcttccactacattgtaacatcgaaaagagctcgccccgcctacgccgtacatagtttgctagcagagtaggcctcgaggtagagaaagtttgtaaccgggttgatccacgtaggttttgctgagctatcattcgtcgtgatttgtgcaatagcgatttgtggtcgaacaaaccaggccagcgacatacaacggctgcagcaccccgtaatgtgtaccacatgtgtgatcgaggcaatagatagtatcgcggccagggcattccacatttttctcaacatgaattgtagaaggcgcattaaaaattgcatatcgttctggtcctcggcgagacagcagcgggtgtactcgccagcgccatgcgaggcgaggctgtcgaggcgtattgtgtctcgtaggtcggtcaggtcaggtcacgctgagtgagagtggtgggaaactagaccgaggcgagtaaaagatctccattattgagaaggaataaagggatgtgctccttggacaagcccatcgcccgtatcttttggctcggctcctttcttcctggagcgattgtctatctgtgttcctggcccgcgtggatgatcccaaatcctgatccttcctgcacacaagtcggtgggcacattccaattgcaacaatatttaatccctacgttgaccggtgcctatcttgtatacctacggtaactttgtgttgcagcattctataagcttgtctcgcaattcgtctggttgtgcggtcagggcccaagctttcaaaccaattggcggcattgcaatcgctgacccagccacgccagccttcttagcagcagacagacacagcgcgaggcgtcaggaccaggcacggccatatactaacacgaaggacatcatcaatcacagacagtcgcctcccgccgcggtgtcacccctcccctcctgctcgcccccttgcgtgtggcgtgtgtgcgtcgatccgcaccgctgcagcgtaccgctgccaccacgcaccaacaagcagccagcacattagcattcggcaccaacacgggcacgcagcctctgcatatagtcgcgaccggggacagtcgcacactgctccttgcccgtccgcgcattttactttttctgacgctccccccctcacttacccgtgcagccagccagccagcccgcccgcccatcgtcgtcgtcgtcgcgggcgcaccactgctgctctgcttgccttgttcgtgtctgggactatcgtgtctttgtgcgcccctggctgtgtccattgacgcttcgcctctcggacggtcaccatgaagggcgccatgaagttcttccggcgcagcaagaagtcgtcgtcgtcgtcgtcgatcgacaagtcccacaagaagtcgggctacgcgcaggacgcccaggagcgcgacaagtaccggctctacaacccccgccagaacgactactacaactatgccgagaggagccgcgtcttcgccccctggctgcagctcccgcagcccatcctcgagcgcgtcttcgccttcgtctgcccgcacagcgccgacgagtcgtacgagacctgcgagcagagcgccgtcgaggacgcctgcatgctctgcgacctgcgcgatctcgcccatgccggccaggtctgcaagctctggcgccaggccgcccgccagctcatgtaccacagcatccgcatcgacacagtccactactgcgagcgggagatcgatctgtcggagcgtcgccgccgcaagagccgcttcgaccgcaacggcatccccgaggataccgccggcgcccgcctgcacctgctgtgccgcactctgcgcgacgatcccacccgcctgggcaagcttgtgcagtacttcaagacgccctacatgctgcgcgagtcgagcgcccccatgctggcccgcaccatcgccgtcctgcccaacctgcgctacgtcgacctgcccgagggcttgttcgtcgacgagcccgcctaccagaccctcaagttcgaggtccaggcgcgctgcccggacctccgcaagatgacgtacaatgcaggcagcgagagaagcctcgagggcctcgcgcgcggcaatgtctggacaaacctcgaggtcctcgagctcgggagaatcgacatggacccggccctgttgcggcaggtcttggccgtgctgcagcgccttcgagccctcaaggcgacgaactgcaggatgctggacaacgacatcttccgctacaacgatgtcatgccaccatttccggctctcgaggagctcgttctcaaggacgtgccccgcgtcacggccgaggggctggcggcgtatctgtcgcgcgacgacaccaagaacactctcaaagtcttgtccctggccaacacgggcgtgcagcccgctgccctccatgacattctagcccgcgccccgcatctggtcacactgtccattgccgaacaggtagactccgtcttcccctcgcactccaaccctcccatcccccctctggccaattggtcactggagacgttgcgctacgagatcacagcctcccccgcaacgtcccagtatgccagcaccaccgccggctactacaactacctggcgtcctccctctttgctggcggcctgccacgtttggctgccatctacgtccgtgaccagaatttccccgacatgcttttgggcctaccgccgccgatgccaggcttcgcggggagcccacagcgcccaagtagtgccggcagcatgggcatgttcggcgcgggtgacggcaacctgtcacctacgaatcctaagctttcgcctaccggcgtagcggggtatcaagactctcagccgcgtttcagttccaacaatccctttgcttcggccttcacttcgcctcgtgggcctggaatgctcgcgttgaaccagactctcgaaatttttacgaaaggcgacgacgacctggattggggcagcacgaggatggatccgttcgatgcatacggtggtcgtgggcgaggcggccatgcccgaagtggtagcgcggcaaatgggcggcccttgagcagttatggcctatccgatctgggaagtggctggcagggcggcggaggcacgaggatgagcgtcatgggagacggcaacggtggcttcctcagcgtgcccggcgaaagaccaccccatatgaggaaagggagtgccgccagctcgaacggccgagaagatctatggccccgaccaacgagtagccaggggcccaagaagaaagagcgggatctttggcgctaaaagctggtatatatgccacaggacagaatggttcattcctcacatagttgcgggatacgacatgaggtatagaaaaggaaggcggccgacgcatcaaatgagagcaatgccattggcggacccagtttcgagccatggcggaaaatgaaggctgggaaatggatgaggctcgagttggtacaggaaatgatatatccaggttgtatgactattaggcgacagactgacttagtgcgatggagccgacgaaaagctgttgaaaacttccgggcacgagcagagctatgtcctacgccatatgattggcggtgtacaatttttggtgatgaaagagggaatggacaggacaagggctctctatactatagccattggagaacaagaaatagtaatgataagtacgattcagttgtatcctgacttatctgcttgtctctagttatggagaagccagagagtaaggagcgagatcgtacctcacgttgcactgacggatgatgggttggggagtccgatgcataatgatgatctgcccagatcttccactatagtccggatatataaggagcgcggtgtacaggaccagatgcagagccgggtgactactgagctacgggtggctttgtgctttccttaccgttcgagaatgtagatattctcgaggtgtgactattccgccaagaatcatgaggtggtctaaccgatatccaatacgcagaaatggaac

SEQ ID NO: 33352 - DNA, 1959 bp, Muscodor strobelii
  misc_feature: SGI cDNA ID NO. 571503
  misc_feature: Reduced expression when VOC is produced
  misc_feature: Encodes the peptide sequence at SEQ ID NO 33353
atgaagggcgccatgaagttcttccggcgcagcaagaagtcgtcgtcgtcgtcgtcgatcgacaagtcccacaagaagtcgggctacgcgcaggacgcccaggagcgcgacaagtaccggctctacaacccccgccagaacgactactacaactatgccgagaggagccgcgtcttcgccccctggctgcagctcccgcagcccatcctcgagcgcgtcttcgccttcgtctgcccgcacagcgccgacgagtcgtacgagacctgcgagcagagcgccgtcgaggacgcctgcatgctctgcgacctgcgcgatctcgcccatgccggccaggtctgcaagctctggcgccaggccgcccgccagctcatgtaccacagcatccgcatcgacacagtccactactgcgagcgggagatcgatctgtcggagcgtcgccgccgcaagagccgcttcgaccgcaacggcatccccgaggataccgccggcgcccgcctgcacctgctgtgccgcactctgcgcgacgatcccacccgcctgggcaagcttgtgcagtacttcaagacgccctacatgctgcgcgagtcgagcgcccccatgctggcccgcaccatcgccgtcctgcccaacctgcgctacgtcgacctgcccgagggcttgttcgtcgacgagcccgcctaccagaccctcaagttcgaggtccaggcgcgctgcccggacctccgcaagatgacgtacaatgcaggcagcgagagaagcctcgagggcctcgcgcgcggcaatgtctggacaaacctcgaggtcctcgagctcgggagaatcgacatggacccggccctgttgcggcaggtcttggccgtgctgcagcgccttcgagccctcaaggcgacgaactgcaggatgctggacaacgacatcttccgctacaacgatgtcatgccaccatttccggctctcgaggagctcgttctcaaggacgtgccccgcgtcacggccgaggggctggcggcgtatctgtcgcgcgacgacaccaagaacactctcaaagtcttgtccctggccaacacgggcgtgcagcccgctgccctccatgacattctagcccgcgccccgcatctggtcacactgtccattgccgaacaggtagactccgtcttcccctcgcactccaaccctcccatcccccctctggccaattggtcactggagacgttgcgctacgagatcacagcctcccccgcaacgtcccagtatgccagcaccaccgccggctactacaactacctggcgtcctccctctttgctggcggcctgccacgtttggctgccatctacgtccgtgaccagaatttccccgacatgcttttgggcctaccgccgccgatgccaggcttcgcggggagcccacagcgcccaagtagtgccggcagcatgggcatgttcggcgcgggtgacggcaacctgtcacctacgaatcctaagctttcgcctaccggcgtagcggggtatcaagactctcagccgcgtttcagttccaacaatccctttgcttcggccttcacttcgcctcgtgggcctggaatgctcgcgttgaaccagactctcgaaatttttacgaaaggcgacgacgacctggattggggcagcacgaggatggatccgttcgatgcatacggtggtcgtgggcgaggcggccatgcccgaagtggtagcgcggcaaatgggcggcccttgagcagttatggcctatccgatctgggaagtggctggcagggcggcggaggcacgaggatgagcgtcatgggagacggcaacggtggcttcctcagcgtgcccggcgaaagaccaccccatatgaggaaagggagtgccgccagctcgaacggccgagaagatctatggccccgaccaacgagtagccaggggcccaagaagaaagagcgggatctttggcgctaa

SEQ ID NO: 33353 - protein, 652 aa, Muscodor strobelii
  misc_feature: SGI Peptide ID NO. 571503
  misc_feature (56)..(652): NCBI GI: 39971945 Blast Desc: MGG_07288 [Magnaporthe grisea 70-15] gi|145019792|gb|EDK04020.1| MGG_07288 [Magnaporthe grisea 70-15]
  misc_feature (5)..(652): NCBI GI: 154317844 Blast Desc: BC1G_02905 [Botryotinia fuckeliana B05.10] gi|150843563|gb|EDN18756.1| BC1G_02905 [Botryotinia fuckeliana B05.10]
  misc_feature (5)..(652): NCBI GI: 85100652 Blast Desc: NCU06688 [Neurospora crassa OR74A] gi|28922539|gb|EAA31767.1| conserved [Neurospora crassa OR74A] gi|28949927|emb|CAD70913.1| conserved [Neurospora crassa]
  misc_feature (5)..(652): NCBI GI: 156050205 Blast Desc: SS1G_07689 [Sclerotinia sclerotiorum 1980] gi|154692090|gb|EDN91828.1| SS1G_07689 [Sclerotinia sclerotiorum 1980]
  misc_feature (64)..(652): NCBI GI: 256730990 Blast Desc: [Nectria haematococca mpVI 77-13-4]
  misc_feature (7)..(651): NCBI GI: 46125943 Blast Desc: FG07349.1 [Gibberella zeae PH-1]
  misc_feature (64)..(602): NCBI GI: 261355628 Blast Desc: F-box domain-containing protein [Verticillium albo-atrum VaMs.102]
  misc_feature (5)..(652): NCBI GI: 116199193 Blast Desc: CHGG_07752 [Chaetomium globosum CBS 148.51] gi|88179031|gb|EAQ86499.1| CHGG_07752 [Chaetomium globosum CBS 148.51]
  misc_feature (5)..(606): NCBI GI: 171694033 Blast Desc: protein product [Podospora anserina] gi|170946965|emb|CAP73769.1| protein product [Podospora anserina]
  misc_feature (65)..(652): NCBI GI: 159125947 Blast Desc: F-box domain protein [Aspergillus fumigatus A1163]
  misc_feature: Useful for introducing or modulating the production of volatile compounds
MKGAMKFFRRSKKSSSSSSIDKSHKKSGYAQDAQERDKYRLYNPRQNDYYNYAERSRVFAPWLQLPQPILERVFAFVCPHSADESYETCEQSAVEDACMLCDLRDLAHAGQVCKLWRQAARQLMYHSIRIDTVHYCEREIDLSERRRRKSRFDRNGIPEDTAGARLHLLCRTLRDDPTRLGKLVQYFKTPYMLRESSAPMLARTIAVLPNLRYVDLPEGLFVDEPAYQTLKFEVQARCPDLRKMTYNAGSERSLEGLARGNVWTNLEVLELGRIDMDPALLRQVLAVLQRLRALKATNCRMLDNDIFRYNDVMPPFPALEELVLKDVPRVTAEGLAAYLSRDDTKNTLKVLSLANTGVQPAALHDILARAPHLVTLSIAEQVDSVFPSHSNPPIPPLANWSLETLRYEITASPATSQYASTTAGYYNYLASSLFAGGLPRLAAIYVRDQNFPDMLLGLPPPMPGFAGSPQRPSSAGSMGMFGAGDGNLSPTNPKLSPTGVAGYQDSQPRFSSNNPFASAFTSPRGPGMLALNQTLEIFTKGDDDLDWGSTRMDPFDAYGGRGRGGHARSGSAANGRPLSSYGLSDLGSGWQGGGGTRMSVMGDGNGGFLSVPGERPPHMRKGSAASSNGREDLWPRPTSSQGPKKKERDLWR

SEQ ID NO: 33354 - DNA, 6929 bp, Muscodor strobelii; identical to SEQ ID NO: 33351
  misc_feature: SGI EST ID NO. CUFF.81035.2
  misc_feature: Variant of the nucleotide sequence at SEQ ID NO 33352

SEQ ID NO: 33355 - DNA, 1311 bp, Muscodor strobelii
  misc_feature: SGI cDNA ID NO. 571504
  misc_feature: Encodes the peptide sequence at SEQ ID NO 33356
atggctcccgccaccaccgtcgaagatgtcgacatggaagccccctcgcaggagttcaccgaggacgaggagcagcggcgcgtcaacgaagagtacaagacgtggaagaagaactcgcccttcctctacgacatgatcctcagcaccgcgctgccctggcccacgctcaccgtccagtggttccccgacgtcaaggacctgcccgcgcgccactgcaccgtccaccgcgtcctgctcggcacccacacctcggacggcaagcccaaccacgtccagatcgccgaggtcgagatccccaaggccctgccgcccgccgcccgcgactacgacgacgaccgcggcgagatcggcggctacgccaaggccgaccccgccgccatccgctggaacgtcgtccagcgcatcgaccacccggccgaggtcaacaagggccgctactgcccccagaacccggacctcatcgccaccctcgccgtcgacggctccatcctcgtcttcgaccgcaccaagcacagctccgagcccaacggccacgtgagcccccagatccgcctcgacggccacgagcacgagggcttcggcctcagctggaacccccacgtcgagggctccctcgcctccggcagcgaggaccgcaccgtctgtctctgggacctcaagaccctccagagcggcaagaacacgctgggcccggcgcgtcgcttcacccatcactccaacatcgtgaatgacgttcagtaccaccccatctcgcgcaacttcatcggcagcgtctcggacgatctcactctgcagatcctcgacgtccgccaggcttccgacaagcaatcctcgctcgtcgccaagaacggacacaacgacgccatcaacgccctgtccttcaacccctcctccgaggtgctcgtggccagcgcctctgccgacaagaccattggcatttgggatctgcgcaacgtcaaggagaaggtgcacacgctcgaaggccaccaggacgctgtcacctccctcgcctggcacccccacgagtcgggcatcctcggcagtgcgagctacgaccggaggatcatcttctgggatctgagccgagtaggcgaagagcagcagcctgacgaccaggaggatggcccccccgagcttcttttcatgcacggtggtcatacaaatcacttggctgatttcagctggaacttgaatgatccttggctcgtggcaagcgccgccgaggataacatgctgcagatctggaaggtgtccaactcgatcgtgggcaaggatgaggcagacctcccattggatgaacttggcaggtag

SEQ ID NO: 33356 - protein, 436 aa, Muscodor strobelii
  misc_feature: SGI Peptide ID NO. 571504
  misc_feature (320)..(359): Pfam Id: PF00400 Pfam Desc: WD domain, G-beta repeat
  misc_feature (276)..(315): Pfam Id: PF00400 Pfam Desc: WD domain, G-beta repeat
  misc_feature (179)..(218): Pfam Id: PF00400 Pfam Desc: WD domain, G-beta repeat
  misc_feature (377)..(416): Pfam Id: PF00400 Pfam Desc: WD domain, G-beta repeat
  misc_feature (17)..(436): NCBI GI: 261355622 Blast Desc: histone acetyltransferase type B subunit 2 [Verticillium albo-atrum VaMs.102]
  misc_feature (9)..(435): NCBI GI: 145612695 Blast Desc: MGG_07323 [Magnaporthe grisea 70-15] gi|145019833|gb|EDK04061.1| MGG_07323 [Magnaporthe grisea 70-15]
  misc_feature (9)..(436): NCBI GI: 46124841 Blast Desc: FG06798.1 [Gibberella zeae PH-1] gi|90101343|sp|Q4I7L0.1|HAT2_GIBZE RecName: Full=Histone acetyltransferase type B subunit 2
  misc_feature (1)..(434): NCBI GI: 154317856 Blast Desc: BC1G_02911 [Botryotinia fuckeliana B05.10] gi|150843569|gb|EDN18762.1| BC1G_02911 [Botryotinia fuckeliana B05.10]
  misc_feature (1)..(434): NCBI GI: 164424736 Blast Desc: NCU06679 [Neurospora crassa OR74A] gi|189042742|sp|Q7S7N3.2|HAT2_NEUCR RecName: Full=Histone acetyltransferase type B subunit 2 gi|157070638|gb|EAA31758.2|
  misc_feature (1)..(434): NCBI GI: 156050181 Blast Desc: SS1G_07677 [Sclerotinia sclerotiorum 1980] gi|154692078|gb|EDN91816.1| SS1G_07677 [Sclerotinia sclerotiorum 1980]
  misc_feature (49)..(436): NCBI GI: 256731003 Blast Desc: nucleosome remodeling factor CAF-I subunit [Nectria haematococca mpVI 77-13-4]
  misc_feature (1)..(435): NCBI GI: 171694055 Blast Desc: protein product [Podospora anserina] gi|170946976|emb|CAP73780.1| protein product [Podospora anserina]
  misc_feature (26)..(434): NCBI GI: 169776421 Blast Desc: [Aspergillus oryzae RIB40] gi|238503105|ref|XP_002382786.1| chromatin assembly factor 1 subunit C, [Aspergillus flavus NRRL3357] RecName: Full=Histone B
  misc_feature (26)..(434): NCBI GI: 121718859 Blast Desc: chromatin assembly factor 1 subunit C, [Aspergillus clavatus NRRL 1] gi|119404415|gb|EAW14791.1| chromatin assembly factor 1 subunit C, [Aspergillus clavatus NRRL 1]
  misc_feature (9)..(436): SWISSPROT Homolog: EC 2.3.1.48 Histone acetyltransferase
MAPATTVEDVDMEAPSQEFTEDEEQRRVNEEYKTWKKNSPFLYDMILSTALPWPTLTVQWFPDVKDLPARHCTVHRVLLGTHTSDGKPNHVQIAEVEIPKALPPAARDYDDDRGEIGGYAKADPAAIRWNVVQRIDHPAEVNKGRYCPQNPDLIATLAVDGSILVFDRTKHSSEPNGHVSPQIRLDGHEHEGFGLSWNPHVEGSLASGSEDRTVCLWDLKTLQSGKNTLGPARRFTHHSNIVNDVQYHPISRNFIGSVSDDLTLQILDVRQASDKQSSLVAKNGHNDAINALSFNPSSEVLVASASADKTIGIWDLRNVKEKVHTLEGHQDAVTSLAWHPHESGILGSASYDRRIIFWDLSRVGEEQQPDDQEDGPPELLFMHGGHTNHLADFSWNLNDPWLVASAAEDNMLQIWKVSNSIVGKDEADLPLDELGR

SEQ ID NO: 33357 - DNA, 2526 bp, Muscodor strobelii
  misc_feature: SGI EST ID NO. CUFF.78937.0
  misc_feature: Variant of the nucleotide sequence at SEQ ID NO 33355
gctcttgcgggtgcagggcaccaccactttacgcgcagcgcgtcttacaccttcccccccggtccagatctatctcatgttacctttcaactctcgtcgcatctacacgtaccgcattggacctgagttccagctgccctgctaccctctactttactacgcacagaagcacacagacatccagaactgattcattccctttcacctggtctgcggcttggctgagggcgtcctgtctcattttctggcctgcgccgactgcatcaacaccagtcacccccccaagttgttcacgtcgcctgctggtgtccggccacgctcgacatggctcccgccaccaccgtcgaagatgtcgacatggaagccccctcgcaggagttcaccgaggacgaggagcagcggcgcgtcaacgaagagtacaagacgtggaagaagaactcgcccttcctctacgacatgatcctcagcaccgcgctgccctggcccacgctcaccgtccagtggttccccgacgtcaaggacctgcccgcgcgccactgcaccgtccaccgcgtcctgctcggcacccacacctcggacggcaagcccaaccacgtccagatcgccgaggtcgagatccccaaggccctgccgcccgccgcccgcgactacgacgacgaccgcggcgagatcggcggctacgccaaggccgaccccgccgccatccgctggaacgtcgtccagcgcatcgaccacccggccgaggtcaacaagggccgctactgcccccagaacccggacctcatcgccaccctcgccgtcgacggctccatcctcgtcttcgaccgcaccaagcacagctccgagcccaacggccacgtgagcccccagatccgcctcgacggccacgagcacgagggcttcggcctcagctggaacccccacgtcgagggctccctcgcctccggcagcgaggaccgcaccgtctgtctctgggacctcaagaccctccagagcggcaagaacacgctgggcccggcgcgtcgcttcacccatcactccaacatcgtgaatgacgttcagtaccaccccatctcgcgcaacttcatcggcagcgtctcggacgatctcactctgcagatcctcgacgtccgccaggcttccgacaagcaatcctcgctcgtcgccaagaacggacacaacgacgccatcaacgccctgtccttcaacccctcctccgaggtgctcgtggccagcgcctctgccgacaagaccattggcatttgggatctgcgcaacgtcaaggagaaggtgcacacgctcgaaggccaccaggacgctgtcacctccctcgcctggcacccccacgagtcgggcatcctcggcagtgcgagctacgaccggaggatcatcttctgggatctgagccgagtaggcgaagagcagcagcctgacgaccaggaggatggcccccccgagcttcttttcatgcacggtggtcatacaaatcacttggctgatttcagctggaacttgaatgatccttggctcgtggcaagcgccgccgaggataacatgctgcagatctggaaggtgtccaactcgatcgtgggcaaggatgaggcagacctcccattggatgaacttggcaggtagagagaaagagatggagcatagatatcccacccgaagcgacagcgagaggcgtgagatcgagaccccgaaaatcactgatacgctggctcactgggggtttaatgaagaagaacgataatagcaggcaaagctacctggatgacacaaaaaaggacagagaacacggtacattcccggcaagctcccctcgcttatcgtcaagtcagagggtggccctgggacacagcctgcgtcgaaggaagatgcaacagatgtataagttaccaggcgggatgggatacagcatggagaagaaaatcattacgaaccgctgtccgcgagcctcgtatgtgaccatgtgtgtcctaccgcctatcgggagttatggaggatgtagggagatggggccactactcgtttctccgttgcagacagcggcgcgcattgcaaggccggacagtcataaaatgaatgaatgatgccacatcatttcccgtgatcgagtacattgtctggtctaagtaatttcgtcgagaaagcacgtcatgtgctatcctctgtctacacgtacgatgtcggcgatgttgataaaattatagtccaggtgcggcctcatagcaccacggtcagaaggagcgtacaacgactacttaacgaactgttcggagccaacagatgtaggagcttatgctgttgacaaagtacgaatcaagagacacacattcactatgcatagtttggtaagatgggtacatatgtaggtagaaaaggaacatcgtttggtttccatggtagtgcgcaagtggaactcagcaaccgccttgaattgtccctctctaccctgatctgtgtcaagtctacaaaactaggtatatatcgagacagcgattcgattcgattcgcatctcgtcg

SEQ ID NO: 33358 - DNA, 4269 bp, Muscodor strobelii
  misc_feature: SGI cDNA ID NO. 571505
  misc_feature: Reduced expression when VOC is produced
  misc_feature: Encodes the peptide sequence at SEQ ID NO 33359
atgggtgtccccaagttcttccggtggctctcggagcgctaccccgccatctcgcagctcatcgccgagaatcgaatccccgagttcgacaacctctacctcgacatgaacggcatcatccacaactgcacccacaaggactcgcacgacacctccttccgcctcagcgaggacgagatgttcatccgcattttcaactacatcgagcacctgttcggcaagatcaagcccaagcgcctcttcttcatggccatcgacggcgtcgccccccgcgccaagatgaaccagcagcgcgcccgccgcttccgcaccgccctcgacgccgagcaggcccgcgacaaggccctgcgcgagggccaagatctgcccaaggacgaccccttcgacagcaactgcatcacccccggcaccgacttcatggccaagctgaccctgcagctcaagtacttcatcgccaagaagatctccgaggactcggactggcagggcgtcgacatcgtcctctccggccacgaggtccccggcgagggcgagcacaagatcatggagtacatccgcaacgccaaggcccagcccgactaccaccccaacgtccgccactgcctctacggcctcgacgccgacctcatcatgctcggcctgctgagccacgacccccacttctgcctgctgcgcgaggaggtcaccttcggccgcgcctccaagtccaagtccaaggagctcgagcaccagaacttctaccttctccacctctacatcgtccgcgagtacctcgagctcgagttccaggacctcaacaagcccggcgccctgaccgtgcccttcgacatggagcgcatcatcgacgacttcatcctcatggccttctttgtcggcaacgatttcctgcccaacctgccctatctgcacatcaacgagggcgcgctggccaccatgttccgcatctacaaggacgtcctgccccagtgcgacggctacatcaacgagcagggcgtcatcaaccttccccgcctggccctgctgctggaggagctggccaaagaggagacacgtcatttcgagtacgagcacgccgattccaagtggttcaggagcaagcagctggcagagaccggccgggatgatgtgtctgctgctagagccaaagggaagccgattgtcacaagctcgcagagagagatatggaagcagatccgcaaatacgtcacgaaacgacctccggagcctctgaacatcggtcacgacttgattgccgcagaccgcaagtttgtgcaagatgcggctgaaagtcttcacatagaatggcgcacaatccaggacaatgagggacgtcgcgacctcattctacagttcccagtgacggcaaaacccgatggcgaggaggaggaggaagaggaggaggaggagggacatttggccctgctccgtgttgtcaaacgctacgacaatgctcaagttatcgatacgtcggctgaagaagcccaggcgaattatcaagtcaagtacaaagaaaagatgctggaatggaaagccaagtactacgacgacaagtttcactgggcgcccgaggagcaagtgacggagctcaccaagctttgcgagaactacgtgcagggtttacaatgggtcttatactactactaccgaggtgtagcatcctggccttggttctatcagtaccactattctcctatgacttcagatatcaccaagggcctaggtgccgatctcaactttaggcttggtcaaccgtttagaccgtttgaacagcttatgggtgttttacccgacaggagtaagaagattgttccgaccgtgtaccacgacttgatgacggatcccaagtcgcctatcatcgacttctatccacgcgatttcgagctcgacatgaacgggaagaagatggaatgggaagccgtcgtcaaaatccccttcatcgaagagcagcggttgttatctgccatggctcctcgcaatgagctactcagcccagcggaaaaggctcgcaacgattttggcgtgtctctcaaattcacttacgatccaaatctcgacttcgtgtacccttcctccatggtcggcatctttcccgatctaccacattgccactgtatcgaaaacatttttgatcttcccaccacggagggattagatttctaccacggtttagtggaaggggccaagctcggtgccgaggcactagcaggatttcccagtctggctacactaccttacaacgcaactctaggctttcatggcgtcaacgtcttccaacaggagagccgtaacgaaagtatggtcgtcactcttgccgacgtcgagctgcgttgccgggtcgaggccgccaggagcaagcttggccgaacatgccatgtcggctacccctttttgcaagaagcgagagttgtgcgggtttctgatgaattatttgactatgcacttgcaccagatggttcgggtcaggtcgtccagaatcaccattccaatagagatattgaagagtggaacaaaaaagctcttcggattgaaaacttttacagcaaacgacttggaatcatcatcgggtctgtcgaggctatggtccatgtcgagatgctcaagggtctgagcaagacggatgagggcgcctcggtcaaggattacgggccaatccctggcatggaaacggactatgccagccaagtcatcgtagacgatgtgatcagtccagacgagcggttcatcgagcgaggcgccgtcccctttgaggaggagttccccgtgggaacgcgtgctttctttctcggggagcctgaccacggacgcccactcgaagttctcgagcacaaaaataatcgtgctaccattatgctctccaaagcatctcaaaaagagcccgagttcgcacgacccgtcatccgccgggcagagcaacaaagtggctataggccctccttcgccgtcgctaaggagcttggccttcatcccctcgttctaagcaagatcacgtcctctttccaggtgcacaccgttggcggtagtatgaaggtcaacttaggtttgaacttgaaatttgaaggcaagaaacagaaggtattgggctattcccgcaagtcggcgtcgggctgggaattcagccctgccgccatccacttgttggtgcagtatatgactcaatttcctgattttttcgctgccattttgcgaaacccacaagggaacgaggtgagcgagaccgatctctggccggatcgcgatgtcgccagcgccagaattaaggcaatcggtgcgtggctcaagacggtggagaccagcaagttcgagcgcgtgcctcttgaagcccagcagctagattcagatgtagtaatgcagctacagaatgccgcagatgctttgagggatgtcaatgcccagacagagcgccgaaagttacagaatgttccaaggacggccctgctccaccctaaggatgcggagcacaggctcggcaatcaagggttcgaacttggagatcgtgtcattttcgtggcggctgctggcaaggttcccatcggatcgagaggaactgtagtagggatcagtacggtgggcaatcaccacatgttggatgtcgtatgggacaatgccttcatgaacggaactactctcaacgaacgctgtgcggcattccgtggccaaactgtacatgccaactcggtgctcaactccacacagaggcaggtgatctggatgtccaaggcccatatggccaaacggtctgtgcagaaccctcttacggtaaatgggtacggaagcccggttggcccacaactgagagaggctcccgctccagcacctcttcgtggcagctggcgcggcgccatcaatggtggaaatcgtcacgtcacaaatgcgcggggaggcgttgctcaccaagggcatgggcaacaagctgttccccagcttcaacatagcagtcttgtgtatcggccgcatccgaacgggcattattccctccccaatgggcaaggcgttccgcaaggtcccagtcacggcgggcttcccgcacgtggcggtgggcagcgggataacgtaagtggccgcggcggtcgcggaggaagaggcgggaatttccagaacttccaaagtcaccagaatctcacagggcaacaagtaggctacaatgcggttccgccacctgccagtcttgatgcccgcgggggtgggcgtggcagaggacgcggccgtggtagaggtcgaggacggggcggaagaggaggagcggatgttgcagcctcagttaccgagtga

SEQ ID NO: 33359 - protein, 1422 aa, Muscodor strobelii
  misc_feature: SGI Peptide ID NO. 571505
  misc_feature (1)..(228): Pfam Id: PF03159 Pfam Desc: XRN 5'-3' exonuclease N-terminus
  misc_feature (1)..(1313): NCBI GI: 116199173 Blast Desc: CHGG_07742 [Chaetomium globosum CBS 148.51] gi|88179021|gb|EAQ86489.1| CHGG_07742 [Chaetomium globosum CBS 148.51]
  misc_feature (1)..(1391): NCBI GI: 156050179 Blast Desc: SS1G_07676 [Sclerotinia sclerotiorum 1980] gi|154692077|gb|EDN91815.1| SS1G_07676 [Sclerotinia sclerotiorum 1980]
  misc_feature (36)..(1391): NCBI GI: 164424738 Blast Desc: NCU06678 [Neurospora crassa OR74A] gi|157070639|gb|EAA31689.2| NCU06678 [Neurospora crassa OR74A]
  misc_feature (3)..(1277): NCBI GI: 171694057 Blast Desc: protein product [Podospora anserina] gi|170946977|emb|CAP73781.1| protein product [Podospora anserina]
  misc_feature (1)..(1322): NCBI GI: 261355623 Blast Desc: 5'-3' exoribonuclease [Verticillium albo-atrum VaMs.102]
  misc_feature (1)..(1391): NCBI GI: 145612697 Blast Desc: MGG_12403 [Magnaporthe grisea 70-15] gi|145019834|gb|EDK04062.1| MGG_12403 [Magnaporthe grisea 70-15]
  misc_feature (1)..(1363): NCBI GI: 261202580 Blast Desc: exonuclease Kem1 [Ajellomyces dermatitidis SLH14081] gi|239590601|gb|EEQ73182.1| exonuclease Kem1 [Ajellomyces dermatitidis SLH14081]
  misc_feature (1)..(1363): NCBI GI: 239612327 Blast Desc: exonuclease Kem1 [Ajellomyces dermatitidis ER-3]
  misc_feature (1)..(1390): NCBI GI: 119183089 Blast Desc: CIMG_06514 [Coccidioides immitis RS]
  misc_feature (1)..(1390): NCBI GI: 240109488 Blast Desc: exonuclease, [Coccidioides posadasii C735 delta SOWgp]
  misc_feature: Useful for introducing or modulating the production of volatile compounds
MGVPKFFRWLSERYPAISQLIAENRIPEFDNLYLDMNGIIHNCTHKDSHDTSFRLSEDEMFIRIFNYIEHLFGKIKPKRLFFMAIDGVAPRAKMNQQRARRFRTALDAEQARDKALREGQDLPKDDPFDSNCITPGTDFMAKLTLQLKYFIAKKISEDSDWQGVDIVLSGHEVPGEGEHKIMEYIRNAKAQPDYHPNVRHCLYGLDADLIMLGLLSHDPHFCLLREEVTFGRASKSKSKELEHQNFYLLHLYIVREYLELEFQDLNKPGALTVPFDMERIIDDFILMAFFVGNDFLPNLPYLHINEGALATMFRIYKDVLPQCDGYINEQGVINLPRLALLLEELAKEETRHFEYEHADSKWFRSKQLAETGRDDVSAARAKGKPIVTSSQREIWKQIRKYVTKRPPEPLNIGHDLIAADRKFVQDAAESLHIEWRTIQDNEGRRDLILQFPVTAKPDGEEEEEEEEEEGHLALLRVVKRYDNAQVIDTSAEEAQANYQVKYKEKMLEWKAKYYDDKFHWAPEEQVTELTKLCENYVQGLQWVLYYYYRGVASWPWFYQYHYSPMTSDITKGLGADLNFRLGQPFRPFEQLMGVLPDRSKKIVPTVYHDLMTDPKSPIIDFYPRDFELDMNGKKMEWEAVVKIPFIEEQRLLSAMAPRNELLSPAEKARNDFGVSLKFTYDPNLDFVYPSSMVGIFPDLPHCHCIENIFDLPTTEGLDFYHGLVEGAKLGAEALAGFPSLATLPYNATLGFHGVNVFQQESRNESMVVTLADVELRCRVEAARSKLGRTCHVGYPFLQEARVVRVSDELFDYALAPDGSGQVVQNHHSNRDIEEWNKKALRIENFYSKRLGIIIGSVEAMVHVEMLKGLSKTDEGASVKDYGPIPGMETDYASQVIVDDVISPDERFIERGAVPFEEEFPVGTRAFFLGEPDHGRPLEVLEHKNNRATIMLSKASQKEPEFARPVIRRAEQQSGYRPSFAVAKELGLHPLVLSKITSSFQVHTVGGSMKVNLGLNLKFEGKKQKVLGYSRKSASGWEFSPAAIHLLVQYMTQFPDFFAAILRNPQGNEVSETDLWPDRDVASARIKAIGAWLKTVETSKFERVPLEAQQLDSDVVMQLQNAADALRDVNAQTERRKLQNVPRTALLHPKDAEHRLGNQGFELGDRVIFVAAAGKVPIGSRGTVVGISTVGNHHMLDVVWDNAFMNGTTLNERCAAFRGQTVHANSVLNSTQRQVIWMSKAHMAKRSVQNPLTVNGYGSPVGPQLREAPAPAPLRGSWRGAINGGNRHVTNARGGVAHQGHGQQAVPQLQHSSLVYRPHPNGHYSLPNGQGVPQGPSHGGLPARGGGQRDNVSGRGGRGGRGGNFQNFQSHQNLTGQQVGYNAVPPPASLDARGGGRGRGRGRGRGRGRGGRGGADVAASVTE

SEQ ID NO: 33360 - DNA, 5627 bp, Muscodor strobelii
  misc_feature: SGI EST ID NO. CUFF.79107.0
  misc_feature: Variant of the nucleotide sequence at SEQ ID NO 33358
tgcagtttgcgcatttcgcaagtcgcaaggcgcaggattctgagttgtatagaaccatctccatagttacaaaacagcagccctccctctcgcgcggcgctgtctatagtcgcggcgctctctctcctttgggcgtcacttttttctcttcgttactcgtgccgcctcgggtgctgcgtgctggcttcgtttctccttccgctctatctctcttcgacgttgcattctctcttgtgttctcttctggattttccaattaggggacggcgcaagaccaacgaacataacgaaagttacgagactcacgagaccggaaagcccctccaccctcggcacggccatatgttgtctctcgtgttgtagcaatacatacacacgtctcctcatcgcccgcctcgacccgacccgactcgacgtcaccaccaccactaccagccatggggtctgtctgccctcctcaaccacgcacctgtctgtccacgtactgaccagctttgcctcgcccatgcagtgtccccaagttcttccggtggctctcggagcgctaccccgccatctcgcagctcatcgccgagaatcgaatccccgagttcgacaacctctacctcgacatgaacggcatcatccacaactgcacccacaaggactcgcacgacacctccttccgcctcagcgaggacgagatgttcatccgcattttcaactacatcgagcacctgttcggcaagatcaagcccaagcgcctcttcttcatggccatcgacggcgtcgccccccgcgccaagatgaaccagcagcgcgcccgccgcttccgcaccgccctcgacgccgagcaggcccgcgacaaggccctgcgcgagggccaagatctgcccaaggacgaccccttcgacagcaactgcatcacccccggcaccgacttcatggccaagctgaccctgcagctcaagtacttcatcgccaagaagatctccgaggactcggactggcagggcgtcgacatcgtcctctccggccacgaggtccccggcgagggcgagcacaagatcatggagtacatccgcaacgccaaggcccagcccgactaccaccccaacgtccgccactgcctctacggcctcgacgccgacctcatcatgctcggcctgctgagccacgacccccacttctgcctgctgcgcgaggaggtcaccttcggccgcgcctccaagtccaagtccaaggagctcgagcaccagaacttctaccttctccacctctacatcgtccgcgagtacctcgagctcgagttccaggacctcaacaagcccggcgccctgaccgtgcccttcgacatggagcgcatcatcgacgacttcatcctcatggccttctttgtcggcaacgatttcctgcccaacctgccctatctgcacatcaacgagggcgcgctggccaccatgttccgcatctacaaggacgtcctgccccagtgcgacggctacatcaacgagcagggcgtcatcaaccttccccgcctggccctgctgctggaggagctggccaaagaggagacacgtcatttcgagtacgagcacgccgattccaagtggttcaggagcaagcagctggcagagaccggccgggatgatgtgtctgctgctagagccaaagggaagccgattgtcacaagctcgcagagagagatatggaagcagatccgcaaatacgtcacgaaacgacctccggagcctctgaacatcggtcacgacttgattgccgcagaccgcaagtttgtgcaagatgcggctgaaagtcttcacatagaatggcgcacaatccaggacaatgagggacgtcgcgacctcattctacagttcccagtgacggcaaaacccgatggcgaggaggaggaggaagaggaggaggaggagggacatttggccctgctccgtgttgtcaaacgctacgacaatgctcaagttatcgatacgtcggctgaagaagcccaggcgaattatcaagtcaagtacaaagaaaagatgctggaatggaaagccaagtactacgacgacaagtttcactgggcgcccgaggagcaagtgacggagctcaccaagctttgcgagaactacgtgcagggtttacaatgggtcttatactactactaccgaggtgtagcatcctggccttggttctatcagtaccactattctcctatgacttcagatatcaccaagggcctaggtgccgatctcaactttaggcttggtcaaccgtttagaccgtttgaacagcttatgggtgttttacccgacaggagtaagaagattgttccgaccgtgtaccacgacttgatgacggatcccaagtcgcctatcatcgacttctatccacgcgatttcgagctcgacatgaacgggaagaagatggaatgggaagccgtcgtcaaaatccccttcatcgaagagcagcggttgttatctgccatggctcctcgcaatgagctactcagcccagcggaaaaggctcgcaacgattttggcgtgtctctcaaattcacttacgatccaaatctcgacttcgtgtacccttcctccatggtcggcatctttcccgatctaccacattgccactgtatcgaaaacatttttgatcttcccaccacggagggattagatttctaccacggtttagtggaaggggccaagctcggtgccgaggcactagcaggatttcccagtctggctacactaccttacaacgcaactctaggctttcatggcgtcaacgtcttccaacaggagagccgtaacgaaagtatggtcgtcactcttgccgacgtcgagctgcgttgccgggtcgaggccgccaggagcaagcttggccgaacatgccatgtcggctacccctttttgcaagaagcgagagttgtgcgggtttctgatgaattatttgactatgcacttgcaccagatggttcgggtcaggtcgtccagaatcaccattccaatagagatattgaagagtggaacaaaaaagctcttcggattgaaaacttttacagcaaacgacttggaatcatcatcgggtctgtcgaggctatggtccatgtcgagatgctcaagggtctgagcaagacggatgagggcgcctcggtcaaggattacgggccaatccctggcatggaaacggactatgccagccaagtcatcgtagacgatgtgatcagtccagacgagcggttcatcgagcgaggcgccgtcccctttgaggaggagttccccgtgggaacgcgtgctttctttctcggggagcctgaccacggacgcccactcgaagttctcgagcacaaaaataatcgtgctaccattatgctctccaaagcatctcaaaaagagcccgagttcgcacgacccgtcatccgccgggcagagcaacaaagtggctataggccctccttcgccgtcgctaaggagcttggccttcatcccctcgttctaagcaagatcacgtcctctttccaggtgcacaccgttggcggtagtatgaaggtcaacttaggtttgaacttgaaatttgaaggcaagaaacagaaggtattgggctattcccgcaagtcggcgtcgggctgggaattcagccctgccgccatccacttgttggtgcagtatatgactcaatttcctgattttttcgctgccattttgcgaaacccacaagggaacgaggtgagcgagaccgatctctggccggatcgcgatgtcgccagcgccagaattaaggcaatcggtgcgtggctcaagacggtggagaccagcaagttcgagcgcgtgcctcttgaagcccagcagctagattcagatgtagtaatgcagctacagaatgccgcagatgctttgagggatgtcaatgcccagacagagcgccgaaagttacagaatgttccaaggacggccctgctccaccctaaggatgcggagcacaggctcggcaatcaagggttcgaacttggagatcgtgtcattttcgtggcggctgctggcaaggttcccatcggatcgagaggaactgtagtagggatcagtacggtgggcaatcaccacatgttggatgtcgtatgggacaatgccttcatgaacggaactactctcaacgaacgctgtgcggcattccgtggccaaactgtacatgccaactcggtgctcaactccacacagaggcaggtgatctggatgtccaaggcccatatggccaaacggtctgtgcagaaccctcttacggtaaatgggtacggaagcccggttggcccacaactgagagaggctcccgctccagcacctcttcgtggcagctggcgcggcgccatcaatggtggaaatcgtcacgtcacaaatgcgcggggaggcgttgctcaccaagggcatgggcaacaagctgttccccagcttcaacatagcagtcttgtgtatcggccgcatccgaacgggcattattccctccccaatgggcaaggcgttccgcaaggtcccagtcacggcgggcttcccgcacgtggcggtgggcagcgggataacgtaagtggccgcggcggtcgcggaggaagaggcgggaatttccagaacttccaaagtcaccagaatctcacagggcaacaagtaggctacaatgcggttccgccacctgccagtcttgatgcccgcgggggtgggcgtggcagaggacgcggccgtggtagaggtcgaggacggggcggaagaggaggagcggatgttgcagcctcagttaccgagtgagatgaggagtgctagttctggaacaagccaaaaggatcaacgcggcatatataccccacaaacgaaaagatattgtgtaaaaacattatattatatgattcttcaggcggagcgcttggggtttgatcatggttggaagagctataacgggcgcacaaaaccctcggatgtcatggatgaagcctgttagtttctacactacgtctcgagagcccctgaaactgtttatgaggcgcacatttagaacggatatagacatatatcacttcggctctccatggggcttacgacgaagcttaccatactttctgcctcaggcatgtggtcggttaacaacacggcatagcaaaatgacacaacttttcaggtcctagttgtctcgataccatgctcatgatcagttatgatgcttttgtaatgtaagaagtaggaggtcgcgatgcttcttggtgctaaagcaatccgcagaccaatactattctagtagtccttcaacttaaagctatgacaagcaatttaagattgtcgtgactatcgaggtgaacagatgctgacgatacacattgcaagcatctagaatgagcagaggatttcttatagagggtgaaagcgtggtcgtggtcgatagcgtggcactactatcatcgtggtttgttctgccgcatcgcgtcccaggggccaacatgagcagacgttgagcaacacccatagcaacctacctactgttgtttatttccctctttcttcctcatatgtaccactttggccttggcacattagtttacgccctgtaatcattgttgcttggcgtgcgcgtcactaccttcctacctgtttcactatgtatctttc

SEQ ID NO: 33361 - DNA, 4272 bp, Muscodor strobelii
  misc_feature: SGI cDNA ID NO. 571506
  misc_feature: Reduced expression when VOC is produced
  misc_feature: Encodes the peptide sequence at SEQ ID NO 33362
atgggtgtccccaagttcttccggtggctctcggagcgctaccccgccatctcgcagctcatcgccgagaatcgaatccccgagttcgacaacctctacctcgacatgaacggcatcatccacaactgcacccacaaggactcgcacgacacctccttccgcctcagcgaggacgagatgttcatccgcattttcaactacatcgagcacctgttcggcaagatcaagcccaagcgcctcttcttcatggccatcgacggcgtcgccccccgcgccaagatgaaccagcagcgcgcccgccgcttccgcaccgccctcgacgccgagcaggcccgcgacaaggccctgcgcgagggccaagatctgcccaaggacgaccccttcgacagcaactgcatcacccccggcaccgacttcatggccaagctgaccctgcagctcaagtacttcatcgccaagaagatctccgaggactcggactggcagggcgtcgacatcgtcctctccggccacgaggtccccggcgagggcgagcacaagatcatggagtacatccgcaacgccaaggcccagcccgactaccaccccaacgtccgccactgcctctacggcctcgacgccgacctcatcatgctcggcctgctgagccacgacccccacttctgcctgctgcgcgaggaggtcaccttcggccgcgcctccaagtccaagtccaaggagctcgagcaccagaacttctaccttctccacctctacatcgtccgcgagtacctcgagctcgagttccaggacctcaacaagcccggcgccctgaccgtgcccttcgacatggagcgcatcatcgacgacttcatcctcatggccttctttgtcggcaacgatttcctgcccaacctgccctatctgcacatcaacgagggcgcgctggccaccatgttccgcatctacaaggacgtcctgccccagtgcgacggctacatcaacgagcagggcgtcatcaaccttccccgcctggccctgctgctggaggagctggccaaagaggagacacgtcatttcgagtacgagcacgccgattccaagtggttcaggagcaagcagctggcagagaccggccgggatgatgtgtctgctgctagagccaaagggaagccgattgtcacaagctcgcagagagagatatggaagcagatccgcaaatacgtcacgaaacgacctccggagcctctgaacatcggtcacgacttgattgccgcagaccgcaagtttgtgcaagatgcggctgaaagtcttcacatagaatggcgcacaatccaggacaatgagggacgtcgcgacctcattctacagttcccagtgacggcaaaacccgatggcgaggaggaggaggaagaggaggaggaggagggacatttggccctgctccgtgttgtcaaacgctacgacaatgctcaagttatcgatacgtcggctgaagaagcccaggcgaattatcaagtcaagtacaaagaaaagatgctggaatggaaagccaagtactacgacgacaagtttcactgggcgcccgaggagcaagtgacggagctcaccaagctttgcgagaactacgtgcagggtttacaatgggtcttatactactactaccgaggtgtagcatcctggccttggttctatcagtaccactattctcctatgacttcaggcatgtttgcagcccttgttcgtgccgatctcaactttaggcttggtcaaccgtttagaccgtttgaacagcttatgggtgttttacccgacaggagtaagaagattgttccgaccgtgtaccacgacttgatgacggatcccaagtcgcctatcatcgacttctatccacgcgatttcgagctcgacatgaacgggaagaagatggaatgggaagccgtcgtcaaaatccccttcatcgaagagcagcggttgttatctgccatggctcctcgcaatgagctactcagcccagcggaaaaggctcgcaacgattttggcgtgtctctcaaattcacttacgatccaaatctcgacttcgtgtacccttcctccatggtcggcatctttcccgatctaccacattgccactgtatcgaaaacatttttgatcttcccaccacggagggattagatttctaccacggtttagtggaaggggccaagctcggtgccgaggcactagcaggatttcccagtctggctacactaccttacaacgcaactctaggctttcatggcgtcaacgtcttccaacaggagagccgtaacgaaagtatggtcgtcactcttgccgacgtcgagctgcgttgccgggtcgaggccgccaggagcaagcttggccgaacatgccatgtcggctacccctttttgcaagaagcgagagttgtgcgggtttctgatgaattatttgactatgcacttgcaccagatggttcgggtcaggtcgtccagaatcaccattccaatagagatattgaagagtggaacaaaaaagctcttcggattgaaaacttttacagcaaacgacttggaatcatcatcgggtctgtcgaggctatggtccatgtcgagatgctcaagggtctgagcaagacggatgagggcgcctcggtcaaggattacgggccaatccctggcatggaaacggactatgccagccaagtcatcgtagacgatgtgatcagtccagacgagcggttcatcgagcgaggcgccgtcccctttgaggaggagttccccgtgggaacgcgtgctttctttctcggggagcctgaccacggacgcccactcgaagttctcgagcacaaaaataatcgtgctaccattatgctctccaaagcatctcaaaaagagcccgagttcgcacgacccgtcatccgccgggcagagcaacaaagtggctataggccctccttcgccgtcgctaaggagcttggccttcatcccctcgttctaagcaagatcacgtcctctttccaggtgcacaccgttggcggtagtatgaaggtcaacttaggtttgaacttgaaatttgaaggcaagaaacagaaggtattgggctattcccgcaagtcggcgtcgggctgggaattcagccctgccgccatccacttgttggtgcagtatatgactcaatttcctgattttttcgctgccattttgcgaaacccacaagggaacgaggtgagcgagaccgatctctggccggatcgcgatgtcgccagcgccagaattaaggcaatcggtgcgtggctcaagacggtggagaccagcaagttcgagcgcgtgcctcttgaagcccagcagctagattcagatgtagtaatgcagctacagaatgccgcagatgctttgagggatgtcaatgcccagacagagcgccgaaagttacagaatgttccaaggacggccctgctccaccctaaggatgcggagcacaggctcggcaatcaagggttcgaacttggagatcgtgtcattttcgtggcggctgctggcaaggttcccatcggatcgagaggaactgtagtagggatcagtacggtgggcaatcaccacatgttggatgtcgtatgggacaatgccttcatgaacggaactactctcaacgaacgctgtgcggcattccgtggccaaactgtacatgccaactcggtgctcaactccacacagaggcaggtgatctggatgtccaaggcccatatggccaaacggtctgtgcagaaccctcttacggtaaatgggtacggaagcccggttggcccacaactgagagaggctcccgctccagcacctcttcgtggcagctggcgcggcgccatcaatggtggaaatcgtcacgtcacaaatgcgcggggaggcgttgctcaccaagggcatgggcaacaagctgttccccagcttcaacatagcagtcttgtgtatcggccgcatccgaacgggcattattccctccccaatgggcaaggcgttccgcaaggtcccagtcacggcgggcttcccgcacgtggcggtgggcagcgggataacgtaagtggccgcggcggtcgcggaggaagaggcgggaatttccagaacttccaaagtcaccagaatctcacagggcaacaagtaggctacaatgcggttccgccacctgccagtcttgatgcccgcgggggtgggcgtggcagaggacgcggccgtggtagaggtcgaggacggggcggaagaggaggagcggatgttgcagcctcagttaccgagtga

SEQ ID NO: 33362 - protein, 1423 aa, Muscodor strobelii
  misc_feature: SGI Peptide ID NO. 571506
  misc_feature (1)..(228): Pfam Id: PF03159 Pfam Desc: XRN 5'-3' exonuclease N-terminus
  misc_feature (1)..(1314): NCBI GI: 116199173 Blast Desc: CHGG_07742 [Chaetomium globosum CBS 148.51] gi|88179021|gb|EAQ86489.1| CHGG_07742 [Chaetomium globosum CBS 148.51]
  misc_feature (1)..(1392): NCBI GI: 156050179 Blast Desc: SS1G_07676 [Sclerotinia sclerotiorum 1980] gi|154692077|gb|EDN91815.1| SS1G_07676 [Sclerotinia sclerotiorum 1980]
  misc_feature (36)..(1392): NCBI GI: 164424738 Blast Desc: NCU06678 [Neurospora crassa OR74A] gi|157070639|gb|EAA31689.2| NCU06678 [Neurospora crassa OR74A]
  misc_feature (3)..(1278): NCBI GI: 171694057 Blast Desc: protein product [Podospora anserina] gi|170946977|emb|CAP73781.1| protein product [Podospora anserina]
  misc_feature (1)..(1323): NCBI GI: 261355623 Blast Desc: 5'-3' exoribonuclease [Verticillium albo-atrum VaMs.102]
  misc_feature (1)..(1392): NCBI GI: 145612697 Blast Desc: MGG_12403 [Magnaporthe grisea 70-15] gi|145019834|gb|EDK04062.1| MGG_12403 [Magnaporthe grisea 70-15]
  misc_feature (1)..(1364): NCBI GI: 261202580 Blast Desc: exonuclease Kem1 [Ajellomyces dermatitidis SLH14081] gi|239590601|gb|EEQ73182.1| exonuclease Kem1 [Ajellomyces dermatitidis SLH14081]
  misc_feature (1)..(1364): NCBI GI: 239612327 Blast Desc: exonuclease Kem1 [Ajellomyces dermatitidis ER-3]
  misc_feature (1)..(1391): NCBI GI: 119183089 Blast Desc: CIMG_06514 [Coccidioides immitis RS]
  misc_feature (1)..(1382): NCBI GI: 225557050 Blast Desc: exonuclease [Ajellomyces capsulatus G186AR]
  misc_feature: Useful for introducing or modulating the production of volatile compounds
MGVPKFFRWLSERYPAISQLIAENRIPEFDNLYLDMNGIIHNCTHKDSHDTSFRLSEDEMFIRIFNYIEHLFGKIKPKRLFFMAIDGVAPRAKMNQQRARRFRTALDAEQARDKALREGQDLPKDDPFDSNCITPGTDFMAKLTLQLKYFIAKKISEDSDWQGVDIVLSGHEVPGEGEHKIMEYIRNAKAQPDYHPNVRHCLYGLDADLIMLGLLSHDPHFCLLREEVTFGRASKSKSKELEHQNFYLLHLYIVREYLELEFQDLNKPGALTVPFDMERIIDDFILMAFFVGNDFLPNLPYLHINEGALATMFRIYKDVLPQCDGYINEQGVINLPRLALLLEELAKEETRHFEYEHADSKWFRSKQLAETGRDDVSAARAKGKPIVTSSQREIWKQIRKYVTKRPPEPLNIGHDLIAADRKFVQDAAESLHIEWRTIQDNEGRRDLILQFPVTAKPDGEEEEEEEEEEGHLALLRVVKRYDNAQVIDTSAEEAQANYQVKYKEKMLEWKAKYYDDKFHWAPEEQVTELTKLCENYVQGLQWVLYYYYRGVASWPWFYQYHYSPMTSGMFAALVRADLNFRLGQPFRPFEQLMGVLPDRSKKIVPTVYHDLMTDPKSPIIDFYPRDFELDMNGKKMEWEAVVKIPFIEEQRLLSAMAPRNELLSPAEKARNDFGVSLKFTYDPNLDFVYPSSMVGIFPDLPHCHCIENIFDLPTTEGLDFYHGLVEGAKLGAEALAGFPSLATLPYNATLGFHGVNVFQQESRNESMVVTLADVELRCRVEAARSKLGRTCHVGYPFLQEARVVRVSDELFDYALAPDGSGQVVQNHHSNRDIEEWNKKALRIENFYSKRLGIIIGSVEAMVHVEMLKGLSKTDEGASVKDYGPIPGMETDYASQVIVDDVISPDERFIERGAVPFEEEFPVGTRAFFLGEPDHGRPLEVLEHKNNRATIMLSKASQKEPEFARPVIRRAEQQSGYRPSFAVAKELGLHPLVLSKITSSFQVHTVGGSMKVNLGLNLKFEGKKQKVLGYSRKSASGWEFSPAAIHLLVQYMTQFPDFFAAILRNPQGNEVSETDLWPDRDVASARIKAIGAWLKTVETSKFERVPLEAQQLDSDVVMQLQNAADALRDVNAQTERRKLQNVPRTALLHPKDAEHRLGNQGFELGDRVIFVAAAGKVPIGSRGTVVGISTVGNHHMLDVVWDNAFMNGTTLNERCAAFRGQTVHANSVLNSTQRQVIWMSKAHMAKRSVQNPLTVNGYGSPVGPQLREAPAPAPLRGSWRGAINGGNRHVTNARGGVAHQGHGQQAVPQLQHSSLVYRPHPNGHYSLPNGQGVPQGPSHGGLPARGGGQRDNVSGRGGRGGRGGNFQNFQSHQNLTGQQVGYNAVPPPASLDARGGGRGRGRGRGRGRGRGGRGGADVAASVTE

SEQ ID NO: 33363 - DNA, 5558 bp, Muscodor strobelii
  misc_feature: SGI EST ID NO. CUFF.79107.1
  misc_feature: Variant of the nucleotide sequence at SEQ ID NO 33361
tgcagtttgcgcatttcgcaagtcgcaaggcgcaggattctgagttgtatagaaccatctccatagttacaaaacagcagccctccctctcgcgcggcgctgtctatagtcgcggcgctctctctcctttgggcgtcacttttttctcttcgttactcgtgccgcctcgggtgctgcgtgctggcttcgtttctccttccgctctatctctcttcgacgttgcattctctcttgtgttctcttctggattttccaattaggggacggcgcaagaccaacgaacataacgaaagttacgagactcacgagaccggaaagcccctccaccctcggcacggccatatgttgtctctcgtgttgtagcaatacatacacacgtctcctcatcgcccgcctcgacccgacccgactcgacgtcaccaccaccactaccagccatgggtgtccccaagttcttccggtggctctcggagcgctaccccgccatctcgcagctcatcgccgagaatcgaatccccgagttcgacaacctctacctcgacatgaacggcatcatccacaactgcacccacaaggactcgcacgacacctccttccgcctcagcgaggacgagatgttcatccgcattttcaactacatcgagcacctgttcggcaagatcaagcccaagcgcctcttcttcatggccatcgacggcgtcgccccccgcgccaagatgaaccagcagcgcgcccgccgcttccgcaccgccctcgacgccgagcaggcccgcgacaaggccctgcgcgagggccaagatctgcccaaggacgaccccttcgacagcaactgcatcacccccggcaccgacttcatggccaagctgaccctgcagctcaagtacttcatcgccaagaagatctccgaggactcggactggcagggcgtcgacatcgtcctctccggccacgaggtccccggcgagggcgagcacaagatcatggagtacatccgcaacgccaaggcccagcccgactaccaccccaacgtccgccactgcctctacggcctcgacgccgacctcatcatgctcggcctgctgagccacgacccccacttctgcctgctgcgcgaggaggtcaccttcggccgcgcctccaagtccaagtccaaggagctcgagcaccagaacttctaccttctccacctctacatcgtccgcgagtacctcgagctcgagttccaggacctcaacaagcccggcgccctgaccgtgcccttcgacatggagcgcatcatcgacgacttcatcctcatggccttctttgtcggcaacgatttcctgcccaacctgccctatctgcacatcaacgagggcgcgctggccaccatgttccgcatctacaaggacgtcctgccccagtgcgacggctacatcaacgagcagggcgtcatcaaccttccccgcctggccctgctgctggaggagctggccaaagaggagacacgtcatttcgagtacgagcacgccgattccaagtggttcaggagcaagcagctggcagagaccggccgggatgatgtgtctgctgctagagccaaagggaagccgattgtcacaagctcgcagagagagatatggaagcagatccgcaaatacgtcacgaaacgacctccggagcctctgaacatcggtcacgacttgattgccgcagaccgcaagtttgtgcaagatgcggctgaaagtcttcacatagaatggcgcacaatccaggacaatgagggacgtcgcgacctcattctacagttcccagtgacggcaaaacccgatggcgaggaggaggaggaagaggaggaggaggagggacatttggccctgctccgtgttgtcaaacgctacgacaatgctcaagttatcgatacgtcggctgaagaagcccaggcgaattatcaagtcaagtacaaagaaaagatgctggaatggaaagccaagtactacgacgacaagtttcactgggcgcccgaggagcaagtgacggagctcaccaagctttgcgagaactacgtgcagggtttacaatgggtcttatactactactaccgaggtgtagcatcctggccttggttctatcagtaccactattctcctatgacttcagatatcaccaagggcctaggtgccgatctcaactttaggcttggtcaaccgtttagaccgtttgaacagcttatgggtgttttacccgacaggagtaagaagattgttccgaccgtgtaccacgacttgatgacggatcccaagtcgcctatcatcgacttctatccacgcgatttcgagctcgacatgaacgggaagaagatggaatgggaagccgtcgtcaaaatccccttcatcgaagagcagcggttgttatctgccatggctcctcgcaatgagctactcagcccagcggaaaaggctcgcaacgattttggcgtgtctctcaaattcacttacgatccaaatctcgacttcgtgtacccttcctccatggtcggcatctttcccgatctaccacattgccactgtatcgaaaacatttttgatcttcccaccacggagggattagatttctaccacggtttagtggaaggggccaagctcggtgccgaggcactagcaggatttcccagtctggctacactaccttacaacgcaactctaggctttcatggcgtcaacgtcttccaacaggagagccgtaacgaaagtatggtcgtcactcttgccgacgtcgagctgcgttgccgggtcgaggccgccaggagcaagcttggccgaacatgccatgtcggctacccctttttgcaagaagcgagagttgtgcgggtttctgatgaattatttgactatgcacttgcaccagatggttcgggtcaggtcgtccagaatcaccattccaatagagatattgaagagtggaacaaaaaagctcttcggattgaaaacttttacagcaaacgacttggaatcatcatcgggtctgtcgaggctatggtccatgtcgagatgctcaagggtctgagcaagacggatgagggcgcctcggtcaaggattacgggccaatccctggcatggaaacggactatgccagccaagtcatcgtagacgatgtgatcagtccagacgagcggttcatcgagcgaggcgccgtcccctttgaggaggagttccccgtgggaacgcgtgctttctttctcggggagcctgaccacggacgcccactcgaagttctcgagcacaaaaataatcgtgctaccattatgctctccaaagcatctcaaaaagagcccgagttcgcacgacccgtcatccgccgggcagagcaacaaagtggctataggccctccttcgccgtcgctaaggagcttggccttcatcccctcgttctaagcaagatcacgtcctctttccaggtgcacaccgttggcggtagtatgaaggtcaacttaggtttgaacttgaaatttgaaggcaagaaacagaaggtattgggctattcccgcaagtcggcgtcgggctgggaattcagccctgccgccatccacttgttggtgcagtatatgactcaatttcctgattttttcgctgccattttgcgaaacccacaagggaacgaggtgagcgagaccgatctctggccggatcgcgatgtcgccagcgccagaattaaggcaatcggtgcgtggctcaagacggtggagaccagcaagttcgagcgcgtgcctcttgaagcccagcagctagattcagatgtagtaatgcagctacagaatgccgcagatgctttgagggatgtcaatgcccagacagagcgccgaaagttacagaatgttccaaggacggccctgctccaccctaaggatgcggagcacaggctcggcaatcaagggttcgaacttggagatcgtgtcattttcgtggcggctgctggcaaggttcccatcggatcgagaggaactgtagtagggatcagtacggtgggcaatcaccacatgttggatgtcgtatgggacaatgccttcatgaacggaactactctcaacgaacgctgtgcggcattccgtggccaaactgtacatgccaactcggtgctcaactccacacagaggcaggtgatctggatgtccaaggcccatatggccaaacggtctgtgcagaaccctcttacggtaaatgggtacggaagcccggttggcccacaactgagagaggctcccgctccagcacctcttcgtggcagctggcgcggcgccatcaatggtggaaatcgtcacgtcacaaatgcgcggggaggcgttgctcaccaagggcatgggcaacaagctgttccccagcttcaacatagcagtcttgtgtatcggccgcatccgaacgggcattattccctccccaatgggcaaggcgttccgcaaggtcccagtcacggcgggcttcccgcacgtggcggtgggcagcgggataacgtaagtggccgcggcggtcgcggaggaagaggcgggaatttccagaacttccaaagtcaccagaatctcacagggcaacaagtaggctacaatgcggttccgccacctgccagtcttgatgcccgcgggggtgggcgtggcagaggacgcggccgtggtagaggtcgaggacggggcggaagaggaggagcggatgttgcagcctcagttaccgagtgagatgaggagtgctagttctggaacaagccaaaaggatcaacgcggcatatataccccacaaacgaaaagatattgtgtaaaaacattatattatatgattcttcaggcggagcgcttggggtttgatcatggttggaagagctataacgggcgcacaaaaccctcggatgtcatggatgaagcctgttagtttctacactacgtctcgagagcccctgaaactgtttatgaggcgcacatttagaacggatatagacatatatcacttcggctctccatggggcttacgacgaagcttaccatactttctgcctcaggcatgtggtcggttaacaacacggcatagcaaaatgacacaacttttcaggtcctagttgtctcgataccatgctcatgatcagttatgatgcttttgtaatgtaagaagtaggaggtcgcgatgcttcttggtgctaaagcaatccgcagaccaatactattctagtagtccttcaacttaaagctatgacaagcaatttaagattgtcgtgactatcgaggtgaacagatgctgacgatacacattgcaagcatctagaatgagcagaggatttcttatagagggtgaaagcgtggtcgtggtcgatagcgtggcactactatcatcgtggtttgttctgccgcatcgcgtcccaggggccaacatgagcagacgttgagcaacacccatagcaacctacctactgttgtttatttccctctttcttcctcatatgtaccactttggccttggcacattagtttacgccctgtaatcattgttgcttggcgtgcgcgtcactaccttcctacctgtttcactatgtatctttc

SEQ ID NO: 33364 - DNA, 480 bp, Muscodor strobelii
  misc_feature: SGI cDNA ID NO. 571507
  misc_feature: Reduced expression when VOC is produced
  misc_feature: Encodes the peptide sequence at SEQ ID NO 33365
atggtggcggactcgggctacccatcccccatggacggcggctccaactacggcatgggctcgggctcgatgtctggcacccccggacctggaccgttcgcctcggccggagcgccgttcggggcttctggtggctatggccagcactttggcgggccccccagcacgtacgcactcccctcgggcatcggtggcggcgcggctccctacccgtccctcaacacgcatttcgggccagccccgggctctcactctgccgggcccttcgacagccgtgctgccgaggccgcgttccagtcggccggcaacggccccgcctccgccggccctgccaacaactccaacaacaacttctacgctggccaggccgagaacgaccccttcgcctttctttcctccggcatcggcagcctctccatgagcagcggcgatgcgcgccagaacggcggcggcgctcctcccagcaaatcgccggcttaa

SEQ ID NO: 33365 - protein, 159 aa, Muscodor strobelii
  misc_feature: SGI Peptide ID NO. 571507
  misc_feature (1)..(159): NCBI GI: 85100635 Blast Desc: NCU06684 [Neurospora crassa OR74A] gi|28922535|gb|EAA31763.1| conserved [Neurospora crassa OR74A] gi|28949923|emb|CAD70909.1| related to centractin (ARP1) crassa]
  misc_feature (1)..(159): NCBI GI: 156063312 Blast Desc: SS1G_01772 [Sclerotinia sclerotiorum 1980] gi|154697108|gb|EDN96846.1| SS1G_01772 [Sclerotinia sclerotiorum 1980]
  misc_feature (1)..(159): NCBI GI: 171694045 Blast Desc: protein product [Podospora anserina] gi|170946971|emb|CAP73775.1| protein product [Podospora anserina]
  misc_feature (1)..(159): NCBI GI: 116199179 Blast Desc: CHGG_07745 [Chaetomium globosum CBS 148.51] gi|88179024|gb|EAQ86492.1| CHGG_07745 [Chaetomium globosum CBS 148.51]
  misc_feature (1)..(159): NCBI GI: 154319349 Blast Desc: BC1G_02626 [Botryotinia fuckeliana B05.10] gi|150857057|gb|EDN32249.1| BC1G_02626 [Botryotinia fuckeliana B05.10]
  misc_feature (1)..(159): NCBI GI: 145612699 Blast Desc: conserved [Magnaporthe grisea 70-15] gi|145019838|gb|EDK04066.1| conserved [Magnaporthe grisea 70-15]
  misc_feature (1)..(159): NCBI GI: 256731392 Blast Desc: [Nectria haematococca mpVI 77-13-4]
  misc_feature (1)..(159): NCBI GI: 46124837 Blast Desc: FG06796.1 [Gibberella zeae PH-1]
  misc_feature (1)..(159): NCBI GI: 238502715 Blast Desc: RNA binding protein (Arp), [Aspergillus flavus NRRL3357] gi|220691401|gb|EED47749.1| RNA binding protein (Arp), [Aspergillus flavus NRRL3357]
  misc_feature (1)..(159): NCBI GI: 261202824 Blast Desc: RNA binding protein [Ajellomyces dermatitidis SLH14081] gi|239590723|gb|EEQ73304.1| RNA binding protein [Ajellomyces dermatitidis SLH14081] gi|239612439|gb|EEQ89426.1|
  misc_feature: Useful for introducing or modulating the production of volatile compounds
MVADSGYPSPMDGGSNYGMGSGSMSGTPGPGPFASAGAPFGASGGYGQHFGGPPSTYALPSGIGGGAAPYPSLNTHFGPAPGSHSAGPFDSRAAEAAFQSAGNGPASAGPANNSNNNFYAGQAENDPFAFLSSGIGSLSMSSGDARQNGGGAPPSKSPA

SEQ ID NO: 33366 - DNA, 1698 bp, Muscodor strobelii
  misc_feature: SGI EST ID NO. CUFF.78806.0
  misc_feature: Variant of the nucleotide sequence at SEQ ID NO 33364
caacgaggtctgcggctaccacaacttcgccaagaacgtctgctgtctgcggtgcggctcgagccgggccggcgcagctatggtggcggactcgggctacccatcccccatggacggcggctccaactacggcatgggctcgggctcgatgtctggcacccccggacctggaccgttcgcctcggccggagcgccgttcggggcttctggtggctatggccagcactttggcgggccccccagcacgtacgcactcccctcgggcatcggtggcggcgcggctccctacccgtccctcaacacgcatttcgggccagccccgggctctcactctgccgggcccttcgacagccgtgctgccgaggccgcgttccagtcggccggcaacggccccgcctccgccggccctgccaacaactccaacaacaacttctacgctggccaggccgagaacgaccccttcgcctttctttcctccggcatcggcagcctctccatgagcagcggcgatgcgcgccagaacggcggcggcgctcctcccagcaaatcgccggcttaatcgcctctttccacactcttcctcgaacgatacagggtcatgccgacatgggcaacgcggatgggcatgtgcaccgatcatcaacgggctgtctggacgaaccaccaaaattcaacttcccatggaatgtttcggacggagttggaaagacaaaaaaagggtgccctcgacttctttccgacctctggcggccggagaggggctgttgggtagccgggccggggcgcgaccggcttgtttctttgtgcatctttgaccacggtcacctggcattactactacttacaccagcaccacatcacttctacctagacgggcagacggacatacttgtacatggatgaaaattggcaccagggacacggacttgcaaggcggcatagcgcacaggagtgaacgggggttgtatttgggtcggtgtctgatcttcccaggctcacatgtcgagttattgcatctcgtttcttctatcatggcaaacttgttttttttctccctccttccaccctccacgcctcccacccccaccgatctctccatctctcgccctcttcgccaccatgtctctgttacctagtcacttgtttgttttctgataccgttacggtcattgttgttattggtcttctattcgacatgtcatcctccaccgccctgttccgcatttctcatgtccttcgtaaagatagtcacaacgggttggcgaggcgaggcttcaaatctaaaaataggccctggatcggagggatggtttgtggagtccggggcaggttgcggctggctagctatcgatggctctggatgaaattgatggtagtgcgttccggctcttttttcttggcttcgagcctttcctctctatttccttgagcttcggaacttgtacaatgctctccaagagtgtggatcgaggcaccgctctcggcctacgcttgcccaacacgcggtttggcgcacatgagtgcgtcacggacgagagtaggatccggctcagcataaagccgagattgggacacgcccattgcatatttgagatagtaaaaagcagaatagggagcatttgcaagaagcctgtcgcttttataccacttcgtctcattgactcgtgaaacgtgatctcgtgatgcaatgtgcttttg

SEQ ID NO: 33367 - DNA, 1134 bp, Muscodor strobelii
  misc_feature: SGI cDNA ID NO. 571509
  misc_feature: Reduced expression when VOC is produced
  misc_feature: Encodes the peptide sequence at SEQ ID NO 33368
cgcttcgtcgccctgtcccgaaagctcggcttccagcccaaccagagcacctacctgctgcagctcgactaccgcatccgcgccggcgacgtcgagggcgcctacgctgcctaccaggccctgcagacgctcgaggccgccgccagccccggcaaggaggtgcccgtgctcaaccggctcatccgcgtgctgtgcgccgcgccgcagccgcactacgaccgcatcctcgaggtcaccgactcgctggagcaccgccacgtgacgctggagcccgagacggtcgtcgccctgtgcacggccttcctcaagaacgacgagaccttcgaggtcatggacacgctgtcgctgcacacggcccactacagcgtcggcgagcgcggcatggtgcgcagggcctttgtcgactactgcctagacccccggaacagcacggcgcgcgtgtgggacggctacgccctgctgcgccagttcttccccgaggtcgagcgggaggcgcgcgaggccgtcatggacgccttcttcgagcggcggcgcgccgacatggcctgccacgtcttcggccacatgcgctcgcacgacagccccgacgtgcggccggcggcgtcgacatgggacacggcggtgcagatggacacgcggctgtacaacgccctgatgatcggctacgtggcctgcgacctgccggaccgggcgctggacttctggaaggagatcacgtcgtcgcccgagggcccgtcgtacgcgacgctcgagatcgtcttccggctgtacgaggtgcagccgtacgcggacgaggcggcgcgggagttgtgggccaagatgcagaagatggagatcgaggtgacggagcccgtgtacacggcctacgcggcggcgctggcggcccacagccacctgcccgacgtccagctgctcctcgacgacgtagagaccgtcctggggtgtcgtcccagcgtgcacactctgtcgtgcgtgtacaacgcgttgccgaaccgggagatgaagaacgagttcgagcagtgggtgatgcaggtgttcgcccccgaggggcaagcgacgttccagaagcggcggcggcgcagggatgcgaacgggctgccgcagttcaaggtgaagcggccgtggaaggcctga

SEQ ID NO: 33368 - protein, 377 aa, Muscodor strobelii
  misc_feature: SGI Peptide ID NO. 571509
  misc_feature (1)..(365): NCBI GI: 116180094 Blast Desc: CHGG_00675 [Chaetomium globosum CBS 148.51] gi|88184972|gb|EAQ92440.1| CHGG_00675 [Chaetomium globosum CBS 148.51]
  misc_feature (1)..(377): NCBI GI: 171692013 Blast Desc: protein product [Podospora anserina] gi|170945955|emb|CAP72756.1| protein product [Podospora anserina]
  misc_feature (1)..(377): NCBI GI: 261352038 Blast Desc: complex I intermediate-associated protein [Verticillium albo-atrum VaMs.102]
  misc_feature (1)..(349): NCBI GI: 154302473 Blast Desc: BC1G_09813 [Botryotinia fuckeliana B05.10] gi|150855302|gb|EDN30494.1| BC1G_09813 [Botryotinia fuckeliana B05.10]
  misc_feature (1)..(377): NCBI GI: 67476944 Blast Desc: CIA84_NEUCR RecName: Full=Complex I intermediate-associated protein 84, mitochondrial; Flags: Precursor gi|28950075|emb|CAD70828.1| complex I protein CIA84
  misc_feature (1)..(377): NCBI GI: 2661428 Blast Desc: complex I intermediate associated protein CIA84 [Neurospora crassa]
  misc_feature (14)..(377): NCBI GI: 256732215 Blast Desc: NECHADRAFT_40969 [Nectria haematococca mpVI 77-13-4]
  misc_feature (20)..(346): NCBI GI: 145607361 Blast Desc: MGG_04199 [Magnaporthe grisea 70-15] gi|145014937|gb|EDJ99505.1| MGG_04199 [Magnaporthe grisea 70-15]
  misc_feature (2)..(377): NCBI GI: 46137403 Blast Desc: FG10217.1 [Gibberella zeae PH-1]
  misc_feature (1)..(349): NCBI GI: 156055330 Blast Desc: SS1G_05016 [Sclerotinia sclerotiorum 1980] gi|154702801|gb|EDO02540.1| SS1G_05016 [Sclerotinia sclerotiorum 1980]
  misc_feature: Useful for introducing or modulating the production of volatile compounds
RFVALSRKLGFQPNQSTYLLQLDYRIRAGDVEGAYAAYQALQTLEAAASPGKEVPVLNRLIRVLCAAPQPHYDRILEVTDSLEHRHVTLEPETVVALCTAFLKNDETFEVMDTLSLHTAHYSVGERGMVRRAFVDYCLDPRNSTARVWDGYALLRQFFPEVEREAREAVMDAFFERRRADMACHVFGHMRSHDSPDVRPAASTWDTAVQMDTRLYNALMIGYVACDLPDRALDFWKEITSSPEGPSYATLEIVFRLYEVQPYADEAARELWAKMQKMEIEVTEPVYTAYAAALAAHSHLPDVQLLLDDVETVLGCRPSVHTLSCVYNALPNREMKNEFEQWVMQVFAPEGQATFQKRRRRRDANGLPQFKVKRPWKA

SEQ ID NO: 33369 - DNA, 1850 bp, Muscodor strobelii
  misc_feature: SGI EST ID NO. CUFF.78810.0
  misc_feature: Variant of the nucleotide sequence at SEQ ID NO 33367
gcgcttcgtcgccctgtcccgaaagctcggcttccagcccaaccagagcacctacctgctgcagctcgactaccgcatccgcgccggcgacgtcgagggcgcctacgctgcctaccaggccctgcagacgctcgaggccgccgccagccccggcaaggaggtgcccgtgctcaaccggctcatccgcgtgctgtgcgccgcgccgcagccgcactacgaccgcatcctcgaggtcaccgactcgctggagcaccgccacgtgacgctggagcccgagacggtcgtcgccctgtgcacggccttcctcaagaacgacgagaccttcgaggtcatggacacgctgtcgctgcacacggcccactacagcgtcggcgagcgcggcatggtgcgcagggcctttgtcgactactgcctagacccccggaacagcacggcgcgcgtgtgggacggctacgccctgctgcgccagttcttccccgaggtcgagcgggaggcgcgcgaggccgtcatggacgccttcttcgagcggcggcgcgccgacatggcctgccacgtcttcggccacatgcgctcgcacgacagccccgacgtgcggccggcggcgtcgacgtacgtgcggtgcttcgagggcatcgggcagtgcgcggacgaggagagcctgcggatgatccacaacatgctcaagatgggacacggcggtgcagatggacacgcggctgtacaacgccctgatgatcggctacgtggcctgcgacctgccggaccgggcgctggacttctggaaggagatcacgtcgtcgcccgagggcccgtcgtacgcgacgctcgagatcgtcttccggctgtacgaggtgcagccgtacgcggacgaggcggcgcgggagttgtgggccaagatgcagaagatggagatcgaggtgacggagcccgtgtacacggcctacgcggcggcgctggcggcccacagccacctgcccgacgtccagctgctcctcgacgacgtagagaccgtcctggggtgtcgtcccagcgtgcacactctgtcgtgcgtgtacaacgcgttgccgaaccgggagatgaagaacgagttcgagcagtgggtgatgcaggtgttcgcccccgaggggcaagcgacgttccagaagcggcggcggcgcagggatgcgaacgggctgccgcagttcaaggtgaagcggccgtggaaggcctgatgatgtgtgattgtattatcttgtaaaccatctaagtgcatatactcgcaaagcaccctgtatcataacaccgtcccggtctacattcggttggagagggtgtagggagggtcatactatctatcctttggcgtagctgccgctgtcggtgctgctcctatctgtctatctaactgtacataatcatgacatctacatatatacatctatatatgcatggatgcttttggacatagaaaacacaaacacgcagcatacatagggatatatattgtacattgcagccaatggccaaacccatgtgtgaagatgaatgctctgttgttgcccaccccacaggcaagacgttctcgtacactctacaatatacgcaaatgcacactctcacagttcatacgccatgtgtgccttactcttctttctcctttctccttcctcttttctcctccccttcccccttgccccgggttggtctctttccctggccgctcgctcagaggctggagtagttggtgcggaccctgtccttggcgtaggggggcgcggggacgttggggacgagggcggcgcggtcgggcccgcggaccatcatctcggggtggcggtggacggaggggtgcaggccggtgccgatggcgc

SEQ ID NO: 33370 - DNA, 909 bp, Muscodor strobelii
  misc_feature: SGI cDNA ID NO. 571510
  misc_feature: Encodes the peptide sequence at SEQ ID NO 33371
atgcattctcaaactggtctcttgttggccgccttcttgggcttaggaactgcaacttcggtgatccataatgacggggcagcaaaactttcgcgtcgtggtcttcccatattcgaatctagcagactcgagcggcgtggtgagcctgagacaggagacgacctcccggatgaccccgatcatcccaacatgctcgacaaagttgaaactgccttcaacgacgcgatcgaacttacttcatacgtcttaatgttcattgatacagacaatgatattcttccacactactttgatcccaatgatcgcacggagatcaagcggatcttccaagtaattaacaatggcgatcagggcagtgatatgctcagcgatattctagtccagtcaacggattcgaacaatttgtgcgacggaacgactctatcatatcttaaaaatggcgagaaagatgcaactgagacaccatacatcgttctttgccctaacgccttcaataagaaagccgtcacagccttgaatggtaaagatccttcagacgatgacgcacatgacttctacgctgcatgcaagcaggatggtggtgatatcgataacaatgtgagctatttattcaatacacttggcatgacacttctccacgagtacatgcactatgacaagatgatcgactcttctttcggttccattaccgacaatccgaatggctcaccaggatacggccctgtcaatgtttacgacaatcttgataagtcgttggctcgaatcaacgcggacagctacgcctactatgcttcacaagtcctttggacagttttatgcaaaacagatggcgatttcgaagcgcctcgcccgggaacagacgacaacgacccagattgtggtggaaacgcatgcaccccgaatccatga

SEQ ID NO: 33371 - protein, 302 aa, Muscodor strobelii
  misc_feature: SGI Peptide ID NO. 571510
  misc_feature (1)..(298): NCBI GI: 171679293 Blast Desc: protein product [Podospora anserina] gi|170939272|emb|CAP64500.1| protein product [Podospora anserina]
  misc_feature (121)..(298): NCBI GI: 171683091 Blast Desc: protein product [Podospora anserina] gi|170941505|emb|CAP67157.1| protein product [Podospora anserina]
  misc_feature (67)..(282): NCBI GI: 256726583 Blast Desc: [Nectria haematococca mpVI 77-13-4]
MHSQTGLLLAAFLGLGTATSVIHNDGAAKLSRRGLPIFESSRLERRGEPETGDDLPDDPDHPNMLDKVETAFNDAIELTSYVLMFIDTDNDILPHYFDPNDRTEIKRIFQVINNGDQGSDMLSDILVQSTDSNNLCDGTTLSYLKNGEKDATETPYIVLCPNAFNKKAVTALNGKDPSDDDAHDFYAACKQDGGDIDNNVSYLFNTLGMTLLHEYMHYDKMIDSSFGSITDNPNGSPGYGPVNVYDNLDKSLARINADSYAYYASQVLWTVLCKTDGDFEAPRPGTDDNDPDCGGNACTPNP

SEQ ID NO: 33372 - DNA, 247 bp, Muscodor strobelii
  misc_feature: SGI EST ID NO. CUFF.78813.0
  misc_feature: Variant of the nucleotide sequence at SEQ ID NO 33370
atgcaagcaggatggtggtgatatcgataacaatgtgagctatttattcaatacacttggcatgacacttctccacgagtacatgcactatgacaagatgatcgactcttcgtaagtatttctgctaagttcgacttgattgcgaggatgtctaaagttcgggtcccagtttcggttccattaccgacaatccgaatggctcaccaggatacggccctgtcaatgtttacgacaatcttgataagtc

SEQ ID NO: 33373 - DNA, 450 bp, Muscodor strobelii
  misc_feature: SGI cDNA ID NO. 571511
  misc_feature: Encodes the peptide sequence at SEQ ID NO 33374
atgatcgagtctgtacctagtcctcgagttgacattgaactctctttcgatcgtaacatcgcgagcccagcacccgataactctatatacctggcgatcgccgctggatccacaaagggcccttggttcgcgcgcggtggtggaggtatcaagccagacccacggtcagttgtggagcgcgggtgggagcgtgacgagtacggtaacgaacgcaagattcgacggtctactcaagctactggtattgacggtctagaacctggacacaagtactctgtcagactgaacatggaggccctgggagcatgctggtgggcccctgtaatcaaggacgacatacttgtggatggtagaggtgaagggtcttacctccaagactacccttggaatacagataagcctctagagtggtctgtcagcgacactacaatagagctgctagaagaatag

SEQ ID NO: 33374 - protein, 149 aa, Muscodor strobelii
  misc_feature: SGI Peptide ID NO. 571511
  misc_feature (2)..(148): NCBI GI: 171679295 Blast Desc: protein product [Podospora anserina] gi|170939273|emb|CAP64501.1| protein product [Podospora anserina]
  misc_feature (57)..(127): NCBI GI: 171683093 Blast Desc: protein product [Podospora anserina] gi|170941506|emb|CAP67158.1| protein product [Podospora anserina]
MIESVPSPRVDIELSFDRNIASPAPDNSIYLAIAAGSTKGPWFARGGGGIKPDPRSVVERGWERDEYGNERKIRRSTQATGIDGLEPGHKYSVRLNMEALGACWWAPVIKDDILVDGRGEGSYLQDYPWNTDKPLEWSVSDTTIELLEE

SEQ ID NO: 33375 - DNA, 2073 bp, Muscodor strobelii
  misc_feature: SGI cDNA ID NO. 571512
  misc_feature: Encodes the peptide sequence at SEQ ID NO 33376
atgtcggactaccctatttacgttggcgtgtggaccaactggtcggaggggcgcattctgggaacgcgaatcactcttgatcacgggtctgcgaatctcttgattgccttcgtggcattctatgctgatgattcgcagtacgtagcccttaattgcttacgaggagttgccggcattgtcaccgtcgtgacagacagcatctggaggatctctgctttcatcatgcataccgcctactccacgtcacgaccaagagatgcttttcatcatcaacgccaggttcttctgcgcaacagtgatggagcggggacggcgatggcaaagctacttgccctgctcgtagcttggagtggaaaggctaggaatctatacagccgcattataccgcttgttctctacataatatttctcattgccggatttgcccttgcagccggtttctcgtctagagtggcctcagatgaccaagttctggtctctagtccacactgtggctggctcgagctacctgataacctcagtgttgaagtcgtacaaggtgtagtagcaccattcctttctcaagatattgacgccgctgcaaactatgcccaacagtgctacttaacggcaacatccttatcaacactgagctgtgggactttcgtgcagacccgtatcaatacgactgccaatctaaatgcgccatgcccgttcaattcgaccgtgtgcaagagtcaagatgcaagcattgagcttgacaccggctatctcgatagccatacagcgttcgggcttaatgctccacagagccaaaggttcctcgttagaagacgaatgatgtgtgcgcctttgcgtactactgggttcagttccacgttcaaagattccctcaatcaaacttacacaacttacaattatggagagaatcttaatgaagcgggactcaactttacccacatgtaccgaaatggaacacagagcagtaatcagacgacattttctctatatacctctggcatcccagattacactctggccgtttataccgcagcattcgtcaatggtacgatagaagagaactattcgacttttaagccccgatctggtcttttcccagatgattcgaaaatcaatataatattcatatcaggaaacgatattattttcgaggaaccatccgaggacccatggataactgcaacagaacccgcaggaaccgtcacctttacgtttggttcaaatgaaaagcctgtatttcacttgaacgagccggcttcacctctggcgtgtgctgagcagtggcagttctgtaacctaaaccttccgcaggaaactggatgcactgcactaggaagtttttttgatgtggttgtatcggccccgtcactattcactgatcccgacgcggtagaaagactaaattggtttatttacatcagcgggcaggcggccgctttgacttccgtgattgttaacatggcgtctaacagcctcagggccaaaaaattgttaaactacggcatccaagccggacttgcggcaaatcaatggcagcaggaggtttcatattggcacgacatcatgatggctgactttcaaaggtggttcttgtatactgctgttggttctgacgatgagatcggacagtatattgcaggaccagcgacaaagattgagaggaccctttgtcacagtcagaaaatacggacgacgtctcatacctcttttagcctgttcgcgctcttattcattttcgtagtaggaggcttcataatagtcttatcctatgtaattgagccacttatgccgattatccaacgaatattccgcctaagcccatattcacgcctcgaatggaacacgaattctgctctccaacttcaccgtctagcgcatgaaggcctcggtccatataagtggactggaggtgcgaagcgtgtgccgatagttgatggtagtgtgacactagcgagtcttgatctctcagatgagcgacatccctgtctccaatctccgtttaagctccgagcacaagaaacgagatcaacatctaagggcatggaagtgacagagaaagaaaacctagcataa

SEQ ID NO: 33376 - protein, 690 aa, Muscodor strobelii
  misc_feature: SGI Peptide ID NO. 571512
  misc_feature (2)..(665): NCBI GI: 169615058 Blast Desc: SNOG_10683 [Phaeosphaeria nodorum SN15] gi|111060957|gb|EAT82077.1| SNOG_10683 [Phaeosphaeria nodorum SN15]
  misc_feature (3)..(671): NCBI GI: 189194015 Blast Desc: conserved [Pyrenophora tritici-repentis Pt-1C-BFP] gi|187978910|gb|EDU45536.1| conserved [Pyrenophora tritici-repentis Pt-1C-BFP]
  misc_feature (6)..(630): NCBI GI: 169772941 Blast Desc: [Aspergillus oryzae RIB40] gi|83768800|dbj|BAE58937.1| protein product [Aspergillus oryzae]
  misc_feature (2)..(645): NCBI GI: 119474227 Blast Desc: NFIA_004500 [Neosartorya fischeri NRRL 181] gi|119407142|gb|EAW17092.1| conserved [Neosartorya fischeri NRRL 181]
  misc_feature (2)..(683): NCBI GI: 115399382 Blast Desc: [Aspergillus terreus NIH2624] gi|114192163|gb|EAU33863.1| [Aspergillus terreus NIH2624]
  misc_feature (2)..(661): NCBI GI: 70986226 Blast Desc: conserved [Aspergillus fumigatus Af293] gi|66846236|gb|EAL86569.1| conserved [Aspergillus fumigatus Af293]
  misc_feature (2)..(661): NCBI GI: 159128250 Blast Desc: conserved [Aspergillus fumigatus A1163]
  misc_feature (1)..(630): NCBI GI: 121699395 Blast Desc: ACLA_082720 [Aspergillus clavatus NRRL 1] gi|119396149|gb|EAW06581.1| ACLA_082720 [Aspergillus clavatus NRRL 1]
  misc_feature (6)..(630): NCBI GI: 169618215 Blast Desc: SNOG_12297 [Phaeosphaeria nodorum SN15] gi|160703576|gb|EAT80110.2| SNOG_12297 [Phaeosphaeria nodorum SN15]
  misc_feature (6)..(666): NCBI GI: 256723662 Blast Desc: NECHADRAFT_86728 [Nectria haematococca mpVI 77-13-4]
MSDYPIYVGVWTNWSEGRILGTRITLDHGSANLLIAFVAFYADDSQYVALNCLRGVAGIVTVVTDSIWRISAFIMHTAYSTSRPRDAFHHQRQVLLRNSDGAGTAMAKLLALLVAWSGKARNLYSRIIPLVLYIIFLIAGFALAAGFSSRVASDDQVLVSSPHCGWLELPDNLSVEVVQGVVAPFLSQDIDAAANYAQQCYLTATSLSTLSCGTFVQTRINTTANLNAPCPFNSTVCKSQDASIELDTGYLDSHTAFGLNAPQSQRFLVRRRMMCAPLRTTGFSSTFKDSLNQTYTTYNYGENLNEAGLNFTHMYRNGTQSSNQTTFSLYTSGIPDYTLAVYTAAFVNGTIEENYSTFKPRSGLFPDDSKINIIFISGNDIIFEEPSEDPWITATEPAGTVTFTFGSNEKPVFHLNEPASPLACAEQWQFCNLNLPQETGCTALGSFFDVVVSAPSLFTDPDAVERLNWFIYISGQAAALTSVIVNMASNSLRAKKLLNYGIQAGLAANQWQQEVSYWHDIMMADFQRWFLYTAVGSDDEIGQYIAGPATKIERTLCHSQKIRTTSHTSFSLFALLFIFVVGGFIIVLSYVIEPLMPIIQRIFRLSPYSRLEWNTNSALQLHRLAHEGLGPYKWTGGAKRVPIVDGSVTLASLDLSDERHPCLQSPFKLRAQETRSTSKGMEVTEKENLA

SEQ ID NO: 33377 - DNA, 2342 bp, Muscodor strobelii
  misc_feature: SGI EST ID NO. CUFF.78822.0
  misc_feature: Variant of the nucleotide sequence at SEQ ID NO 33375
ccggatttgcccttgcagccggtttctcgtctagagtggcctcagatgaccaagttctggtctctagtccacactgtggctggctcgagctacctgataacctcagtgttgaagtcgtacaaggtgtagtagcaccattcctttctcaagatattgacgccgctgcaaactatgcccaacagtgctacttaacggcaacatccttatcaacactgagctgtgggactttcgtgcagacccgtatcaatacgactgccaatctaaatgcgccatgcccgttcaattcgaccgtgtgcaagagtcaagatgcaagcattgagcttgacaccggctatctcgatagccatacagcgttcgggcttaatgctccacagagccaaaggttcctcgttagaagacgaatgatgtgtgcgcctttgcgtactactgggttcagttccacgttcaaagattccctcaatcaaacttacacaacttacaattatggagagaatcttaatgaagcgggactcaactttacccacatgtaccgaaatggaacacagagcagtaatcagacgacattttctctatatacctctggcatcccagattacactctggccgtttataccgcagcattcgtcaatggtacgatagaagagaactattcgacttttaagccccgatctggtcttttcccagatgattcgaaaatcaatataatattcatatcaggaaacgatattattttcgaggaaccatccgaggacccatggataactgcaacagaacccgcaggaaccgtcacctttacgtttggttcaaatgaaaagcctgtatttcacttgaacgagccggcttcacctctggcgtgtgctgagcagtggcagttctgtaacctaaaccttccgcaggaaactggatgcactgcactaggaagtttttttgatgtggttgtatcggccccgtcactattcactgatcccgacgcggtagaaagactaaattggtttatttacatcagcgggcaggcggccgctttgacttccgtgattgttaacatggcgtctaacagcctcagggccaaaaaattgttaaactacggcatccaagccggacttgcggcaaatcaatggcagcaggaggtttcatattggcacgacatcatgatggctgactttcaaaggtggttcttgtatactgctgttggttctgacgatgagatcggacagtatattgcaggaccagcgacaaagattgagaggaccctttgtcacagtcagaaaatacggacgacgtctcatacctcttttagcctgttcgcgctcttattcattttcgtagtaggaggcttcataatagtcttatcctatgtaattgagccacttatgccgattatccaacgaatattccgcctaagcccatattcacgcctcgaatggaacacgaattctgctctccaacttcaccgtctagcgcatgaaggcctcggtccatataagtggactggaggtgcgaagcgtgtgccgatagttgatggtagtgtgacactagcgagtcttgatctctcagatgagcgacatccctgtctccaatctccgtttaagctccgagcacaagaaacgagatcaacatctaagggcatggaagtgacagagaaagaaaacctagcataacacgtgagatgcagtatagcttacccatctatagcacgtagctagtctccactctcaagtcatttatcagtccaagaccgagagctgcatttgatgtgagagaaacacatagtttataggtgttcgatggttgatgttgtcctgaagtaagagcaggagggatgaggaagtcaatcagaagtacggctgggttggaatcatctacgtctatccctaatatcgtgttggcctatcgatgatgtttttacggatcattattagaacaacatgctaaagactatatagccattcgttactggtacacctagtgcacttctacgtaagaagaaagcctgggagtcattacactagcaatgattgatgcgatattctgagaatactattatctattcttctagcagctctattgtagtgtcgctgacagaccactctagaggcttatctgtattccaagggtagtcttggaggtaagacccttcacctctaccatccacaagtatgtcgtccttgattacaggggcccaccagcatgctcccagggcctccatgttcagtctgacagagtacttgtgtccaggttctagaccgtcaataccagtagcttgagtagaccgtcgaatcttgcgttcgttaccgtactcgtcacgctcccacccgcgctccacaactgaccgtgggtctggc

SEQ ID NO: 33378 - DNA, 1617 bp, Muscodor strobelii
  misc_feature: SGI cDNA ID NO. 571513
  misc_feature: Elevated expression when VOC is produced
  misc_feature: Encodes the peptide sequence at SEQ ID NO 33379
atgtatcaggccagcaatgtctacttcatctgcggctttgccgccattggcggcggcctctttggctttgacatcagctccatgagcggtgtcctcggcactcaggcctacaagcgatactttcacaaccccgtctcctaccagcagggtggcatcactgcttccatgcctgctggttctctcgtcggctcgctcgccagctccttcattgccgatcgtttctctcgcaaggttgctcttcaagtttcctgtattctctggatcattggttccatcatccaagctgcatctaccaatgtaggtacgctctgtgccggtcgcgtcatcgccggtctctgcgtcggcatcgcctcctccattgtccctgtctaccagtccgagattgctcccaaggagatccgtggccgcgtcgtatccttccagcaatgggccatcacctggggcatcttgatccagtatttcatccagtacggcgccgcccaggtcggtggagggcccgacgatccgaaccaacccacgtcggccttccgcatcccctgggccgtacagatcgtccctgctgtcattctgttcctgggtctcttcttcttcccttacagcccccgctggttggccgctcatgatcgctgggaggaggccatgcaggtcctggctaagcttcatggcaatggcgacgtcaataatcccaaggtgctggccgagtacaaggagatcgaggaagctctgcgcttcgagcgcgaggaggcagtgtccagcttcaaagctcttggtcagccgcgcatcttcaagcgggtcatcttgggcatgagtatccagatgtggtcgcagctatcgggaatgaacatcatgatgtactatatcgtctacattatggagggcgctcaaatcgcatcgcccctgaccacagcctcgattcagtacgtcatcaatgtcgccttgactctgcctgctatcctctatctcgacaagatcggtcgccgacctgccctgatctttggagccttcttcatgatggtctggcttttcacttccggcgcactccaagccgtatatggcatgcccaacgacggctcgggcagcaccgacatcacctggattgtgaagggccatcctgacgcatccaaggcaatcgtggccgtctcatacctcttcgtcgccacctttgctacgacttggggtcccacatcctggacttaccccgccgagatcttccccagcaaagtgcgtgccaaggctgtctcgcttgctacagcagccaattggttctggaacatgattctcgcctttgctgtcccacctctgctctggtccatcaactggaagatgtacatgatctttgcgaccttcaacgggctggccttcatccacatgacccttatggcgcccgagaccaaagggtacactctggaagagatggatgaggtctttgactcaggccgtcccgcctggaagacggtcaagaagactagtcgacttgatgagcttacccgcgacatcgagcagggcaatgtcaaggtgacggcgccctaccgtggagcggctgctgatgtggaggaaccagagcccgttggagaacccgcttctcgcgctgatgaggagaagaaatccgaagcttga

SEQ ID NO: 33379 - protein, 538 aa, Muscodor strobelii
  misc_feature: SGI Peptide ID NO. 571513
  misc_feature (7)..(428): Pfam Id: PF07690 Pfam Desc: Major Facilitator Superfamily
  misc_feature (10)..(476): Pfam Id: PF00083 Pfam Desc: Sugar (and other) transporter
  misc_feature (1)..(519): NCBI GI: 171678076 Blast Desc: protein product [Podospora anserina] gi|170937107|emb|CAP61765.1| protein product [Podospora anserina]
  misc_feature (1)..(521): NCBI GI: 256733338 Blast Desc: NECHADRAFT_36715 [Nectria haematococca mpVI 77-13-4]
  misc_feature (3)..(518): NCBI GI: 189204670 Blast Desc: high affinity glucose transporter [Pyrenophora tritici-repentis Pt-1C-BFP] gi|187985769|gb|EDU51257.1| high affinity glucose transporter [Pyrenophora tritici-repentis
  misc_feature (16)..(477): NCBI GI: 154308362 Blast Desc: BC1G_08241 [Botryotinia fuckeliana B05.10] gi|150852782|gb|EDN27974.1| BC1G_08241 [Botryotinia fuckeliana B05.10]
  misc_feature (6)..(518): NCBI GI: 169609913 Blast Desc: SNOG_08048 [Phaeosphaeria nodorum SN15] gi|160701943|gb|EAT84324.2| SNOG_08048 [Phaeosphaeria nodorum SN15]
  misc_feature (1)..(508): NCBI GI: 121706132 Blast Desc: MFS glucose transporter, [Aspergillus clavatus NRRL 1] gi|119399475|gb|EAW09903.1| MFS glucose transporter, [Aspergillus clavatus NRRL 1]
  misc_feature (1)..(521): NCBI GI: 169766978 Blast Desc: [Aspergillus oryzae RIB40] gi|238483785|ref|XP_002373131.1| MFS glucose transporter, [Aspergillus flavus NRRL3357] gi|83765815|dbj|BAE55958.1| protein
  misc_feature (1)..(508): NCBI GI: 119490588 Blast Desc: MFS glucose transporter, [Neosartorya fischeri NRRL 181] gi|119411208|gb|EAW21151.1| MFS glucose transporter, [Neosartorya fischeri NRRL 181]
  misc_feature (6)..(508): NCBI GI: 70998973 Blast Desc: MFS glucose transporter [Aspergillus fumigatus Af293] gi|66851845|gb|EAL92170.1| MFS glucose transporter, [Aspergillus fumigatus Af293] gi|159127226|gb|EDP52341.1| MFS glucose A1163]
  misc_feature (3)..(521): NCBI GI: 67541506 Blast Desc: AN6923.2 [Aspergillus nidulans FGSC A4] gi|28475243|emb|CAD59636.1| high-affinity hexose transporter [Emericella nidulans] gi|40738488|gb|EAA57678.1| AN6923.2 FGSC ;
  misc_feature: Useful for introducing or modulating the production of volatile compounds
MYQASNVYFICGFAAIGGGLFGFDISSMSGVLGTQAYKRYFHNPVSYQQGGITASMPAGSLVGSLASSFIADRFSRKVALQVSCILWIIGSIIQAASTNVGTLCAGRVIAGLCVGIASSIVPVYQSEIAPKEIRGRVVSFQQWAITWGILIQYFIQYGAAQVGGGPDDPNQPTSAFRIPWAVQIVPAVILFLGLFFFPYSPRWLAAHDRWEEAMQVLAKLHGNGDVNNPKVLAEYKEIEEALRFEREEAVSSFKALGQPRIFKRVILGMSIQMWSQLSGMNIMMYYIVYIMEGAQIASPLTTASIQYVINVALTLPAILYLDKIGRRPALIFGAFFMMVWLFTSGALQAVYGMPNDGSGSTDITWIVKGHPDASKAIVAVSYLFVATFATTWGPTSWTYPAEIFPSKVRAKAVSLATAANWFWNMILAFAVPPLLWSINWKMYMIFATFNGLAFIHMTLMAPETKGYTLEEMDEVFDSGRPAWKTVKKTSRLDELTRDIEQGNVKVTAPYRGAAADVEEPEPVGEPASRADEEKKSEA

SEQ ID NO: 33380 - DNA, 2416 bp, Muscodor strobelii
  misc_feature: SGI EST ID NO. CUFF.78849.1
  misc_feature: Variant of the nucleotide sequence at SEQ ID NO 33378
cgtcaacagccaacctacggccacctacactaccagattggcacctatctaagtccgcgcctctacatttcctagcggaatgtgtctgcactctgttatttgagctctcctcctatacgtacatagacaaacaattgatctcgtctgcgctcagagggagccaccgttacccgccatgtatcaggccagcaatgtctacttcatctgcggctttgccgccattggtatgctttcgctcaatctttcaacagctacccttccaatcgcgcgctgcaaaaccgtcttgaatccacgttactaacatgctcactatcaggcggcggcctctttggctttgacatcagctccatgagcggtgtcctcggcactcaggcctacaagcgatactttcacaaccccgtctcctaccagcagggtggcatcactgcttccatgcctgctggttctctcgtcggtgagtaccctacgccgcgtttatctctcgaatgagatatgttgaggatcatttctttcttgcttaacatgctgtcctgctttcttcttcatttcctgtgtcaatgtcttccatgtcttgaatgtccattcattcttctgtctcctcatattcctgcttctaggctcgctcgccagctccttcattgccgatcgtttctctcgcaaggttgctcttcaagtttcctgtattctctggatcattggttccatcatccaagctgcatctaccaatgtaggtacgctctgtgccggtcgcgtcatcgccggtctctgcgtcggcatcgcctcctccattgtccctgtctaccagtccgagattgctcccaaggagatccgtggccgcgtcgtatccttccagcaatgggccatcacctggggcatcttgatccagtatttcatccagtacggcgccgcccaggtcggtggagggcccgacgatccgaaccaacccacgtcggccttccgcatcccctgggccgtacagatcgtccctgctgtcattctgttcctgggtctcttcttcttcccttacagcccccgctggttggccgctcatgatcgctgggaggaggccatgcaggtcctggctaagcttcatggcaatggcgacgtcaataatcccaaggtgctggccgagtacaaggagatcgaggaagctctgcgcttcgagcgcgaggaggcagtgtccagcttcaaagctcttggtcagccgcgcatcttcaagcgggtcatcttgggcatgagtatccagatgtggtcgcagctatcgggaatgaacatcatgatgtactatatcgtctacattatggagggcgctcaaatcgcatcgcccctgaccacagcctcgattcagtacgtcatcaatgtcgccttgactctgcctgctatcctctatctcgacaagatcggtcgccgacctgccctgatctttggagccttcttcatgatggtctggcttttcacttccggcgcactccaagccgtatatggcatgcccaacgacggctcgggcagcaccgacatcacctggattgtgaagggccatcctgacgcatccaaggcaatcgtggccgtctcatacctcttcgtcgccacctttgctacgacttggggtcccacatcctggacttaccccgccgagatcttccccagcaaagtgcgtgccaaggctgtctcgcttgctacagcagccaattggttctggaacatgattctcgcctttgctgtcccacctctgctctggtccatcaactggaagatgtacatgatctttgcgaccttcaacgggctggccttcatccacatgacccttatggcgcccgagaccaaagggtacactctggaagagatggatgaggtctttgactcaggccgtcccgcctggaagacggtcaagaagactagtcgacttgatgagcttacccgcgacatcgagcagggcaatgtcaaggtgacggcgccctaccgtggagcggctgctgatgtggaggaaccagagcccgttggagaacccgcttctcgcgctgatgaggagaagaaatccgaagcttgagtgtaacagataagggagtcaatcgccgctgtaggactgaggactccacagtctaggtgaagaatgagttgagtttgcatcgcattgcaaatacgcgacaagctagatctcaggcgactccgttgtaggcaatgctttcgtaaccggcatttcacaaacgggcgacacaacggttctcacgaagtttatgcaagaggtggcttgttctgtgcacgcttagtttacttgtcacgcagaaaagaagcagaaatatctcaattgactgtgttctactaattttcgtacttaaaccttgactaacgatgtgatgtacaagggatattaaggagcgtcgcgccatctcaagaatggaacaaactttgccgttca

SEQ ID NO: 33381 - DNA, 1707 bp, Muscodor strobelii
  misc_feature: SGI cDNA ID NO. 571514
  misc_feature: Reduced expression when VOC is produced
  misc_feature: Encodes the peptide sequence at SEQ ID NO 33382
atgcacctgatccgcaaggcccgcatcgacgccgaggctaagaagtcggctgccgtcgaggccggggacgacttcatctcgtgcgacctcagcgacgacgacacaagacccaagttggcaaggcccagcggtgctactaacggcaagactaacgtccagactgaccaagcctctactacagttgaatcacgagcacgagaggaagagaacgataccacaaatccgcagcaacagcaacagcacgcttcggctcctgcatcctcgatatcgatgccctcgcacatgtcctttgctttgccgcccaaaccacctgtctcggtgcaacagacgccgtcccagcctgtgcttcaccccgccagtagaatccaacccccgcagcctcgacctcccctgccgcaggccaagagcactgcgactgttaccaccgccagtcagccgaaacagaagaagaagcccgtcccggtcgatctgacgccttcggacagcctaggtagccgcaagcgaaacatcgacgacgagatcaagctgccccattccaccctcaagaaggtcaacagaaacgccccctccggcgagatcacgtcgccttggaacgacgtcaagggcattaccaacacctgcccctggatcattgccgaccattctaccacggccaacatgggcctccgcttacataaggaactcgtcgacttctacgaatacgtgcgcccccgtgactttgaggagcgggtccgcaacgacatggtcgacaacctgcgaaagctcatccgcatgaagctgcccgagtctgtcgtgctcccctttggttctttcatgtccggactctacctgcccaacgccgacatggacatcgccgtgtgctcgtccttcttcctcaacgggaagcacgcggtctatgacaagaagagcaccttctgggctctcaagggccatctcgaaaggcacaagatcgcctaccagggccagatcgagcccgtggccaaggccaaggtcccccttctcaagtacactgacaaccacaccgccctgagagtagacatttccttcgagaagcttgacggccacagagccatcgacaccttcatcaagtggaagaagcagtacccggccatgcccgtcttggtggcctttgtgaagcagttcctccagatgcgcggactcaacgagcccgtcaacggcggcattggtggcttctctgttatttgcatggtcgtccacctcttacagtctatgcctcaggtccagagcggagccatgaagcctgaggatcacatgggtgagattctgatggaattcctcgactactacggtaaccgcttccagtacgagaccgtcgccatctgcctcgatccgccgcgtctcgtaaacaaaagcaaggcgactagtatggtgtacaagaatctagaccgaatctccatcatcgatccgaacaacccggccaacgacatctcgggaggatcggctaacttcttctccgtcaagaagcgcttctctttagcataccgcactctccgcgatgacatggcgcgtcttgcaagacaagggccgcttaaccccaaggacaccttgctcggcccactgattggtggcaactacgcctccttcgagtatcaacgcaactacttagctaagatcgcaggtaaagatttccccgccactgaccccactgtgaccctagggacgacgtcgtctggtagcactcgataa

SEQ ID NO: 33382 - protein, 568 aa, Muscodor strobelii
  misc_feature: SGI Peptide ID NO. 571514
  misc_feature (134)..(545): NCBI GI: 39975561 Blast Desc: MGG_00073 [Magnaporthe grisea 70-15] gi|145019092|gb|EDK03371.1| MGG_00073 [Magnaporthe grisea 70-15]
  misc_feature (156)..(568): NCBI GI: 116201727 Blast Desc: CHGG_08748 [Chaetomium globosum CBS 148.51] gi|88177266|gb|EAQ84734.1| CHGG_08748 [Chaetomium globosum CBS 148.51]
  misc_feature (150)..(542): NCBI GI: 256733337 Blast Desc: NECHADRAFT_1558 [Nectria haematococca mpVI 77-13-4]
  misc_feature (3)..(542): NCBI GI: 261360619 Blast Desc: Poly(A) RNA polymerase cid14 [Verticillium albo-atrum VaMs.102]
  misc_feature (1)..(545): NCBI GI: 156057775 Blast Desc: SS1G_04619 [Sclerotinia sclerotiorum 1980] gi|154702404|gb|EDO02143.1| SS1G_04619 [Sclerotinia sclerotiorum 1980]
  misc_feature (149)..(552): NCBI GI: 85097984 Blast Desc: NCU05588 [Neurospora crassa OR74A] gi|28922043|gb|EAA31314.1| [Neurospora crassa OR74A]
  misc_feature (128)..(457): NCBI GI: 171678078 Blast Desc: protein product [Podospora anserina] gi|170937108|emb|CAP61766.1| protein product [Podospora anserina]
  misc_feature (1)..(471): NCBI GI: 154323524 Blast Desc: BC1G_00161 [Botryotinia fuckeliana B05.10] gi|150842390|gb|EDN17583.1| BC1G_00161 [Botryotinia fuckeliana B05.10]
  misc_feature (162)..(549): NCBI GI: 225681443 Blast Desc: polymerase sigma [Paracoccidioides brasiliensis Pb03]
  misc_feature (162)..(549): NCBI GI: 226288571 Blast Desc: conserved [Paracoccidioides brasiliensis Pb18]
  misc_feature (204)..(521): SWISSPROT Homolog: EC 2.7.7.19 Polynucleotide adenylyltransferase
  misc_feature: Useful for introducing or modulating the production of volatile compounds
MHLIRKARIDAEAKKSAAVEAGDDFISCDLSDDDTRPKLARPSGATNGKTNVQTDQASTTVESRAREEENDTTNPQQQQQHASAPASSISMPSHMSFALPPKPPVSVQQTPSQPVLHPASRIQPPQPRPPLPQAKSTATVTTASQPKQKKKPVPVDLTPSDSLGSRKRNIDDEIKLPHSTLKKVNRNAPSGEITSPWNDVKGITNTCPWIIADHSTTANMGLRLHKELVDFYEYVRPRDFEERVRNDMVDNLRKLIRMKLPESVVLPFGSFMSGLYLPNADMDIAVCSSFFLNGKHAVYDKKSTFWALKGHLERHKIAYQGQIEPVAKAKVPLLKYTDNHTALRVDISFEKLDGHRAIDTFIKWKKQYPAMPVLVAFVKQFLQMRGLNEPVNGGIGGFSVICMVVHLLQSMPQVQSGAMKPEDHMGEILMEFLDYYGNRFQYETVAICLDPPRLVNKSKATSMVYKNLDRISIIDPNNPANDISGGSANFFSVKKRFSLAYRTLRDDMARLARQGPLNPKDTLLGPLIGGNYASFEYQRNYLAKIAGKDFPATDPTVTLGTTSSGSTR

SEQ ID NO: 33383 - DNA, 2476 bp, Muscodor strobelii
  misc_feature: SGI EST ID NO. CUFF.78940.0
  misc_feature: Variant of the nucleotide sequence at SEQ ID NO 33381
gcacgcgcaagacgggcggcgccaagaacgtcatgcacctgatccgcaaggcccgcatcgacgccgaggctaagaagtcggctgccgtcgaggccggggacgacttcatctcgtgcgacctcagcgacgacgacacaagacccaagttggcaaggcccagcggtgctactaacggcaagactaacgtccagactgaccaagcctctactacagttgaatcacgagcacgagaggaagagaacgataccacaaatccgcagcaacagcaacagcacgcttcggctcctgcatcctcgatatcgatgccctcgcacatgtcctttgctttgccgcccaaaccacctgtctcggtgcaacagacgccgtcccagcctgtgcttcaccccgccagtagaatccaacccccgcagcctcgacctcccctgccgcaggccaagagcactgcgactgttaccaccgccagtcagccgaaacagaagaagaagcccgtcccggtcgatctgacgccttcggacagcctaggtagccgcaagcgaaacatcgacgacgagatcaagctgccccattccaccctcaagaaggtcaacagaaacgccccctccggcgagatcacgtcgccttggaacgacgtcaagggcattaccaacacctgcccctggatcattgccgaccattctaccacggccaacatgggcctccgcttacataaggaactcgtcgacttctacgaatacgtgcgcccccgtgactttgaggagcgggtccgcaacgacatggtcgacaacctgcgaaagctcatccgcatgaagctgcccgagtctgtcgtgctcccctttggttctttcatgtccggactctacctgcccaacgccgacatggacatcgccgtgtgctcgtccttcttcctcaacgggaagcacgcggtctatgacaagaagagcaccttctgggctctcaagggccatctcgaaaggcacaagatcgcctaccagggccagatcgagcccgtggccaaggccaaggtcccccttctcaagtacactgacaaccacaccgccctgagagtagacatttccttcgagaagcttgacggccacagagccatcgacaccttcatcaagtggaagaagcagtacccggccatgcccgtcttggtggcctttgtgaagcagttcctccagatgcgcggactcaacgagcccgtcaacggcggcattggtggcttctctgttatttgcatggtcgtccacctcttacagtctatgcctcaggtccagagcggagccatgaagcctgaggatcacatgggtgagattctgatggaattcctcgactactacggtaaccgcttccagtacgagaccgtcgccatctgcctcgatccgccgcgtctcgtaaacaaaagcaaggcgactagtatggtgtacaagaatctagaccgaatctccatcatcgatccgaacaacccggccaacgacatctcgggaggatcggctaacttcttctccgtcaagaagcgcttctctttagcataccgcactctccgcgatgacatggcgcgtcttgcaagacaagggccgcttaaccccaaggacaccttgctcggcccactgattggtggcaactacgcctccttcgagtatcaacgcaactacttagctaagatcgcaggtaaagatttccccgccactgaccccactgtgaccctagggacgacgtcgtctggtagcactcgataagtgtcttggtgtgtcaggtcttcgcggctcgtaggcggcaagtctatcaacagctgatcctcttccccgtacagcggaccctacctatcgtccaccacaaccccggatggtcaaatgactcccaatgtccagagggatgctggttcctcggctcctgatcctccgatcgagattgcgataatgtgtacaacaggacgttgacgatgatgagcagagcatagagagtatagaagaagacggaagagataccgtaaggtcggtggccatatgaggatcgaggcgttgagtctggttttgcccttcggagataccccattcctttctctttcctgttcctctttcctcccccaatagctttgacagtgagcttaacttatgggagcatgtagtatagtttgagcgaccaacagtgatggttgccctgatgtgtgtcagtccgcatccacgcgcatgatatcagatgcgttctctgccacactttccacgcccacgagatgtggtcagtgtagccaagtggcagaacaaaaaccaaaatacgatgtggctctgaggagtcgatttagcttatatagttcgcagcatccactagctttcgtgacgaactcattggaaacgatttgaaaaggcctcgatggtctctctactgatgtgccgcagattatttcttcatatctctcctctactcgcttgatgcagttgagaagatgaaatacgtcagactgcttggagtcggatcg

SEQ ID NO: 33384 - DNA, 3486 bp, Muscodor strobelii
  misc_feature: SGI cDNA ID NO. 571515
  misc_feature: Encodes the peptide sequence at SEQ ID NO 33385
aagaagtgcacgataactttagaccagtctgatgaggagccgcatctggccgtcattgaggattacattccatctaattcgcgagtctcatctggtctcgtcatagatgtgtgctttgcatcggcgaaggctgttcgtgtcggtaatctcgggtacttccacatcgttcaaggtacaactccttctctcggccctgtcgttgctctggcggagaccaacgcatcgaaggttgagattcttcccaaattggtcatgtccttggccgacatggaagacatcgatgtcaacgcttgcctaatcccatccatcgtggcgggtcttgtcgcacataccattgtatccggaactattccgggaaccacagtccttattttcgagcctcccgagctctgggcagctgctctgagacaccaagctgaggaaaacggcgtcgatattagatttgccagagtaaatgccgacagaggacagatgagcgcagattggatccagctccacgagaacgaatcgcctcgcaagttagaaggcaagatcccaagcaatctgtcgtcttactatgatttatctacaggaccaggctctagcgggatgggacagcgtctagtcacacatctaccccttggctcgtcatcccatgctttgggttatcttcttcaggatcgagttcggaccatttctacggcaaatggcccttcaattccacttatcctcgagcaggcacttgcagtctctagagggcagactgcaacctcacgaggatctctcgtccacgcgaatgagctttctaactccaagcggacactttcctcgggtgaaaccgtgcagtggaacacagcagaatccattcccgtcgcaactaggcctataagctcgggagtcctgttcgaagaaggtaagacgtacctgctagtcggactggcgggtgatcttggccgttccatcgctcgctggatgataaaccacggtgcacgccatgtcgtcctctcatctcggtcgcccaagatcgatcaacaatggcttgacgatattaaggaattgggcggtgacgtcatggtattgccaatggacgtctcgaatgcggaatccctcgatgcaggattagccaagattagagagtccatgccgccaatctccggcgtagccttcggtcctttggtcttgcaagatattctattcaagaatatggatcttgaaatgatggagatggtccttgcaccgaaagtgaaaggcgccttccttctcgacgatcggctttcccgggataaagaccatccactcgactttttcgtcatgttttcgtcatttgtcatggtctcaggaaacccaggacaagccgcgtacagtgctgccaatgcatacacgcatgccctcgccaacaagcgtcgtgcccgcggtgaagctgcatccacaatcgacatcggtgcagtgtatggtgtgggattcatcgccagagctggacgggaggaagagttcgacgtagtgaaattcatgttcgattccgtctccgagttagagctgcaggatttattcggcgaagctgtagtattcggtcggtcgccaggcacagacggcatcgaattagtcacaggcatgccctacatgaatcacgccgacaaagaccgcatcccttactatgatgaccctcgcctatcttggtacaggctccaggcaagcgaaaaggatgggagcggtgcggcatccgctcaaggatctgtgaaagatcagcttcatgctgctgcgacgatggatgaggtccggagtatcatcacagacgggctttcggacaaactccgatcagcgctgcagcttggcgctgaaggtgaagttagcttgactgtgccgttggtcgaccaaggtgtagactcattgagtgctgttactgtcggtggatggttctctaagaatctcaatatcgacattccgctcctcaaggtgctgggtggcgcagctatcactgatctggtggatgaagcattgtctcgtatacagcccagcctaatacccttggtgcaagggctagaaagcgcggagcccgcattagcagtaccttcgacagcgcccgtctcaggatggacaacaacggagagcagaacacccctagcttacgatacggagacgccaatctcgacgccctctgtagcctccgatgaagacttcaagcctagatccgaaaagctttccctaggtcaagagtactggtggaagctccaacagcttcagctcgactctacggcaatcaattccaccgtgggcatgtttttgaagggggcgattgatatgaaccggcttgctggtgcttttaacattgctcttcaacgaaacgatgcgtatcgcctcttctttgccagcgatgcagacggaatagtcaatcagaccgtagctcataccccagctatgcggttccaggcagtgccagtaccagatcgaaaagcggccgaggaagccttctggaatgttcataacaagaagtatgatcttgcaaagggcgaaacggtaaccatggttgacttcacgtggacgaatgtcgatcacctcctcattatcgcataccatcagctagtcggcgacggctggacgacggagaagctattcatcgaggtcggcgcactatacagcggtgcgagcttgcccagagcaacaagctatctagacttcgcgacccgacaaagacttcaatacgacaatggcgagatggcagtacacaccagctattggaagagtctttacaccactctgcctcccaggcttcccgccctgtcagcaccaggggcaactgtcaaggcggtagcggcacccaatttcaagcaacacgaggagagcgtgcgtcttaatccgatgatcgcgattcgcatccgcgaccgaagtcggaagctgaaggcgtcgccgatgcaattctacctcactgcattccagataatgctctcgcgcctttcgggcagcgcagatctcagcatcggtgtggccgatgcaaatcgatcaatcgaagaagacatggccaccatgggccattttgccaacctcttgcccgtgagactagcctactcagatgataagaccttcggcgaaacactagtcgtggtcaaagagcagatgcgcaatgccatgctgcactcgaatgtcccgtacggtgtgctatttgacagcctaaacttgtctgaggccgataaggcgctgccgccggtattccaagccgtcttcgattacaagcaaggccaggcggaatctggcaatattggcgacgcgcagatcgttgatacgcttattcggcgtgcggctactccttacgacattgtgctcgagatgtcagatgatccgaccaaggagccgttaattactattaagctacaagactcaaaatacgggcctgatgctgtaaaggtcgttttggacgcgtatctgtctgttttgtctgttttctctcgcaaccccgcgctccgggtcggcgagggtaaactagatcaagggcataaagccatcgctaaatag

SEQ ID NO: 33385 - protein, 1161 aa, Muscodor strobelii
  misc_feature: SGI Peptide ID NO. 571515
  misc_feature (299)..(466): Pfam Id: PF00106 Pfam Desc: short chain dehydrogenase
  misc_feature (728)..(1015): Pfam Id: PF00668 Pfam Desc: Condensation domain
  misc_feature (300)..(479): Pfam Id: PF08659 Pfam Desc: KR domain
  misc_feature (734)..(918): Pfam Id: PF00668 Pfam Desc: Condensation domain
  misc_feature (1)..(1160): NCBI GI: 121714671 Blast Desc: polyketide synthase, [Aspergillus clavatus NRRL 1] gi|119403100|gb|EAW13520.1| polyketide synthase, [Aspergillus clavatus NRRL 1]
  misc_feature (26)..(1148): NCBI GI: 23574643 Blast Desc: polyketide synthase [Penicillium citrinum]
  misc_feature (22)..(1148): NCBI GI: 143345081 Blast Desc: polyketide synthase [Penicillium citrinum]
  misc_feature (22)..(1148): NCBI GI: 62510842 Blast Desc: LNKS_ASPTE RecName: Full=Lovastatin nonaketide synthase; Short=LNKS gi|5106755|gb|AAD39830.1|AF151722_1 lovastatin nonaketide synthase [Aspergillus terreus]
  misc_feature (35)..(1148): NCBI GI: 74275561 Blast Desc: polyketide synthase [Monascus pilosus]
  misc_feature (22)..(1148): NCBI GI: 115385433 Blast Desc: ATEG_09961 [Aspergillus terreus NIH2624] gi|114187710|gb|EAU29410.1| ATEG_09961 [Aspergillus terreus NIH2624]
  misc_feature (30)..(1148): NCBI GI: 242816091 Blast Desc: polyketide synthase, [Talaromyces stipitatus ATCC 10500] gi|218715040|gb|EED14463.1| polyketide synthase, [Talaromyces stipitatus ATCC 10500]
  misc_feature (355)..(1141): NCBI GI: 145616308 Blast Desc: MGG_13561 [Magnaporthe grisea 70-15] gi|145010039|gb|EDJ94695.1| MGG_13561 [Magnaporthe grisea 70-15]
  misc_feature (458)..(1152): NCBI GI: 53850461 Blast Desc: TPA: polyketide synthase [Magnaporthe grisea 70-15]
  misc_feature (274)..(1090): NCBI GI: 189212057 Blast Desc: lovastatin nonaketide synthase [Pyrenophora tritici-repentis Pt-1C-BFP] gi|187979554|gb|EDU46180.1| lovastatin nonaketide synthase [Pyrenophora tritici-repentis
  misc_feature (22)..(1148): SWISSPROT Homolog: EC 2.3.1.161 Lovastatin nonaketide synthase
  misc_feature: Useful for fungicidal and/or biocontrol applications
KKCTITLDQSDEEPHLAVIEDYIPSNSRVSSGLVIDVCFASAKAVRVGNLGYFHIVQGTTPSLGPVVALAETNASKVEILPKLVMSLADMEDIDVNACLIPSIVAGLVAHTIVSGTIPGTTVLIFEPPELWAAALRHQAEENGVDIRFARVNADRGQMSADWIQLHENESPRKLEGKIPSNLSSYYDLSTGPGSSGMGQRLVTHLPLGSSSHALGYLLQDRVRTISTANGPSIPLILEQALAVSRGQTATSRGSLVHANELSNSKRTLSSGETVQWNTAESIPVATRPISSGVLFEEGKTYLLVGLAGDLGRSIARWMINHGARHVVLSSRSPKIDQQWLDDIKELGGDVMVLPMDVSNAESLDAGLAKIRESMPPISGVAFGPLVLQDILFKNMDLEMMEMVLAPKVKGAFLLDDRLSRDKDHPLDFFVMFSSFVMVSGNPGQAAYSAANAYTHALANKRRARGEAASTIDIGAVYGVGFIARAGREEEFDVVKFMFDSVSELELQDLFGEAVVFGRSPGTDGIELVTGMPYMNHADKDRIPYYDDPRLSWYRLQASEKDGSGAASAQGSVKDQLHAAATMDEVRSIITDGLSDKLRSALQLGAEGEVSLTVPLVDQGVDSLSAVTVGGWFSKNLNIDIPLLKVLGGAAITDLVDEALSRIQPSLIPLVQGLESAEPALAVPSTAPVSGWTTTESRTPLAYDTETPISTPSVASDEDFKPRSEKLSLGQEYWWKLQQLQLDSTAINSTVGMFLKGAIDMNRLAGAFNIALQRNDAYRLFFASDADGIVNQTVAHTPAMRFQAVPVPDRKAAEEAFWNVHNKKYDLAKGETVTMVDFTWTNVDHLLIIAYHQLVGDGWTTEKLFIEVGALYSGASLPRATSYLDFATRQRLQYDNGEMAVHTSYWKSLYTTLPPRLPALSAPGATVKAVAAPNFKQHEESVRLNPMIAIRIRDRSRKLKASPMQFYLTAFQIMLSRLSGSADLSIGVADANRSIEEDMATMGHFANLLPVRLAYSDDKTFGETLVVVKEQMRNAMLHSNVPYGVLFDSLNLSEADKALPPVFQAVFDYKQGQAESGNIGDAQIVDTLIRRAATPYDIVLEMSDDPTKEPLITIKLQDSKYGPDAVKVVLDAYLSVLSVFSRNPALRVGEGKLDQGHKAIAK

SEQ ID NO: 33386 - DNA, 2404 bp, Muscodor strobelii
  misc_feature: SGI EST ID NO. CUFF.78873.0
  misc_feature: Variant of the nucleotide sequence at SEQ ID NO 33384
cgtcgatattagatttgccagagtaaatgccgacagaggacagatgagcgcagattggatccagctccacgagaacgaatcgcctcgcaagttagaaggcaagatcccaagcaatctgtcgtcttactatgatttatctacaggaccaggctctagcgggatgggacagcgtctagtcacacatctaccccttggctcgtcatcccatgctttgggttatcttcttcaggatcgagttcggaccatttctacggcaaatggcccttcaattccacttatcctcgagcaggcacttgcagtctctagagggcagactgcaacctcacgaggatctctcgtccacgcgaatgagctttctaactccaagcggacactttcctcgggtgaaaccgtgcagtggaacacagcagaatccattcccgtcgcaactaggcctataagctcgggagtcctgttcgaagaaggtaagacgtacctgctagtcggactggcgggtgatcttggccgttccatcgctcgctggatgataaaccacggtgcacgccatgtcgtcctctcatctcggtcgcccaagatcgatcaacaatggcttgacgatattaaggaattgggcggtgacgtcatggtattgccaatgtgagtacaaatctaatatcgatctttgtgttgaccttggtcgattccactaaccgaccaatctatagggacgtctcgaatgcggaatccctcgatgcaggattagccaagattagagagtccatgccgccaatctccggcgtagccttcggtcctttggtcttgcaagatattctattcaagaatatggatcttgaaatgatggagatggtccttgcaccgaaagtgaaaggcgccttccttctcgacgatcggctttcccgggataaagaccatccactcgactttttcgtcatgttttcgtcatttgtcatggtctcaggaaacccaggacaagccgcgtacagtgctgccaatgcatacacgcatgccctcgccaacaagcgtcgtgcccgcggtgaagctgcatccacaatcgacatcggtgcagtgtatggtgtgggattcatcgccagagctggacgggaggaagagttcgacgtagtgaaattcatgttcgattccgtctccgagttagagctgcaggatttattcggcgaagctgtagtattcggtcggtcgccaggcacagacggcatcgaattagtcacaggcatgccctacatgaatcacgccgacaaagaccgcatcccttactatgatgaccctcgcctatcttggtacaggctccaggcaagcgaaaaggatgggagcggtgcggcatccgctcaaggatctgtgaaagatcagcttcatgctgctgcgacgatggatgaggtccggagtatcatcacagacgggctttcggacaaactccgatcagcgctgcagcttggcgctgaaggtgaagttagcttgactgtgccgttggtcgaccaaggtgtagactcattgagtgctgttactgtcggtggatggttctctaagaatctcaatatcgacattccgctcctcaaggtgctgggtggcgcagctatcactgatctggtggatgaagcattgtctcgtatacagcccagcctaatacccttggtgcaagggctagaaagcgcggagcccgcattagcagtaccttcgacagcgcccgtctcaggatggacaacaacggagagcagaacacccctagcttacgatacggagacgccaatctcgacgccctctgtagcctccgatgaagacttcaagcctagatccgaaaagctttccctaggtcaagagtactggtggaagctccaacagcttcagctcgactctacggcaatcaattccaccgtgggcatgtttttgaagggggcgattgatatgaaccggcttgctggtgcttttaacattgctcttcaacgaaacgatgcgtatcgcctcttctttgccagcgatgcagacggaatagtcaatcagaccgtagctcataccccagctatgcggttccaggcagtgccagtaccagatcgaaaagcggccgaggaagccttctggaatgttcataacaagaagtatgatcttgcaaagggcgaaacggtaaccatggttgacttcacgtggacgaatgtcgatcacctcctcattatcgcataccatcagctagtcggcgacggctggacgacggagaagctattcatcgaggtcggcgcactatacagcggtgcgagcttgcccagagcaacaagctatctagacttcgcgacccgacaaagacttcaatacgacaatggcgagatggcagtacacaccagctattggaagagtctttacaccactctgcctcccaggcttcccgccctgtcagcac

SEQ ID NO: 33387 - DNA, 1905 bp, Muscodor strobelii
  misc_feature: SGI cDNA ID NO. 571516
  misc_feature: Encodes the peptide sequence at SEQ ID NO 33388
atggatcccaacagacctagccccggcgcccctgaccccacgccaccccggcagtacaccaccgtcggctccgtctacacgccgcagacccgtcctctccaaccgcccgtccgccgaggccgtactgccaaggcccagtatctgttcaaggccgagtcgccgatgagctccgcccagcaccagtacacaccactgcagcagaactcagaacgcgcagtcagcccaccccgtgtcgttgcacctcccctccacgcacctccctcctcgcacttgcctgcccatcatggtcatgttcctgtcgtcgcccagagtatgcaggtgttgcccactggaagagaggctctcgccaatcctgggttcgttgtagaccacactaatgcccactacccttatcgccatctctctcacggcgatccacctagcattcctcttcctcatcccacctcaaaccccttcaccctcgccgtcaattcggcgattgcatcaacatcagtctcatcgccccacgcacttcacacgcataacccattgtctgcctcggcggcattctccaatccacttgacctgtcgaattcgaaagaccgcattgaccttgcaatcgacgcaatcatgcagtcggcaaagaacaacaaggccgtgattcaccctgtcgctgtgccagacatttcgaagatccagggcacgggtgtagtaccttctgcaatctctataacttctgcacacactcctccccagtcgccacccgcgacttcttcccttctcgaagtctctcccgagtacaaagccattcctgatgatcaatgtcgacccaattcacaatttgatcaaggttcggtcttgcctgtcggttatcccatgcccttggacttgaacaaaggagtcagacccgatcctgctgtcgtcaagtacaatcataaactcaacctccgtacttggaagaacctggcctcctacgagaaccccatgcagaaattcgcccaggagaagctcactgccctttcactcgaagccaagcaagccgaggctgccaatacctctgctgacgcaccctctacatcgacctctgtcggcacctatgctaaggctgcctctggacctcctactcaacctcgtgctatgagtaagggcaggcgcactttccccgccaatttgaagattccaaccggtcctgctgccgaccgtaaacctcaagcccctcgtcccttcaagttcaagcccgacgctgagcccttcatccatcctgcgcacaagactggcgtccctgtgcctctcactgctggtcctcctggtgcatcgacttcatcaactactgccagccagcttctccgtcgtagtcgcaccagtaccgagtctgagaagctgtccatcctgtcgccctcgctcggagtcaccatggaacaccagacgcaaggtcccactggcggcaagatcgtcgacaccctgtcggcggaggaggctgcagtgttttttcccaacggccagctccccgacaacttcagcactcagacccagcgtcttcccgacaactgggtcgacatgcacctagctgaggatcgctacagaaaggagatgcagcagaagcgcattgctaagaacgagcagcaattctacatgggcaccaacagactgggcaagcctttcgctcttgcagttgccgagcacaagcgcaagaacgtcgcgcaagcgttgggcgagccctacaaggaggagcccctcgcccccatcaccaagtgcacataccgtcacctggctgttgacgacgctgccgccatgaagacttcggagcacgctgcccccctcttgtcggtcatgtaccagggtttggtcaacctgcccgagctctcaggcaaccctaacctccctcgccacaaggagactttctttccggattacttcaagaattga

SEQ ID NO: 33388 - protein, 634 aa, Muscodor strobelii
  misc_feature: SGI Peptide ID NO. 571516
  misc_feature (244)..(615): NCBI GI: 116193671 Blast Desc: CHGG_06553 [Chaetomium globosum CBS 148.51] gi|88182466|gb|EAQ89934.1| CHGG_06553 [Chaetomium globosum CBS 148.51]
  misc_feature (285)..(613): NCBI GI: 171685095 Blast Desc: protein product [Podospora anserina] gi|170942508|emb|CAP68160.1| protein product [Podospora anserina]
MDPNRPSPGAPDPTPPRQYTTVGSVYTPQTRPLQPPVRRGRTAKAQYLFKAESPMSSAQHQYTPLQQNSERAVSPPRVVAPPLHAPPSSHLPAHHGHVPVVAQSMQVLPTGREALANPGFVVDHTNAHYPYRHLSHGDPPSIPLPHPTSNPFTLAVNSAIASTSVSSPHALHTHNPLSASAAFSNPLDLSNSKDRIDLAIDAIMQSAKNNKAVIHPVAVPDISKIQGTGVVPSAISITSAHTPPQSPPATSSLLEVSPEYKAIPDDQCRPNSQFDQGSVLPVGYPMPLDLNKGVRPDPAVVKYNHKLNLRTWKNLASYENPMQKFAQEKLTALSLEAKQAEAANTSADAPSTSTSVGTYAKAASGPPTQPRAMSKGRRTFPANLKIPTGPAADRKPQAPRPFKFKPDAEPFIHPAHKTGVPVPLTAGPPGASTSSTTASQLLRRSRTSTESEKLSILSPSLGVTMEHQTQGPTGGKIVDTLSAEEAAVFFPNGQLPDNFSTQTQRLPDNWVDMHLAEDRYRKEMQQKRIAKNEQQFYMGTNRLGKPFALAVAEHKRKNVAQALGEPYKEEPLAPITKCTYRHLAVDDAAAMKTSEHAAPLLSVMYQGLVNLPELSGNPNLPRHKETFFPDYFKN

SEQ ID NO: 33389 - DNA, 2222 bp, Muscodor strobelii
  misc_feature: SGI EST ID NO. CUFF.78882.0
  misc_feature: Variant of the nucleotide sequence at SEQ ID NO 33387
ttcagatggaaggcggaagggtgtagatatagagtgacatagtggcctggaagcaagagcagtgggatatgcgactgcgactacctcacctggtgcaaagaatcgctttgcgcaactgctaaattgtgcgtctcgctgagtaccttctgtctcttcccacattccccatctctccactcttgttcgttctccatttcccccgatactctcttcctccatctcttcgtctcagcttctgtccgactctgtccagtcggctgggcgctggtcattctttcagtctcgtcatcccgtcattcctcgtcatcattactatgacgaagacactcaccattcttccttgagtagtcaccgggtctgcctttctattttgaatgattcaaaagtacctaagtaatctactccgtccgtcgttccttttcttccgagttctctgtgtaagtgtggcaaattggagagcattagtattgcatactgccccttttccagactggacactggtgatatcaccccaccctttgtctacgacagatcaggactgtcactgagtcgcaaatttggattgcaagcagactggagatcgaacagctgacccaccatgatgttcatagacctcgccaatagatctcgccggcgaccatggatcccaacagacctagccccggcgcccctgaccccacgccaccccggcagtacaccaccgtcggctccgtctacacgccgcagacccgtcctctccaaccgcccgtccgccgaggccgtactgccaaggcccagtatctgttcaaggccgagtcgccgatgagctccgcccagcaccagtacacaccactgcagcagaactcagaacgcgcagtcagcccaccccgtgtcgttgcacctcccctccacgcacctccctcctcgcacttgcctgcccatcatggtcatgttcctgtcgtcgcccagagtatgcaggtgttgcccactggaagagaggctctcgccaatcctgggttcgttgtagaccacactaatgcccactacccttatcgccatctctctcacggcgatccacctagcattcctcttcctcatcccacctcaaaccccttcaccctcgccgtcaattcggcgattgcatcaacatcagtctcatcgccccacgcacttcacacgcataacccattgtctgcctcggcggcattctccaatccacttgacctgtcgaattcgaaagaccgcattgaccttgcaatcgacgcaatcatgcagtcggcaaagaacaacaaggccgtgattcaccctgtcgctgtgccagacatttcgaagatccagggcacgggtgtagtaccttctgcaatctctataacttctgcacacactcctccccagtcgccacccgcgacttcttcccttctcgaagtctctcccgagtacaaagccattcctgatgatcaatgtcgacccaattcacaatttgatcaaggttcggtcttgcctgtcggttatcccatgcccttggacttgaacaaaggagtcagacccgatcctgctgtcgtcaagtacaatcataaactcaacctccgtacttggaagaacctggcctcctacgagaaccccatgcagaaattcgcccaggagaagctcactgccctttcactcgaagccaagcaagccgaggctgccaatacctctgctgacgcaccctctacatcgacctctgtcggcacctatgctaaggctgcctctggacctcctactcaacctcgtgctatgagtaagggcaggcgcactttccccgccaatttgaagattccaaccggtcctgctgccgaccgtaaacctcaagcccctcgtcccttcaagttcaagcccgacgctgagcccttcatccatcctgcgcacaagactggcgtccctgtgcctctcactgctggtcctcctggtgcatcgacttcatcaactactgccagccagcttctccgtcgtagtcgcaccagtaccgagtctgagaagctgtccatcctgtcgccctcgctcggagtcaccatggaacaccagacgcaaggtcccactggcggcaagatcgtcgacaccctgtcggcggaggaggctgcagtgttttttcccaacggccagctccccgacaacttcagcactcagacccagcgtcttcccgacaactgggtcgacatgcacctagctgaggatcgctacagaaaggagatgcagcagaagcg

SEQ ID NO: 33390 - DNA, 723 bp, Muscodor strobelii
  misc_feature: SGI cDNA ID NO. 571517
  misc_feature: Encodes the peptide sequence at SEQ ID NO 33391
atgccggttgaaagggcgctcagcggcccagccatcccagtaccggattacgttacacccgatttggtcacttttccagctgacaatggcaataaattgagtctctcgttctatatcttgttcttgattttgggcacgtcggctgtgtttcttcgcatcgttgctaaatggtccgacctaaagaatggacgcgctgttgaagtgcttcttcttctctcactgttgacgttcagtgctgcgtttggcaatgacatgatcagaaacgtctatggacccggctatttcatccatcaatgggacgtcactctcagcagattcttctggcttttgaagctagaatttattggcaaaaacctctatattgtcggtattgctctagtcaaagccgccattctcctcgaatgggtgcgcgtatttgttcccttgggtgctcggaatgcattcttttgggcaagtcacggcattctcgtgttcaatacaatattctacacaacagcactggtcacaatcaacagtgcctgcactccttacgagaagaactggaataaaaatatcgacggacattgcctagatacggaccagcttgaattgggcagtgctgccatcaatgtggcgtttgactttgtcatcctgctgctgccacagaaaacaatttggagactacaactatcccgccagcagaaatttggcgtatcaattgcctttggaataggcgttttgtag

SEQ ID NO: 33391 - protein, 240 aa, Muscodor strobelii
  misc_feature: SGI Peptide ID NO. 571517
  misc_feature (7)..(240): NCBI GI: 256727941 Blast Desc: NECHADRAFT_26479 [Nectria haematococca mpVI 77-13-4]
  misc_feature (7)..(240): NCBI GI: 46118221 Blast Desc: FG04693.1 [Gibberella zeae PH-1]
  misc_feature (3)..(240): NCBI GI: 256731204 Blast Desc: NECHADRAFT_85215 [Nectria haematococca mpVI 77-13-4]
  misc_feature (89)..(240): NCBI GI: 145248463 Blast Desc: An13g03450 [Aspergillus niger] gi|134081233|emb|CAK41741.1| protein product [Aspergillus niger]
  misc_feature (92)..(240): NCBI GI: 169780800 Blast Desc: [Aspergillus oryzae RIB40] gi|83773604|dbj|BAE63731.1| protein product [Aspergillus oryzae]
  misc_feature (92)..(240): NCBI GI: 238505010 Blast Desc: conserved [Aspergillus flavus NRRL3357] gi|220689848|gb|EED46198.1| conserved [Aspergillus flavus NRRL3357]
  misc_feature (31)..(240): NCBI GI: 169781106 Blast Desc: [Aspergillus oryzae RIB40] gi|83773758|dbj|BAE63883.1| protein product [Aspergillus oryzae]
  misc_feature (31)..(240): NCBI GI: 238500906 Blast Desc: conserved [Aspergillus flavus NRRL3357] gi|220691924|gb|EED48271.1| conserved [Aspergillus flavus NRRL3357]
  misc_feature (4)..(240): NCBI GI: 145607555 Blast Desc: MGG_04339 [Magnaporthe grisea 70-15] gi|145015080|gb|EDJ99648.1| MGG_04339 [Magnaporthe grisea 70-15]
  misc_feature (7)..(240): NCBI GI: 212534224 Blast Desc: conserved [Penicillium marneffei ATCC 18224] gi|210069667|gb|EEA23757.1| conserved [Penicillium marneffei ATCC 18224]
MPVERALSGPAIPVPDYVTPDLVTFPADNGNKLSLSFYILFLILGTSAVFLRIVAKWSDLKNGRAVEVLLLLSLLTFSAAFGNDMIRNVYGPGYFIHQWDVTLSRFFWLLKLEFIGKNLYIVGIALVKAAILLEWVRVFVPLGARNAFFWASHGILVFNTIFYTTALVTINSACTPYEKNWNKNIDGHCLDTDQLELGSAAINVAFDFVILLLPQKTIWRLQLSRQQKFGVSIAFGIGVL

SEQ ID NO: 33392 - DNA, 234 bp, Muscodor strobelii
  misc_feature: SGI cDNA ID NO. 571518
  misc_feature: Encodes the peptide sequence at SEQ ID NO 33393
atgaaatcgtccgtgattctcacctatctgatggtagctatggctgcaagctctgctattcctcaagaagctagaagtgagctcagcgaggatacagtgtgggcggacaagcgagagaaactcagcgaggatctcgtctgggctgataagcgagagaagcttagtgaggatctggtttgggccgataagcgtgaggatctcggggaagatcttgtttgggctgatcgcaagtga

SEQ ID NO: 33393 - protein, 77 aa, Muscodor strobelii
  misc_feature: SGI Peptide ID NO. 571518
MKSSVILTYLMVAMAASSAIPQEARSELSEDTVWADKREKLSEDLVWADKREKLSEDLVWADKREDLGEDLVWADRK

SEQ ID NO: 33394 - DNA, 362 bp, Muscodor strobelii
  misc_feature: SGI EST ID NO. CUFF.78904.0
  misc_feature: Variant of the nucleotide sequence at SEQ ID NO 33392
ataagcgagagaagcttagtgaggatctggtttgggccgataagcgtgaggatctcggggaagatcttgtttgggctgatcgcaagtgagataaaagtttgacaactgtatcttgattcttgtcatggatagaccaatatgctgcaggaaactcctaggtaaatacagagtcagaaatcaagctcatgcgattatccacggaaactgatgcaaagttgtgatagtcgactacatatttcgtaggtagtcatcccgatgactagatatgatttctcttgactgtaattatgtaaataagcacttcagctgctgtatatgttcattctcgccgagaggaaaatcaagaccagttatactcggag

SEQ ID NO: 33395 - DNA, 972 bp, Muscodor strobelii
  misc_feature: SGI cDNA ID NO. 571519
  misc_feature: Encodes the peptide sequence at SEQ ID NO 33396
atggatttctcgcactcgtatttcggtggagctcagccctaccagttcatgagcgtccctcctctgacaccatcacattccaacccagctacttccaccgatgatttcactggtcaatctcagaatcgcaatcactcgcctcacgagatctacgaacagttccagaatcacgaccactttcagcagccgaatttcgagcacttcagccaatttaacaaccatcaagctcaggcatttcatggcccgccaggtccgccgacaccgcctaacttaccactccatggccagaaccaagccgtagtcgacgatgccacgcaaatgaaggcccaccagcctgacctgatgcccgtcaccaagcaggatcccgagatgaacagcagaaacactggctccaattcggatgaggacgacctgactccggcccaatcccgccgcaaggctcagaacagagctgcacaacgcgcgttccgtgagcgcaaggagcggcacgtcaaggacctcgaagccaagctggctagcctcgaagctgcccagtctcatactgctaccgaaaacgagaaactcaaacgcgaaatgcagaagatgagcacagagaacgagatattgcgcgctacttcgagtgtccaagcacaacataacggctccatgtctcccgttgccggcatcactgcgggccccatgcagtacaaaccaactgacttctattccgatctgctgcaaaaccatgccaacaagacacccagccatcgtattgttgaatccgaaggtggccgcctgttggctgccggcgccacctgggactacatcatttcccatgaacttttcaagaagggactggtcgatgtggccgacgtaagcgagcgcctcaaatgccaggctaagtgtgacggccaaggtccggtgtttgaagagcgcgctgtacttagggctattgttgacagcgtcgcaagtggcagcgatgagctcttgtaa

SEQ ID NO: 33396 - protein, 323 aa, Muscodor strobelii
  misc_feature: SGI Peptide ID NO. 571519
  misc_feature (137)..(200): Pfam Id: PF00170 Pfam Desc: bZIP transcription factor
  misc_feature (144)..(200): Pfam Id: PF00170 Pfam Desc: bZIP transcription factor
  misc_feature (1)..(323): NCBI GI: 85115367 Blast Desc: NCU01994 [Neurospora crassa OR74A] gi|28926655|gb|EAA35623.1| [Neurospora crassa OR74A] gi|38567062|emb|CAE76359.1| [Neurospora crassa]
  misc_feature (1)..(323): NCBI GI: 116193673 Blast Desc: CHGG_06554 [Chaetomium globosum CBS 148.51] gi|88182467|gb|EAQ89935.1| CHGG_06554 [Chaetomium globosum CBS 148.51]
  misc_feature (1)..(323): NCBI GI: 171685115 Blast Desc: protein product [Podospora anserina] gi|170942518|emb|CAP68170.1| protein product [Podospora anserina]
  misc_feature (1)..(323): NCBI GI: 256733587 Blast Desc: NECHADRAFT_67451 [Nectria haematococca mpVI 77-13-4]
  misc_feature (1)..(323): NCBI GI: 145610236 Blast Desc: MGG_02632 [Magnaporthe grisea 70-15] gi|145017583|gb|EDK01946.1| MGG_02632 [Magnaporthe grisea 70-15]
  misc_feature (1)..(323): NCBI GI: 149209749 Blast Desc: MGCH7_ch7g357 [Magnaporthe grisea 70-15] gi|86196312|gb|EAQ70950.1| MGCH7_ch7g357 [Magnaporthe grisea 70-15]
  misc_feature (115)..(323): NCBI GI: 154322180 Blast Desc: BC1G_01237 [Botryotinia fuckeliana B05.10] gi|150850484|gb|EDN25677.1| BC1G_01237 [Botryotinia fuckeliana B05.10]
  misc_feature (1)..(323): NCBI GI: 145238072 Blast Desc: An07g06050 [Aspergillus niger] gi|134076162|emb|CAK48975.1| protein product [Aspergillus niger]
  misc_feature (131)..(323): NCBI GI: 70989079 Blast Desc: bZIP transcription factor (Fcr3) [Aspergillus fumigatus Af293] gi|66847020|gb|EAL87351.1| bZIP transcription factor (Fcr3), [Aspergillus fumigatus Af293] bZIP transcription
  misc_feature (131)..(323): NCBI GI: 119498131 Blast Desc: bZIP transcription factor (Fcr3), [Neosartorya fischeri NRRL 181] gi|119413987|gb|EAW23926.1| bZIP transcription factor (Fcr3), [Neosartorya fischeri NRRL 181]
MDFSHSYFGGAQPYQFMSVPPLTPSHSNPATSTDDFTGQSQNRNHSPHEIYEQFQNHDHFQQPNFEHFSQFNNHQAQAFHGPPGPPTPPNLPLHGQNQAVVDDATQMKAHQPDLMPVTKQDPEMNSRNTGSNSDEDDLTPAQSRRKAQNRAAQRAFRERKERHVKDLEAKLASLEAAQSHTATENEKLKREMQKMSTENEILRATSSVQAQHNGSMSPVAGITAGPMQYKPTDFYSDLLQNHANKTPSHRIVESEGGRLLAAGATWDYIISHELFKKGLVDVADVSERLKCQAKCDGQGPVFEERAVLRAIVDSVASGSDELL

SEQ ID NO: 33397 - DNA, 3840 bp, Muscodor strobelii
  misc_feature: SGI EST ID NO. CUFF.78958.1
  misc_feature: Variant of the nucleotide sequence at SEQ ID NO 33395
ccgccttactacagtagttgctatcataaactaacgggccataggcgaatcgatgcagatggttccttgtcgccaggattctctggtggctgtcgaggtagtcaccctcatgttaatcccctgtttgtctgggcctggtcgcccgtgtttcttcacttcggcggagtcatatagcctgtagatcggcaacgtaggggtggtgactgcatggattgcagcatggccagacaaggtaaaatggggggcagcgtgagtccagaagaggcacagaatgaatgtctggaggacccgcggagctaaacgaagttaacgattgacgaaccccggctccaactcaagcccccctcgtccccaaacaccaccacagcatgctccccgaccttggactcgatggcatactgtacagagagacaccgaccttgcagcaaatcaccaactagttagccaagcactgaatcacacaccacctattcgttgctgtctgccccgtctagcttctcgaagaagtgcagctttggtggtatttctgtgctcgtctagtgtccgtagcagccatcactcgctctctcgaccgtaatcgccgtcagtttgctatcgtactgtcacccgtaatactattagtcccagtatcatctcatcagtctctggcacacgagatcgggcacgctgctgcatgagccttggtcttctcctcttcctcgtccttgtgctcccgtccctggcccctcgatttccaagacaaatccacacagctccaaccaagctgtccccaggtcacaccagcatccatccagacgccgacaggggaggacactgcactctcacctagtcctccaatacccggtgctttgcatctctgcatctctgcatctgttccctgccatctctgctgctccatcggccgaatcctctctatccccgccttctcttgctttcccttttaaagccacccattgtctcgctcacgatcactcacggtcacctcataccgtatcttgacaatcatcactaagcctgccgggctctgtcttgcttcatctgtgcttctgttgtatactgttcatatcatttctcatctttactgcctcggcttcgaccatggatttctcgcactcgtatttcggtggagctcagccctaccagttcatgagcgtccctcctctgacaccatcacattccaacccagctacttccaccgatgatttcactggtcaatctcagaatcgcaatcactcgcctcacgtatgtcctttgctccgccgtttccctatcttatcccaaatggcgcacgtagtcttgagtcatgaagcctggtgggtcgagcgctgatccttgtctatgccataggagatctacgaacagttccagaatcacgaccactttcagcagccgaatttcgagcacttcagccaatttaacaaccatcaagctcaggcatttcatggcccgccaggtccgccgacaccgcctaacttaccactccatggccagaaccaagccgtagtcgacgatgccacgcaaatgaaggcccaccagcctgacctgatgcccgtcaccaagcaggatcccgagatgaacagcagaaacactggctccaattcggatgaggacgacctgactccggcccaatcccgccgcaaggctcagaacagagctgcacaacgcgcgttccgtgagcgcaaggagcggcacgtcaaggacctcgaagccaagctggctagcctcgaagctgcccagtctcatactgctaccgaaaacgagaaactcaaacgcgaaatgcagaagatgagcacagagaacgagatattgcgcgctacttcgagtgtccaagcacaacataacggctccatgtctcccgttgccggcatcactgcgggccccatgcagtacaaaccaactgacttctattccgatctgctgcaaaaccatgccaacaagacacccagccatcgtattgttgaatccgaaggtggccgcctgttggctgccggcgccacctgggactacatcatttcccatgaacttttcaagaagggactggtcgatgtggccgacgtaagcgagcgcctcaaatgccaggctaagtgtgacggccaaggtccggtgtttgaagagcgcgctgtacttagggctattgttgacagcgtcgcaagtggcagcgatgagctcttgtaattgtgctctggaaagccacatgagaagctggtgcattttgctttgcgaaatccctgatacggctcgtcgatcgcattggcgtcaacaagacgttgccatctacaaacaagcgtggcgtaccttgcatcacgccacgcacgagggtcgcggaaattacgggctaagttagattttggaaagagagcggggaattcagtgacccactggggtctgtatgatgaatgatagcaaatcctcggggacctctgtatcgactgatgttgacgatactgcgatgcggtcacactgaaactgactgtcgctgagggaggatatgagggtttgggaatcccgttcccgaacctcaacgattgatgttgctaccttaccacttacttgcttgtctttgttgctgcttagggactgacattaatactgtacaaacgagaaggaagccaacacggtactagcgccaactgtttaacctggaaaacgcaggaaagtcaacatggacatggtgttattgacgacaaacaaaataaaattagcagacaaaaacagaatcaaaaactcaatattagctatattgatggatttagcatatacctctgtaccatctggcactgtatttgtttctttgtttcgcttactggtgatggctggtgtctatagctagcgcttcgatgaagatacatgcgtggatcattcatatggaatctggactggagaaatggcgtctggcaagtgacttatgcacgagagattcggcgttacagttgtgattatggtcggtgactggtatttagatgaatttactgatatatccatactctgtacatcctgcatggtgaacaatggtctttgaaggtgtgtgtccaagagatcaatagcacacacaaacgtaactggctatccactggccattgttaaccctaggaagaaccagtaaggaacagatttccaatatgtcgaactctcgctgcgactcttcacactccagcaaaatagtttcgctcgtcttggacctggtatcagcgagcggcgtcttgaacgcctcatgttcaagcatctgaaattcaaacaccaccaccttggctttgtaataactccatatgcataacttatgtgtctaatacccgcggaccattttctcgtatatctcagatagtcagactgtgcctgcattgataaatccagcttagagctcatctatttcaaggtatgagccgagtttcctgacatacaacttcgctcaagttttgacgggtatacgatcggttggacaactagaacaatgatgatgattgcagcttgtacagaaataatacacggccacggtcataggtccattgccgcatagacactattctgaattgtcagttgtatctcgcaagactcaactccttaacctacacaccgccaaataatgtgggtttcgcgaggcatggagccggtaactgacgaaaaagctcagagtacctaatggtatgaattcgcaatgtgtttatttcgtatctcgtacctcggaatgatgtaccgcaattaaggtaataatagtcactaaagtcactctctacaaaaagaccatgcctatccggatatctgaggtatatcccagaaacgaactcgaatggaatagctgcattgaagccatcacgtgaagccaccccttcagctgacttggag

SEQ ID NO: 33398 - DNA, 1248 bp, Muscodor strobelii
  misc_feature: SGI cDNA ID NO. 571520
  misc_feature: Reduced expression when VOC is produced
  misc_feature: Encodes the peptide sequence at SEQ ID NO 33399
atggtctacgttcgccaacaagacctgccgaatctcaaagagtacaaatactcgggcgtcgaccactctctgacttcgaaatacatcctcaagccgttctacacacatgtcgtcatcaaatgctttcccatgtggatggcgcccaacctcatcacgctgacggggttcatgttcgtcatcgctaacttcttcacaatgctctggtataacccgaccctcgaccagaattgtccgccctgggtttactactcctgggctgcggggttgttcctctaccagactttcgatgcggttgatggcagccaggcgagacgcacgagacagagtggtccgttgggagaactgtttgaccatggtgttgatgcgttgaatacaagtctcgaggtgttgatcttcgctgcgagccagaatatggggcagagttggtatactgttgccactctcttcgcttcattatgcaccttctacgtccaaacctgggacgaataccacaccaagactctgacgctcggcatcgtcaatggccccgtcgaaggcgtcctcatcctcgtcttcgtgtacgcgcttacgggatacatgggcggagcctccttctggcagcagagtatgctctacacgtttggtgttccaagcactatcggtattcctcagttcatatacgagttttccttcacacaatggtacatggtacaaggtatcgtcgtcctggtcttgaacacggtccagagtgcccaaaacgtcatcaaggcccgacgcgcgagaggcgatagaagtcgtggtgcattgtttggcctggcaccgttcttcgggacttggatcttgatcacggcatatctatacctgcagcctgttgtccgcctccagcacttggtcccgttcgtcatattcgctggccttgttaatgcatactccgttggtcagatgatcaccgcgcatctcgtcaagttagatttcccgtactggaatgttctagtcgtgcctctctgggctgccatcatcgactccattggtccgatactcaaggaacacgttggatgggcatctggctggccttcggcactcggtgacgatgtttaccaggttgcgttcatgttctcaatgcttggtatggcgatcggtgtttatggatcgtttgtcgtcgatgttattgtcacgatttgcgactaccttgacatttggtgcttgaccatcaagcatccttatgttgagggccaagagacgaagacgaatgggaagaaagtcaactag

SEQ ID NO: 33399 - protein, 415 aa, Muscodor strobelii
  misc_feature: SGI Peptide ID NO. 571520
  misc_feature (87)..(213): Pfam Id: PF01066 Pfam Desc: CDP-alcohol phosphatidyltransferase
  misc_feature (1)..(414): NCBI GI: 85115363 Blast Desc: NCU01993 [Neurospora crassa OR74A] gi|28926654|gb|EAA35622.1| NCU01993 [Neurospora crassa OR74A] gi|38567063|emb|CAE76360.1| related to [Neurospora crassa]
  misc_feature (1)..(415): NCBI GI: 46128657 Blast Desc: FG08706.1 [Gibberella zeae PH-1]
  misc_feature (1)..(413): NCBI GI: 116193675 Blast Desc: CHGG_06555 [Chaetomium globosum CBS 148.51] gi|88182468|gb|EAQ89936.1| CHGG_06555 [Chaetomium globosum CBS 148.51]
  misc_feature (1)..(415): NCBI GI: 39970333 Blast Desc: MGG_02633 [Magnaporthe grisea 70-15] gi|149209751|ref|XP_001522250.1| MGCH7_ch7g358 [Magnaporthe grisea 70-15] gi|86196313|gb|EAQ70951.1| MGCH7_ch7g358 grisea
  misc_feature (1)..(413): NCBI GI: 256734093 Blast Desc: [Nectria haematococca mpVI 77-13-4]
  misc_feature (1)..(413): NCBI GI: 189202676 Blast Desc: ethanolaminephosphotransferase [Pyrenophora tritici-repentis Pt-1C-BFP] gi|187984773|gb|EDU50261.1| ethanolaminephosphotransferase [Pyrenophora tritici-repentis
  misc_feature (1)..(410): NCBI GI: 169595264 Blast Desc: SNOG_00369 [Phaeosphaeria nodorum SN15] gi|111070744|gb|EAT91864.1| SNOG_00369 [Phaeosphaeria nodorum SN15]
  misc_feature (1)..(381): NCBI GI: 154322172 Blast Desc: BC1G_01233 [Botryotinia fuckeliana B05.10] gi|150850480|gb|EDN25673.1| BC1G_01233 [Botryotinia fuckeliana B05.10]
  misc_feature (1)..(415): NCBI GI: 171685113 Blast Desc: protein product [Podospora anserina] gi|170942517|emb|CAP68169.1| protein product [Podospora anserina]
  misc_feature (1)..(412): NCBI GI: 212544654 Blast Desc: aminoalcoholphosphotransferase [Penicillium marneffei ATCC 18224] gi|210065450|gb|EEA19544.1| aminoalcoholphosphotransferase [Penicillium marneffei ATCC 18224]
  misc_feature (3)..(399): SWISSPROT Homolog: EC 2.7.8.1 Ethanolaminephosphotransferase
  misc_feature (3)..(399): SWISSPROT Homolog: EC 2.7.8.2 Diacylglycerol cholinephosphotransferase
  misc_feature: Useful for introducing or modulating the production of volatile compounds
MVYVRQQDLPNLKEYKYSGVDHSLTSKYILKPFYTHVVIKCFPMWMAPNLITLTGFMFVIANFFTMLWYNPTLDQNCPPWVYYSWAAGLFLYQTFDAVDGSQARRTRQSGPLGELFDHGVDALNTSLEVLIFAASQNMGQSWYTVATLFASLCTFYVQTWDEYHTKTLTLGIVNGPVEGVLILVFVYALTGYMGGASFWQQSMLYTFGVPSTIGIPQFIYEFSFTQWYMVQGIVVLVLNTVQSAQNVIKARRARGDRSRGALFGLAPFFGTWILITAYLYLQPVVRLQHLVPFVIFAGLVNAYSVGQMITAHLVKLDFPYWNVLVVPLWAAIIDSIGPILKEHVGWASGWPSALGDDVYQVAFMFSMLGMAIGVYGSFVVDVIVTICDYLDIWCLTIKHPYVEGQETKTNGKKVN

SEQ ID NO: 33400 - DNA, 2898 bp, Muscodor strobelii
  misc_feature: SGI EST ID NO. CUFF.78949.0
  misc_feature: Variant of the nucleotide sequence at SEQ ID NO 33398
gccgaataataatcttaggtctgctttagacttcatgcgccaactacggtacctactctccatcaccatccttcggcattcctgatattcctccctttttgttgtccagggcgggtgtttttccccttcatgacacggtcgcaaatagtgctttgtccttcataaacttggcctctctctgcaggacccgagtctatctacccgaggatctgtccctcccacttcgtccccaccaaaaaccgaacccgtaaggacatcgtgtgtcgcagcgcatctgcgacaaccgtagcaaagatggtctacgttcgccaacaagacctgccgaatctcaaagagtacaaatactcgggcgtcgaccactctctgacttcgaaatacatcctcaagccgttctacacacatgtcgtcatcaaatgctttcccatgtggatggcgcccaacctcatcacgctgacggggttcatgttcgtcatcgctaacttcttcacaatgctctggtataacccgaccctcgaccagaattgtccgccctgggtttactactcctgggctgcggggttgttcctctaccagactttcgatgcggttgatggcagccaggcgagacgcacgagacagagtggtccgttgggagaactgtttgaccatggtgttgatgcgttgaatacaagtctcgaggtgttgatcttcgctgcgagccagaatatggggcagagttggtatactgttgccactctcttcgcttcattatgcaccttctacgtccaaacctgggacgaataccacaccaagactctgacgctcggcatcgtcaatggccccgtcgaaggcgtcctcatcctcgtcttcgtgtacgcgcttacgggatacatgggcggagcctccttctggcagcagagtatgctctacacgtttggtgttccaagcactatcggtattcctcagttcatatacgagttttccttcacacaatggtacatggtacaaggtatcgtcgtcctggtcttgaacacggtccagagtgcccaaaacgtcatcaaggcccgacgcgcgagaggcgatagaagtcgtggtgcattgtttggcctggcaccgttcttcgggacttggatcttgatcacggcatatctatacctgcagcctgttgtccgcctccagcacttggtcccgttcgtcatattcgctggccttgttaatgcatactccgttggtcagatgatcaccgcgcatctcgtcaagttagatttcccgtactggaatgttctagtcgtgcctctctgggctgccatcatcgactccattggtccgatactcaaggaacacgttggatgggcatctggctggccttcggcactcggtgacgatgtttaccaggttgcgttcatgttctcaatgcttggtatggcgatcggtgtttatggatcgtttgtcgtcgatgttattgtcacgatttgcgactaccttgacatttggtgcttgaccatcaagcatccttatgttgagggccaagagacgaagacgaatgggaagaaagtcaactagacgagtacggagagtctgtgatgagaaattgagagacgaagggacatgaagggccaagaggatacacgaggaagaaaacccgatgatcgcatgaatcagatttgcgagagatttggggtatgggcgcctgctcgtcacatgtcacacgcagcattccaacaacaggaaggacacgccggaagaacaattgcggaagcatgatagggagacgtatgcaatgctcagcaagattggggctcggaacgttgcagctaaggagagtagagttggcgatgggggttttcactctcgtacttaatcgaaagaacttgttaattactttggagataccactataatctgcttctgaatgaaacatacaaacgcactctatactaaccgtcttcgtgcgctatgttcctatattcatgcccgccgctcagttctcgattccctgggggataaatcataaaatcttgaatccttttgaattggacaggaatctactacctctcactatcccccccataaccaaacccccatccaaagaccctctactcaagaacaactaatccttgcgacctagcaccagccatgcctttcaaactaaacctctgcaccaaactcgtcttactcacaccctgactcaaatccaaaacaagcacagccggatcactgtcttccgtcccattgcccggactaagcacatacaaaaacccacccgcagccttaagatcgataaacccggggtcaccacttccacttaaatcgatctccgacagtatctccgcagtatcggtgctcatctctattaatctaggaacaccgacatcagtcacgaacgccgtgccggtaagtttgctgatcgcggaccaacaggtcgctttttgcccggagatctccgttttatgtaatgtagttgaagaaccggtgggggtgagggagaggattgcagcgccaaatgaagcatctgttacgaagatcttatccttcgatcctgggatggtttgcgatccgaagaggacgttcgtcccattcggcgtagaccgcaagtcatcttttcctacggaggaaaatgatcggcctttgcaactcctcttattaataggtagcgtagacacgaaacccgtcttgtttactgccggatcaccttttaccatggtgaggaacgcggattcgtcgctattcagtagaatgtgggagatggtgtttgttgggcccactggtgggttagtctgcccgaggtttatggagcgtagtgtgtccatggatcccatcccggaggaggagaacgtggtgcatgatattccggctcggacacccgtcgttgctgcgcagacgaggttgtgctttggcgaggctgcgactgtggatggg

SEQ ID NO: 33401 - DNA, 1233 bp, Muscodor strobelii
  misc_feature: SGI cDNA ID NO. 571521
  misc_feature: Encodes the peptide sequence at SEQ ID NO 33402
atgaagtctgccacactcctctcctcgctgctagcagcgcaagccaccgctcacgtcatcagagcaaataactcaacagcagaagactgtgcaacaacaggcaaagcagtctatttattgacaaatgatgagtccaacgccgtcgtagctttacctatcaacgcagacggtacactatcaaagggaactgtcacgccatctggtggaaatggatcagtttccatcgcaggagacacgggaaagccttcagcccctgatgcattgatcagtcaatctgcgttgactatcgccggcaacaacatcttcgccgtaaacgcaggaagcaacagcctatcaatgttcagcctctctccctccgacccaacatctctaactcttatcggccaacccgctctcctacccggcgacttcccatccacagtcgcagcctcgccaaagcacaacctcgtctgcgcagcaacgacgggtgtccgagccggaatatcatgcaccacgttctcctcctccgggatgggatccatggacacactacgctccataaacctcgggcagactaacccaccagtgggcccaacaaacaccatctcccacattctactgaatagcgacgaatccgcgttcctcaccatggtaaaaggtgatccggcagtaaacaagacgggtttcgtgtctacgctacctattaataagaggagttgcaaaggccgatcattttcctccgtaggaaaagatgacttgcggtctacgccgaatgggacgaacgtcctcttcggatcgcaaaccatcccaggatcgaaggataagatcttcgtaacagatgcttcatttggcgctgcaatcctctccctcacccccaccggttcttcaactacattacataaaacggagatctccgggcaaaaagcgacctgttggtccgcgatcagcaaacttaccggcacggcgttcgtgactgatgtcggtgttcctagattaatagagatgagcaccgatactgcggagatactgtcggagatcgatttaagtggaagtggtgaccccgggtttatcgatcttaaggctgcgggtgggtttttgtatgtgcttagtccgggcaatgggacggaagacagtgatccggctgtgcttgttttggatttgagtcagggtgtgagtaagacgagtttggtgcagaggtttagtttgaaaggcatggctggtgctaggtcgcaaggattagttgttcttgagtag

SEQ ID NO: 33402 - protein, 410 aa, Muscodor strobelii
  misc_feature: SGI Peptide ID NO. 571521
  misc_feature (31)..(409): NCBI GI: 256724613 Blast Desc: NECHADRAFT_84347 [Nectria haematococca mpVI 77-13-4]
  misc_feature (34)..(409): NCBI GI: 169620042 Blast Desc: SNOG_13222 [Phaeosphaeria nodorum SN15] gi|160703954|gb|EAT79549.2| SNOG_13222 [Phaeosphaeria nodorum SN15]
  misc_feature (37)..(409): NCBI GI: 46110911 Blast Desc: FG02337.1 [Gibberella zeae PH-1]
  misc_feature (5)..(409): NCBI GI: 189206445 Blast Desc: conserved [Pyrenophora tritici-repentis Pt-1C-BFP] gi|187975650|gb|EDU42276.1| conserved [Pyrenophora tritici-repentis Pt-1C-BFP]
  misc_feature (31)..(409): NCBI GI: 116192341 Blast Desc: CHGG_05888 [Chaetomium globosum CBS 148.51] gi|88181801|gb|EAQ89269.1| CHGG_05888 [Chaetomium globosum CBS 148.51]
  misc_feature (35)..(409): NCBI GI: 261354814 Blast Desc: conserved [Verticillium albo-atrum VaMs.102]
  misc_feature (6)..(410): NCBI GI: 242785770 Blast Desc: conserved [Talaromyces stipitatus ATCC 10500] gi|218720811|gb|EED20230.1| conserved [Talaromyces stipitatus ATCC 10500]
  misc_feature (9)..(410): NCBI GI: 212536869 Blast Desc: conserved [Penicillium marneffei ATCC 18224] gi|210068332|gb|EEA22423.1| conserved [Penicillium marneffei ATCC 18224]
  misc_feature (35)..(410): NCBI GI: 67524665 Blast Desc: AN2790.2 [Aspergillus nidulans FGSC A4] gi|40744042|gb|EAA63224.1| [Aspergillus nidulans FGSC A4] gi|259486287|tpe|CBF84006.1| TPA: conserved [Aspergillus nidulans
  misc_feature (9)..(410): NCBI GI: 242810757 Blast Desc: conserved [Talaromyces stipitatus ATCC 10500] gi|218716272|gb|EED15694.1| conserved [Talaromyces stipitatus ATCC 10500]
MKSATLLSSLLAAQATAHVIRANNSTAEDCATTGKAVYLLTNDESNAVVALPINADGTLSKGTVTPSGGNGSVSIAGDTGKPSAPDALISQSALTIAGNNIFAVNAGSNSLSMFSLSPSDPTSLTLIGQPALLPGDFPSTVAASPKHNLVCAATTGVRAGISCTTFSSSGMGSMDTLRSINLGQTNPPVGPTNTISHILLNSDESAFLTMVKGDPAVNKTGFVSTLPINKRSCKGRSFSSVGKDDLRSTPNGTNVLFGSQTIPGSKDKIFVTDASFGAAILSLTPTGSSTTLHKTEISGQKATCWSAISKLTGTAFVTDVGVPRLIEMSTDTAEILSEIDLSGSGDPGFIDLKAAGGFLYVLSPGNGTEDSDPAVLVLDLSQGVSKTSLVQRFSLKGMAGARSQGLVVLE

SEQ ID NO: 33403 - DNA, 2754 bp, Muscodor strobelii
  misc_feature: SGI cDNA ID NO. 571522
  misc_feature: Encodes the peptide sequence at SEQ ID NO 33404
atgagctacggcaagaaagacgaagatgccgacctcggtctggtcaaggtcgatcgcacccaggtcttccaagaagcccgattgttcaacagctcgcctatccagccgcgaagatgccgaatactcctcaccaagatcgccctcctcctctacacgggcgagaagttcccgaccaacgaagccaccaccctcttcttcggtatctcgaagctcttccagaacaaagatgccagcttacgccagatggtccacctcgtcatcaaggagctggccaactccgccgaggacatcatcatggtcacgagcaccatcatgaaggacaccggcggcagcactgatgtcatataccggcccaatgccatccgagccctgtgtcgtatcatcgatgcgaccaccgtccaatcgatcgagcgagtcatgaagactgctatcgtcgataagaacccctctgtttcctccgccgccctcgtttcctcctaccacctcctccccattgccaaggatgttgttcgaagatggcagtccgagactcaggaggctgctgcctcggccaagtcatctggcggattttccttcggtctctcctcttcctcggggtctctacccatgaacaactcgaccatgacacaataccatgctattggtctcttataccagatgcgatcacacgacagaatggccttagtcaagatggtccagcagttcggtgctgccggtgcggtcaagagcccggctgcgattgtcatgctagtcagactggcggcccagcttgccgaagaggaccagtcactcaggaaaccaatgatgcagctgcttgacgggtggttacgacacaagagcgagatggtcaatttcgaggctgccaaggccatctgcgacatgcgagacgtcaccgacgccgaggtcaaccaggctgtacacgtcctccagctgttcctgtcctcgcccagagccgtcactaagttcgcagctctccgaatcctccacaactttgcgtctttcaaacccgaggctgtaaacacctgtaatcccgacatcgaagccctcatttcgaacagcaatcgctccatcgccacgtttgctatcaccaccctcctcaagaccggcaacgaagccagcgtggacaggctcatgaagcagatttccggcttcatgtctgaaattacagatgagttcaagatcaccatagtagaggcgatccgtactctgtgtctcaagttccccagcaaacaggccggcatgcttgccttcctcagcgggatcctccgcgacgagggcggctacgaattcaagcgcgcggttgtcgagagcatgtttgatcttatcaagtttgttcccgattccaaggaggatgctcttgcccatctgtgcgaattcatcgaagactgcgagttcaccaagctcgctgtgcgcatcctgcatttgcttggtctcgagggtcccaagacgtcgcagccaaccaaatacatacgctacatctacaaccgtgttgttctggagaacgccatcgtccgggctgcagccgtcaccgctcttgccaagtttggtgtaggccagaaggaccccgaagtaaagcgaagcgtcgatgtcctcctaacaaggtgtttggatgatgtggatgacgaggttcgcgaccgcgctgccctcaacctcagactaatgcacgaggaagacgacatgggcgagcgattcatcaagaatgaaaacatgtactctctgccctacttcgagcaccagctggttatgtacgtgacggccgatgacaagtcagccttcgacactccattcgacatcagcaaaattcctgtggtcacgcgggaacaagccgatgccgaggaccgcacaaagaagctcaccgctacgacaccatccctcaagcctcccaagaccggaccatccagatctgcgcccacaggagcggaggcacaagcttccgcagctgcagcagcccagaaatatgcccaggagcttatggccatcccagatttggctggcttcgggggtcttctcaagtcatcgcctgttgttgagcttactgaagccgagacggagtatgttgtcacagtggtcaagcacatcttcaaggaacacattgtgcttcagtacgaggtcaagaacacgctcccagataccgtgctagagaacgtggctgtcgtagctacaccggcggaagaagaggagctcgaggaagtctttattattcccgccgataagcttacgacagatgaacctggcaagatatatgttgcattcaagaagactgctggcgaaggctctatgcctgccagctccttctcgaacgttctcaagttcaccagcaaggagattgacccgacgacgaatgaacctgaggagactggatatgatgacgagtatgaggtgggagacttcgacctggcgggcagcgactatgttatacccacttttgctggcaacttcaaccacatttgggagcaagttggagcatctggagaagaggctgatgagacattacaattgtccagcatgaagagcatcgcagaggctacagaacaattgacgaaggcattatcactacagccattagaaggcacagacgtgccagtcaaccagacgacacatcaactcaagctgttgggcaagacggtcaacggcggacgggtggttgccaacatcagaatggcctactcgtccaagtcgggagtgacgaccaagataatagtccgcagcgaggaggagaatgtggccgccatggtcatcggctcggttgcgtaa

SEQ ID NO: 33404 - protein, 917 aa, Muscodor strobelii
  misc_feature: SGI Peptide ID NO. 571522
  misc_feature (18)..(558): Pfam Id: PF01602 Pfam Desc: Adaptin N terminal region
  misc_feature (649)..(917): Pfam Id: PF08752 Pfam Desc: Coatomer gamma subunit appendage domain
  misc_feature (1)..(917): NCBI GI: 46129310 Blast Desc: FG08840.1 [Gibberella zeae PH-1]
  misc_feature (1)..(917): NCBI GI: 256734188 Blast Desc: [Nectria haematococca mpVI 77-13-4]
  misc_feature (1)..(917): NCBI GI: 154322170 Blast Desc: BC1G_01232 [Botryotinia fuckeliana B05.10] gi|150850479|gb|EDN25672.1| BC1G_01232 [Botryotinia fuckeliana B05.10]
  misc_feature (1)..(917): NCBI GI: 171685111 Blast Desc: protein product [Podospora anserina] gi|170942516|emb|CAP68168.1| protein product [Podospora anserina]
  misc_feature (1)..(916): NCBI GI: 39970335 Blast Desc: conserved [Magnaporthe grisea 70-15] gi|145017581|gb|EDK01944.1| conserved [Magnaporthe grisea 70-15]
  misc_feature (1)..(917): NCBI GI: 85115358 Blast Desc: NCU01992 [Neurospora crassa OR74A] gi|28926653|gb|EAA35621.1| NCU01992 [Neurospora crassa OR74A]
  misc_feature (1)..(906): NCBI GI: 116193677 Blast Desc: conserved [Chaetomium globosum CBS 148.51] gi|88182469|gb|EAQ89937.1| conserved [Chaetomium globosum CBS 148.51]
  misc_feature (1)..(917): NCBI GI: 38567064 Blast Desc: related to coatomer gamma-2 subunit [Neurospora crassa]
  misc_feature (1)..(872): NCBI GI: 156060825 Blast Desc: SS1G_02555 [Sclerotinia sclerotiorum 1980] gi|154699959|gb|EDN99697.1| SS1G_02555 [Sclerotinia sclerotiorum 1980]
  misc_feature (1)..(917): NCBI GI: 261353561 Blast Desc: coatomer subunit gamma-2 [Verticillium albo-atrum VaMs.102]
MSYGKKDEDADLGLVKVDRTQVFQEARLFNSSPIQPRRCRILLTKIALLLYTGEKFPTNEATTLFFGISKLFQNKDASLRQMVHLVIKELANSAEDIIMVTSTIMKDTGGSTDVIYRPNAIRALCRIIDATTVQSIERVMKTAIVDKNPSVSSAALVSSYHLLPIAKDVVRRWQSETQEAAASAKSSGGFSFGLSSSSGSLPMNNSTMTQYHAIGLLYQMRSHDRMALVKMVQQFGAAGAVKSPAAIVMLVRLAAQLAEEDQSLRKPMMQLLDGWLRHKSEMVNFEAAKAICDMRDVTDAEVNQAVHVLQLFLSSPRAVTKFAALRILHNFASFKPEAVNTCNPDIEALISNSNRSIATFAITTLLKTGNEASVDRLMKQISGFMSEITDEFKITIVEAIRTLCLKFPSKQAGMLAFLSGILRDEGGYEFKRAVVESMFDLIKFVPDSKEDALAHLCEFIEDCEFTKLAVRILHLLGLEGPKTSQPTKYIRYIYNRVVLENAIVRAAAVTALAKFGVGQKDPEVKRSVDVLLTRCLDDVDDEVRDRAALNLRLMHEEDDMGERFIKNENMYSLPYFEHQLVMYVTADDKSAFDTPFDISKIPVVTREQADAEDRTKKLTATTPSLKPPKTGPSRSAPTGAEAQASAAAAAQKYAQELMAIPDLAGFGGLLKSSPVVELTEAETEYVVTVVKHIFKEHIVLQYEVKNTLPDTVLENVAVVATPAEEEELEEVFIIPADKLTTDEPGKIYVAFKKTAGEGSMPASSFSNVLKFTSKEIDPTTNEPEETGYDDEYEVGDFDLAGSDYVIPTFAGNFNHIWEQVGASGEEADETLQLSSMKSIAEATEQLTKALSLQPLEGTDVPVNQTTHQLKLLGKTVNGGRVVANIRMAYSSKSGVTTKIIVRSEEENVAAMVIGSVA

SEQ ID NO: 33405 - DNA, 3254 bp, Muscodor strobelii
  misc_feature: SGI EST ID NO. CUFF.78956.0
  misc_feature: Variant of the nucleotide sequence at SEQ ID NO 33403
cactgcgtagcctggctgtctggacctgacctccgaattaaatgccctatacaccaatccgagaagcacgacatcttcagctttctcgggtacaaccctcctcgccgccaccatgagctacggcaagaaagacgaagatgccgacctcggtctggtcaaggtcgatcgcacccaggtcttccaagaagcccgattgttcaacagctcgcctatccagccgcgaagatgccgaatactcctcaccaagatcgccctcctcctctacacgggcgagaagttcccgaccaacgaagccaccaccctcttcttcggtatctcgaagctcttccagaacaaagatgccagcttacgccagatggtccacctcgtcatcaaggagctggccaactccgccgaggacatcatcatggtcacgagcaccatcatgaaggacaccggcggcagcactgatgtcatataccggcccaatgccatccgagccctgtgtcgtatcatcgatgcgaccaccgtccaatcgatcgagcgagtcatgaagactgctatcgtcgataagaacccctctgtttcctccgccgccctcgtttcctcctaccacctcctccccattgccaaggatgttgttcgaagatggcagtccgagactcaggaggctgctgcctcggccaagtcatctggcggattttccttcggtctctcctcttcctcggggtctctacccatgaacaactcgaccatgacacaataccatgctattggtctcttataccagatgcgatcacacgacagaatggccttagtcaagatggtccagcagttcggtgctgccggtgcggtcaagagcccggctgcgattgtcatgctagtcagactggcggcccagcttgccgaagaggaccagtcactcaggaaaccaatgatgcagctgcttgacgggtggttacgacacaagagcgagatggtcaatttcgaggctgccaaggccatctgcgacatgcgagacgtcaccgacgccgaggtcaaccaggctgtacacgtcctccagctgttcctgtcctcgcccagagccgtcactaagttcgcagctctccgaatcctccacaactttgcgtctttcaaacccgaggctgtaaacacctgtaatcccgacatcgaagccctcatttcgaacagcaatcgctccatcgccacgtttgctatcaccaccctcctcaagaccggcaacgaagccagcgtggacaggctcatgaagcagatttccggcttcatgtctgaaattacagatgagttcaagatcaccatagtagaggcgatccgtactctgtgtctcaagttccccagcaaacaggccggcatgcttgccttcctcagcgggatcctccgcgacgagggcggctacgaattcaagcgcgcggttgtcgagagcatgtttgatcttatcaagtttgttcccgattccaaggaggatgctcttgcccatctgtgcgaattcatcgaagactgcgagttcaccaagctcgctgtgcgcatcctgcatttgcttggtctcgagggtcccaagacgtcgcagccaaccaaatacatacgctacatctacaaccgtgttgttctggagaacgccatcgtccgggctgcagccgtcaccgctcttgccaagtttggtgtaggccagaaggaccccgaagtaaagcgaagcgtcgatgtcctcctaacaaggtgtttggatgatgtggatgacgaggttcgcgaccgcgctgccctcaacctcagactaatgcacgaggaagacgacatgggcgagcgattcatcaagaatgaaaacatgtactctctgccctacttcgagcaccagctggttatgtacgtgacggccgatgacaagtcagccttcgacactccattcgacatcagcaaaattcctgtggtcacgcgggaacaagccgatgccgaggaccgcacaaagaagctcaccgctacgacaccatccctcaagcctcccaagaccggaccatccagatctgcgcccacaggagcggaggcacaagcttccgcagctgcagcagcccagaaatatgcccaggagcttatggccatcccagatttggctggcttcgggggtcttctcaagtcatcgcctgttgttgagcttactgaagccgagacggagtatgttgtcacagtggtcaagcacatcttcaaggaacacattgtgcttcagtacgaggtcaagaacacgctcccagataccgtgctagagaacgtggctgtcgtagctacaccggcggaagaagaggagctcgaggaagtctttattattcccgccgataagcttacgacagatgaacctggcaagatatatgttgcattcaagaagactgctggcgaaggctctatgcctgccagctccttctcgaacgttctcaagttcaccagcaaggagattgacccgacgacgaatgaacctgaggagactggatatgatgacgagtatgaggtgggagacttcgacctggcgggcagcgactatgttatacccacttttgctggcaacttcaaccacatttgggagcaagttggagcatctggagaagaggctgatgagacattacaattgtccagcatgaagagcatcgcagaggctacagaacaattgacgaaggcattatcactacagccattagaaggcacagacgtgccagtcaaccagacgacacatcaactcaagctgttgggcaagacggtcaacggcggacgggtggttgccaacatcagaatggcctactcgtccaagtcgggagtgacgaccaagataatagtccgcagcgaggaggagaatgtggccgccatggtcatcggctcggttgcgtaatgaaatgtgggttctcagagggtagcggcgttatcgtactgcaaaatctggctagcgcaaagtcgtttcaatttcgaggatacgcattcatagattctgggattggaatggtctttctattgcgaaggcaataagatgctatggtgatgggtgaaatgagtcggccgactattcatgaccggctcaatttgctaagccggagcagaatgttgaagaaaagggggaagtcagaagcatcatgattagagagaatagcatagtggaagaagacaaatcgtgatactaaaaaggaacagatcactaaaacttgtctatgatatccccatcacggtagactgttcctcgtataagcaacctggactccaaggtccattgtcgcgaacctcac

SEQ ID NO: 33406 - DNA, 1482 bp, Muscodor strobelii
  misc_feature: SGI cDNA ID NO. 571523
  misc_feature: Encodes the peptide sequence at SEQ ID NO 33407
atgacggtcgacccagagccttttgctcctggctcggccagtcttattcaagatgagtctcagctcgcgacatggacacctctcttctggaagaagtgtacctttgatcgcgacatttttcagggagtcatgaataacctcattctgaatcctaacatcaactcgtcttggcttttccgagcggacattctgctggagcaacagggtaacaatgaatatcatggcgacgacacggctcttcaacctatcattgttcacttcaaggattttcgcttgaatagattgttggttcgcaaacttgttccacgaaatccccaacgagactcagatctagaccagacatgtctgttttacaagagcacagagctcaacgagacggtctcccgtacattagtggtctacaagccccattgttctcattctgatatgcccttttaccatccgaaagtccaaggcattgcgtacttgcatgaatgggaccatcgaagtggtgaaggtaccatttccactcattatcactattttgatgatctggctccggatacgaagctgacgaggaccggtctctacctattatctacattgtctaaacacggcgaagggcgcaataaaggctacgtcaagcgagttcatcatgatactattataccgcagatcacactccagtcaacttacacgagattaaaaaagaagtacgcccggagactgatccaagaatgggcggaggtgacagatcctgaaaaacacgtctttgaggaccttgggatagcatcttttcttatcgagctttgggctcagatgtataaagagagcccattccctggattcgtggatatcggatgtggaaacggcttacttgtgtacctcctccgcgccgaagggtatcctggctggggatttgatgcgcgacagcgcaagtcttgggagaactacaacgaagtgatcaatacaaatggtgacggcgaaccgcacgatagtcttcgacaactggtactactaccttcggtgctccagaacgtggcggagttagatggaattgatgcagagctcgcaggccgagtacatgatggcctgctcctgcgtgggaccttcatcatctcgaaccatgccgacgaacttacgccgtggacgcccatactggctgccgtttctgactgtcctttcattatgataccatgctgctcccatgacttgacaggcgctcgatttagggcagctgcgccgaaggataaagacaagtcatcgtcggcgtactcatcattggtagagtgggtgaagcagcttgcagttgactgcaattgggcagtggaaacagaaatgatgaggatacccacgacgaggaacacaggaatcgtaggaagacgccgtattgacgagacagtatctgtcgacattccagatcttttatctagatatggtggtactggaggatttgtcgagaatgtgctcaagctagtgaagacttcaccaagaggacattga

SEQ ID NO: 33407 - protein, 493 aa, Muscodor strobelii
  misc_feature: SGI Peptide ID NO. 571523
  misc_feature (215)..(456): Pfam Id: PF07757 Pfam Desc: Domain of function (DUF1613)
  misc_feature (222)..(311): Pfam Id: PF07757 Pfam Desc: Domain of function (DUF1613)
  misc_feature (364)..(456): Pfam Id: PF07757 Pfam Desc: Domain of function (DUF1613)
  misc_feature (1)..(493): NCBI GI: 116193695 Blast Desc: CHGG_06565 [Chaetomium globosum CBS 148.51] gi|88182478|gb|EAQ89946.1| CHGG_06565 [Chaetomium globosum CBS 148.51]
  misc_feature (1)..(493): NCBI GI: 256734222 Blast Desc: NECHADRAFT_35510 [Nectria haematococca mpVI 77-13-4]
  misc_feature (4)..(493): NCBI GI: 46129388 Blast Desc: FG08879.1 [Gibberella zeae PH-1] gi|115311882|sp|Q4I1M9.1|TRM44_GIBZE RecName: Full=tRNA (uracil-O(2)-)-methyltransferase
  misc_feature (25)..(489): NCBI GI: 38567074 Blast Desc: conserved [Neurospora crassa]
  misc_feature (25)..(489): NCBI GI: 74618122 Blast Desc: conserved [Neurospora crassa]
  misc_feature (23)..(493): NCBI GI: 171676075 Blast Desc: protein product [Podospora anserina] gi|170936103|emb|CAP60763.1| protein product [Podospora anserina]
  misc_feature (5)..(493): NCBI GI: 154305765 Blast Desc: BC1G_07697 [Botryotinia fuckeliana B05.10] gi|150853216|gb|EDN28408.1| BC1G_07697 [Botryotinia fuckeliana B05.10]
  misc_feature (139)..(493): NCBI GI: 156031174 Blast Desc: SS1G_14195 [Sclerotinia sclerotiorum 1980] gi|154700586|gb|EDO00325.1| SS1G_14195 [Sclerotinia sclerotiorum 1980]
  misc_feature (7)..(459): NCBI GI: 189198710 Blast Desc: conserved [Pyrenophora tritici-repentis Pt-1C-BFP] gi|187982791|gb|EDU48279.1| conserved [Pyrenophora tritici-repentis Pt-1C-BFP]
  misc_feature (10)..(493): NCBI GI: 146413751 Blast Desc: PGUG_04801 [Pichia guilliermondii ATCC 6260]
MTVDPEPFAPGSASLIQDESQLATWTPLFWKKCTFDRDIFQGVMNNLILNPNINSSWLFRADILLEQQGNNEYHGDDTALQPIIVHFKDFRLNRLLVRKLVPRNPQRDSDLDQTCLFYKSTELNETVSRTLVVYKPHCSHSDMPFYHPKVQGIAYLHEWDHRSGEGTISTHYHYFDDLAPDTKLTRTGLYLLSTLSKHGEGRNKGYVKRVHHDTIIPQITLQSTYTRLKKKYARRLIQEWAEVTDPEKHVFEDLGIASFLIELWAQMYKESPFPGFVDIGCGNGLLVYLLRAEGYPGWGFDARQRKSWENYNEVINTNGDGEPHDSLRQLVLLPSVLQNVAELDGIDAELAGRVHDGLLLRGTFIISNHADELTPWTPILAAVSDCPFIMIPCCSHDLTGARFRAAAPKDKDKSSSAYSSLVEWVKQLAVDCNWAVETEMMRIPTTRNTGIVGRRRIDETVSVDIPDLLSRYGGTGGFVENVLKLVKTSPRGH

SEQ ID NO: 33408 - DNA, 2005 bp, Muscodor strobelii
  misc_feature: SGI EST ID NO. CUFF.78952.0
  misc_feature: Variant of the nucleotide sequence at SEQ ID NO 33406
catgaacatgcattatagaaagcggttcaaactgagtcagaattatctagtcataatcctagcatatttttttcatcagtcattcaaagcttcgtgcctcgttattgatgaactttaatctttctcaaacatgcgaatttcggttggcttcagtatgtacctgatgttctctactgacgtatctccgcgccgaataaatttactcgcaccatgttagaccatagtttgatccacaaacttatgggtgacccgacgattctttgtgtttctactactatgtcgactttaacatcaccattaggccaaatgtctgcattctagaatctgaacacaaaatgttgcaccgtcccacgatcgaacatgctctcaccgttagacctgtataataacggccgtggaaatgacggtcgacccagagccttttgctcctggctcggccagtcttattcaagatgagtctcagctcgcgacatggacacctctcttctggaagaagtgtacctttgatcgcgacatttttcagggagtcatgaataacctcattctgaatcctaacatcaactcgtcttggcttttccgagcggacattctgctggagcaacagggtaacaatgaatatcatggcgacgacacggctcttcaacctatcattgttcacttcaaggattttcgcttgaatagattgttggttcgcaaacttgttccacgaaatccccaacgagactcagatctagaccagacatgtctgttttacaagagcacagagctcaacgagacggtctcccgtacattagtggtctacaagccccattgttctcattctgatatgcccttttaccatccgaaagtccaaggcattgcgtacttgcatgaatgggaccatcgaagtggtgaaggtaccatttccactcattatcactattttgatgatctggctccggatacgaagctgacgaggaccggtctctacctattatctacattgtctaaacacggcgaagggcgcaataaaggctacgtcaagcgagttcatcatgatactattataccgcagatcacactccagtcaacttacacgagattaaaaaagaagtacgcccggagactgatccaagaatgggcggaggtgacagatcctgaaaaacacgtctttgaggaccttgggatagcatcttttcttatcgagctttgggctcagatgtataaagagagcccattccctggattcgtggatatcggatgtggaaacggcttacttgtgtacctcctccgcgccgaagggtatcctggctggggatttgatgcgcgacagcgcaagtcttgggagaactacaacgaagtgatcaatacaaatggtgacggcgaaccgcacgatagtcttcgacaactggtactactaccttcggtgctccagaacgtggcggagttagatggaattgatgcagagctcgcaggccgagtacatgatggcctgctcctgcgtgggaccttcatcatctcgaaccatgccgacgaacttacgccgtggacgcccatactggctgccgtttctgactgtcctttcattatgataccatgctgctcccatgacttgacaggcgctcgatttagggcagctgcgccgaaggataaagacaagtcatcgtcggcgtactcatcattggtagagtgggtgaagcagcttgcagttgactgcaattgggcagtggaaacagaaatgatgaggatacccacgacgaggaacacaggaatcgtaggaagacgccgtattgacgagacagtatctgtcgacattccagatcttttatctagatatggtggtactggaggatttgtcgagaatgtgctcaagctagtgaagacttcaccaagaggacattgatactggcccgatagactaactgccttcgcgatgtttccgctgaatggactcggcatgagtgaggaaagcgtagcgagacaatgagtcagaagaatatagacttgaaatttgaatcttccgtcg

SEQ ID NO: 33409 - DNA, 348 bp, Muscodor strobelii
  misc_feature: SGI cDNA ID NO. 571524
  misc_feature: Encodes the peptide sequence at SEQ ID NO 33410
atgtccatcgaaaatctcaagacttacgatccgttcgccgaggcggacgaaactcctgttggcgaaaccaagcagaaacaagacaacgtccacatccgcatccaacagcgcaatggacgcaagaccttgaccactgttcagggcttgcccaccaagttcgaccgcaagaagattctcaaggtcatcaagaagaagttcgcttgcaatggcacaatcgtcgtcgactctgaaatgggcgaggtgatccagctccagggcgatcagcgcaactacgtccatcagttcctcaccgacaaggaagacggcctggagctagatcccaagaccatcaaggtccacggtttctaa

SEQ ID NO: 33410 - protein, 115 aa, Muscodor strobelii
  misc_feature: SGI Peptide ID NO. 571524
  misc_feature (24)..(107): Pfam Id: PF01253 Pfam Desc: Translation initiation factor SUI1
  misc_feature (24)..(99): Pfam Id: PF01253 Pfam Desc: Translation initiation factor SUI1
  misc_feature (3)..(115): NCBI GI: 171676077 Blast Desc: protein product [Podospora anserina] gi|170936104|emb|CAP60764.1| protein product [Podospora anserina]
  misc_feature (1)..(115): NCBI GI: 164429603 Blast Desc: protein translation factor sui1 [Neurospora crassa OR74A] gi|38567073|emb|CAE76370.1| translation initiation factor SUI1 [Neurospora crassa] gi|157073546|gb|EAA35109.2| protein sui1
  misc_feature (1)..(115): NCBI GI: 240275161 Blast Desc: anaphase-promoting complex subunit Apc5 [Ajellomyces capsulatus H143]
  misc_feature (1)..(115): NCBI GI: 145615898 Blast Desc: translation initiation factor SUI1 [Magnaporthe grisea 70-15] gi|145009684|gb|EDJ94340.1| translation initiation factor SUI1 [Magnaporthe grisea 70-15]
  misc_feature (1)..(115): NCBI GI: 115402627 Blast Desc: ATEG_08804 [Aspergillus terreus NIH2624] gi|169780044|ref|XP_001824486.1| [Aspergillus oryzae RIB40] gi|238505914|ref|XP_002384159.1| translation initiation factor
  misc_feature (1)..(115): NCBI GI: 71000597 Blast Desc: translation initiation factor SUI1 [Aspergillus fumigatus Af293] gi|119493241|ref|XP_001263827.1| translation initiation factor SUI1, [Neosartorya fischeri NRRL 181] factor
  misc_feature (1)..(115): NCBI GI: 46129390 Blast Desc: FG08880.1 [Gibberella zeae PH-1]
  misc_feature (1)..(115): NCBI GI: 256733724 Blast Desc: [Nectria haematococca mpVI 77-13-4]
  misc_feature (1)..(115): NCBI GI: 121704762 Blast Desc: translation initiation factor SUI1, [Aspergillus clavatus NRRL 1] gi|145245399|ref|XP_001394967.1| An11g10090 [Aspergillus niger] gi|119398790|gb|EAW09218.1| translation SUI1,
  misc_feature (1)..(115): NCBI GI: 119192076 Blast Desc: protein translation factor SUI1 [Coccidioides immitis RS] gi|240106233|gb|EER24426.1| Protein translation factor SUI1, [Coccidioides posadasii C735 delta SOWgp]
MSIENLKTYDPFAEADETPVGETKQKQDNVHIRIQQRNGRKTLTTVQGLPTKFDRKKILKVIKKKFACNGTIVVDSEMGEVIQLQGDQRNYVHQFLTDKEDGLELDPKTIKVHGF

SEQ ID NO: 33411 - DNA, 1242 bp, Muscodor strobelii
  misc_feature: SGI EST ID NO. CUFF.79516.0
  misc_feature: Variant of the nucleotide sequence at SEQ ID NO 33409
cgcatttcctacaaaagcattgcgtacctgcacccagcctttctcttatcttcttcatccacacacttacacaactacagcctcaacacatcgacgactttacatcttccgtaccacaacaccacactttgcgtctgcatagatctcaacagccttctacatctgccatccgcgagactctagtcggtcgcaaccccctcgttcccacccaccgaacccttttccccacgtcacccggaaaactcgagtttatgtccatcgaaaatctcaagacttacgatccgttcgccgaggcggacgaaactcctgttggcgaaaccaagcagaaacaagacaacgtccacatccgcatccaacgtacgttctcctccctctcctagtcttgtcgtgcgcaaaataactcagctcatgcacctcacgtgtggtcacccatggcacctctgagcctgctgtagccccccaccatgtccccacacccacatgttatcacattgctcatgtgacggccgagctgacctacctctcccttccaccagagcgcaatggacgcaagaccttgaccactgttcagggcttgcccaccaagttcgaccgcaagaagattctcaaggtcatcaagaagaagttcgcttgcaatggcacaatcgtcgtcgactctgaaatgggcgaggtgatccagctccagggcgatcagcgcaactacgtccatcagttcctcaccgacaaggaagacggcctggagctagatcccaagaccatcaaggtccacggtttctaagctagccgtgtcccaaccacctaccgttgcaccgacgcactcttccagccacccacggactgtttctgagaatgaacaggcttatctcctgcggtgtctgatgcgataggacggcgtcgcaagctgtccgttcccagtgggacctgggtcccttggttgaggcgttttacggatctggttcggacattgataccctttgatagttgctgatggatttattactatgcgagagttacgagaaaaggactagcatcgtaggaaggggctgtctttgttgtgcgacggcctcgcagcacctagtgacctacggtcaaccaaagccaggcgggcccgtcgttgacagttccagtgctacgatagttagtcaagaaataggagttatctccaacactgatgcgtgttttccctatacgtgatgatattgcatcctattttaagagttgtgctgcgccgccagctgtaac

SEQ ID NO: 33412 - DNA, 972 bp, Muscodor strobelii
  misc_feature: SGI cDNA ID NO. 571525
  misc_feature: Encodes the peptide sequence at SEQ ID NO 33413
atgaaacacaaatccaccaccaagtttcccgatccaccggcgagtttcgtggagcggaaaaataagattttggaacggctcgctgagccggacgcagagtactctgatgcctcgcctaaggggtcgatggatgaggggatcagggatttgatcggggagattaacaccctagaggggttcgttacgacgagtagctgtgcggggcgggttagtgtcttcgttgagggacggaagactattgatgatggaggagatggtgatgacggggagaggagcacggtgactacgcttgctgctgtgggtggtaaaggcgctggtgggggttggaagtttgtttctcatgatcctgtggagagtcctggggctgggggtatgaggggattgtttgggcttgagggacgggatgggagggagggtatgggtatgggggagaagatgggggagaggcgggaagaggataggaggttggtgcattttaaatttgagcctatgatcctccacgttctcacagcatcactcgcccacgcgcaactcattctacgctgtggcctgatcgctgggttccgcgaaagcggcgccgtaaacgttacctcgtcctcttccgagcccgtgacgcctatagtggcgatccgatctatgggtctatctttcgagtcactggtcggagtccaggtcaacggcgttactcagtgcacagtctcggacgagtatctgtccactttgctcgacatagcgaacgagcgcttcaaggaaaacaagaagaggatcgagagattccgcaacgctattctagaggtgactagtccgccgaagaagaaggacggcagtgtatgggaagattcggaggcgaggagagagaggatgagagctgagggtttgagacgcaaagcagagatggatagacaggaggctaaagaggctggcatggtggatgaggcgctgtatttggagtttaatgacgatcttacgtag

SEQ ID NO: 33413 - protein, 323 aa, Muscodor strobelii
  misc_feature: SGI Peptide ID NO. 571525
  misc_feature (21)..(268): Pfam Id: PF02676 Pfam Desc: TYW3 like
  misc_feature (21)..(78): Pfam Id: PF02676 Pfam Desc: TYW3 like
  misc_feature (13)..(304): NCBI GI: 46128299 Blast Desc: FG08527.1 [Gibberella zeae PH-1]
  misc_feature (6)..(299): NCBI GI: 261357922 Blast Desc: tRNA wybutosine-synthesizing protein [Verticillium albo-atrum VaMs.102]
  misc_feature (13)..(312): NCBI GI: 256733626 Blast Desc: [Nectria haematococca mpVI 77-13-4]
  misc_feature (15)..(306): NCBI GI: 171684969 Blast Desc: protein product [Podospora anserina] gi|170942445|emb|CAP68097.1| protein product [Podospora anserina]
  misc_feature (13)..(305): NCBI GI: 39943170 Blast Desc: MGG_03665 [Magnaporthe grisea 70-15] gi|145009744|gb|EDJ94400.1| MGG_03665 [Magnaporthe grisea 70-15]
  misc_feature (9)..(308): NCBI GI: 116193647 Blast Desc: CHGG_06541 [Chaetomium globosum CBS 148.51] gi|88182454|gb|EAQ89922.1| CHGG_06541 [Chaetomium globosum CBS 148.51]
  misc_feature (13)..(303): NCBI GI: 67903418 Blast Desc: AN8696.2 [Aspergillus nidulans FGSC A4] gi|40741055|gb|EAA60245.1| AN8696.2 [Aspergillus nidulans FGSC A4]
  misc_feature (16)..(299): NCBI GI: 169609200 Blast Desc: SNOG_07687 [Phaeosphaeria nodorum SN15] gi|160701799|gb|EAT85153.2| SNOG_07687 [Phaeosphaeria nodorum SN15]
  misc_feature (13)..(302): NCBI GI: 115386720 Blast Desc: conserved [Aspergillus terreus NIH2624] gi|114190899|gb|EAU32599.1| conserved [Aspergillus terreus NIH2624]
  misc_feature (9)..(293): NCBI GI: 85115453 Blast Desc: NCU02014 [Neurospora crassa OR74A] gi|28926675|gb|EAA35643.1| conserved [Neurospora crassa OR74A] gi|38566894|emb|CAE76199.1| conserved [Neurospora crassa]
MKHKSTTKFPDPPASFVERKNKILERLAEPDAEYSDASPKGSMDEGIRDLIGEINTLEGFVTTSSCAGRVSVFVEGRKTIDDGGDGDDGERSTVTTLAAVGGKGAGGGWKFVSHDPVESPGAGGMRGLFGLEGRDGREGMGMGEKMGERREEDRRLVHFKFEPMILHVLTASLAHAQLILRCGLIAGFRESGAVNVTSSSSEPVTPIVAIRSMGLSFESLVGVQVNGVTQCTVSDEYLSTLLDIANERFKENKKRIERFRNAILEVTSPPKKKDGSVWEDSEARRERMRAEGLRRKAEMDRQEAKEAGMVDEALYLEFNDDLT

SEQ ID NO: 33414 - DNA, 2122 bp, Muscodor strobelii
  misc_feature: SGI EST ID NO. CUFF.79037.0
  misc_feature: Variant of the nucleotide sequence at SEQ ID NO 33412
catcagttcattccaatatacacaacgctctccatttctgtctagatcgaaacgactttactgtttctattgcccaatatattcttcgcgatcgaaagactgcaaaggccgagtacgcactaaatcagacctaacgctaagttttgacgtacttgtcacacacaacgatgaaacacaaatccaccaccaagtttcccgatccaccggcgagtttcgtggagcggaaaaataagattttggaacggctcgctgagccggacgcagagtactctgatgcctcgcctaaggggtcgatggatgaggggatcagggatttgatcggggagattaacaccctagaggggttcgttacgacgagtagctgtgcggggcgggttagtgtcttcgttgagggacggaagactattgatgatggaggagatggtgatgacggggagaggagcacggtgactacgcttgctgctgtgggtggtaaaggcgctggtgggggttggaagtttgtttctcatgatcctgtggagagtcctggggctgggggtatgaggggattgtttgggcttgagggacgggatgggagggagggtatgggtatgggggagaagatgggggagaggcgggaagaggataggaggttggtgcattttaaatttgagcctatgatcctccacgttctcacagcatcactcgcccacgcgcaactcattctacgctgtggcctgatcgctgggttccgcgaaagcggcgccgtaaacgttacctcgtcctcttccgagcccgtgacgcctatagtggcgatccgatctatgggtctatctttcgagtcactggtcggagtccaggtcaacggcgttactcagtgcacagtctcggacgagtatctgtccactttgctcgacatagcgaacgagcgcttcaaggaaaacaagaagaggatcgagagattccgcaacgctattctagaggtgactagtccgccgaagaagaaggacggcagtgtatgggaagattcggaggcgaggagagagaggatgagagctgagggtttgagacgcaaagcagagatggatagacaggaggctaaagaggctggcatggtggatgaggcgctgtatttggagtttaatgacgatcttacgtagctcaacacagccatttgcggacacgacatgatttcttcgcaggtaggcggtttgcagttcatgtgattatatgcaacggaaagtgaaataaatatgtcgtctatacagctcgcttttgcttttgcttttatgctcagcgtctatttcgtagtgttacagtagagaacacgcatccatccgcgatgcccgatgccatctctccacacgtctctccagttccctggatcatatccatataccctccctctttcctcagtccatctatcgaacaaccctatcaacccactcgcgctccatcctcagcacaccctccttgaaagcctcaacctccttccagcagtcaagcggtcgtctatcgttctccatcagacatttaacgacttcgctctttgcgctctcgacgtaatcgggtaaaggacggagttgtttcctcttgtctagtctagcgcgaagggtctcgacttcggcggatacggtctttcggtcaccctttggcgactcgtcggatccgacttgggaggctttttctctggcggctttgagggcgtcggattcttgggtggagagtttttgcagttccgaggcgacgcgggattggatcaggagctcgaggcgttgggcgcgggatgtgtcgctctggggttttggagggttagctgctgttctaggtatgtagtctgggcccagtcgcaggcgcagagatgggcgcatcggacgatatgggttgggcgtcgatcgggcaaagcttacctcattgctgtgagctaaggagtcgacgacatcctgagaaacgcctacgggacctggtctgaaacggatagcgagaatgtcagcgcattgggttccattcgacaatagggcagtatcaaggtactcacgccttccagacatgatcggcggcaggtttagacgagctcgagcccattgtgtcggctttcaattgctgttgggagttgctcgtgttgcttgcgctgcgctggctg

SEQ ID NO: 33415 - DNA, 480 bp, Muscodor strobelii
  misc_feature: SGI cDNA ID NO. 571526
  misc_feature: Reduced expression when VOC is produced
  misc_feature: Encodes the peptide sequence at SEQ ID NO 33416
atgggctcgagctcgtctaaacctgccgccgatcatgtctggaaggcaccaggtcccgtaggcgtttctcaggatgtcgtcgactccttagctcacagcaatgagagcgacacatcccgcgcccaacgcctcgagctcctgatccaatcccgcgtcgcctcggaactgcaaaaactctccacccaagaatccgacgccctcaaagccgccagagaaaaagcctcccaagtcggatccgacgagtcgccaaagggtgaccgaaagaccgtatccgccgaagtcgagacccttcgcgctagactagacaagaggaaacaactccgtcctttacccgattacgtcgagagcgcaaagagcgaagtcgttaaatgtctgatggagaacgatagacgaccgcttgactgctggaaggaggttgaggctttcaaggagggtgtgctgaggatggagcgcgagtgggttgatagggttgttcgatag

SEQ ID NO: 33416 - protein, 159 aa, Muscodor strobelii
  misc_feature: SGI Peptide ID NO. 571526
  misc_feature (13)..(147): Pfam Id: PF07956 Pfam Desc: Protein of function (DUF1690)
  misc_feature (1)..(158): NCBI GI: 46128297 Blast Desc: FG08526.1 [Gibberella zeae PH-1]
  misc_feature (1)..(158): NCBI GI: 171684971 Blast Desc: protein product [Podospora anserina] gi|170942446|emb|CAP68098.1| protein product [Podospora anserina]
  misc_feature (1)..(158): NCBI GI: 145615956 Blast Desc: MGG_03666 [Magnaporthe grisea 70-15] gi|145009743|gb|EDJ94399.1| MGG_03666 [Magnaporthe grisea 70-15]
  misc_feature (1)..(158): NCBI GI: 116193645 Blast Desc: CHGG_06540 [Chaetomium globosum CBS 148.51] gi|88182453|gb|EAQ89921.1| CHGG_06540 [Chaetomium globosum CBS 148.51]
  misc_feature (12)..(158): NCBI GI: 85115448 Blast Desc: NCU02013 [Neurospora crassa OR74A] gi|28926674|gb|EAA35642.1| [Neurospora crassa OR74A] gi|38566893|emb|CAE76198.1| related to ochre suppressor tyr-tRNA
  misc_feature (12)..(158): NCBI GI: 261357921 Blast Desc: conserved [Verticillium albo-atrum VaMs.102]
  misc_feature (1)..(158): NCBI GI: 226279561 Blast Desc: conserved [Paracoccidioides brasiliensis Pb01]
  misc_feature (1)..(158): NCBI GI: 225678117 Blast Desc: conserved [Paracoccidioides brasiliensis Pb03]
  misc_feature (1)..(158): NCBI GI: 226287615 Blast Desc: conserved [Paracoccidioides brasiliensis Pb18]
  misc_feature (1)..(158): NCBI GI: 145247322 Blast Desc: An12g08590 [Aspergillus niger] gi|134080644|emb|CAK41309.1| protein product [Aspergillus niger]
  misc_feature: Useful for introducing or modulating the production of volatile compounds
MGSSSSKPAADHVWKAPGPVGVSQDVVDSLAHSNESDTSRAQRLELLIQSRVASELQKLSTQESDALKAAREKASQVGSDESPKGDRKTVSAEVETLRARLDKRKQLRPLPDYVESAKSEVVKCLMENDRRPLDCWKEVEAFKEGVLRMEREWVDRVVR

SEQ ID NO: 33417 - DNA, 2003 bp, Muscodor strobelii
  misc_feature: SGI EST ID NO. CUFF.79038.1
  misc_feature: Variant of the nucleotide sequence at SEQ ID NO 33415
cagccagcgcagcgcaagcaacacgagcaactcccaacagcaattgaaagccgacacaatgggctcgagctcgtctaaacctgccgccgatcatgtctggaaggcaccaggtcccgtaggcgtttctcaggatgtcgtcgactccttagctcacagcaatgagagcgacacatcccgcgcccaacgcctcgagctcctgatccaatcccgcgtcgcctcggaactgcaaaaactctccacccaagaatccgacgccctcaaagccgccagagaaaaagcctcccaagtcggatccgacgagtcgccaaagggtgaccgaaagaccgtatccgccgaagtcgagacccttcgcgctagactagacaagaggaaacaactccgtcctttacccgattacgtcgagagcgcaaagagcgaagtcgttaaatgtctgatggagaacgatagacgaccgcttgactgctggaaggaggttgaggctttcaaggagggtgtgctgaggatggagcgcgagtgggttgatagggttgttcgatagatggactgaggaaagagggagggtatatggatatgatccagggaactggagagacgtgtggagagatggcatcgggcatcgcggatggatgcgtgttctctactgtaacactacgaaatagacgctgagcataaaagcaaaagcaaaagcgagctgtatagacgacatatttatttcactttccgttgcatataatcacatgaactgcaaaccgcctacctgcgaagaaatcatgtcgtgtccgcaaatggctgtgttgagctacgtaagatcgtcattaaactccaaatacagcgcctcatccaccatgccagcctctttagcctcctgtctatccatctctgctttgcgtctcaaaccctcagctctcatcctctctctcctcgcctccgaatcttcccatacactgccgtccttcttcttcggcggactagtcacctctagaatagcgttgcggaatctctcgatcctcttcttgttttccttgaagcgctcgttcgctatgtcgagcaaagtggacagatactcgtccgagactgtgcactgagtaacgccgttgacctggactccgaccagtgactcgaaagatagacccatagatcggatcgccactataggcgtcacgggctcggaagaggacgaggtaacgtttacggcgccgctttcgcggaacccagcgatcaggccacagcgtagaatgagttgcgcgtgggcgagtgatgctgtgagaacgtggaggatctggtaatcgtcagtatagttggaacaatagtcgcgataagatgagataggatataagacctcaccataggctcaaatttaaaatgcaccaacctcctatcctcttcccgcctctcccccatcttctcccccatacccataccctccctcccatcccgtccctcaagcccaaacaatcccctcatacccccagccccaggactctccacaggatcatgagaaacaaacttccaacccccaccagcgcctttaccacccacagcagcaagcgtagtcaccgtgctcctctccccgtcatcaccatctcctccatcatcaatagtcttccgtccctcaacgaagacactaacccgccccgcacagctactcgtcgtaacgaacccctctagggtgttaatctccccgatcaaatccctgatcccctcatccatcgaccccttaggcgaggcatcagagtactctgcgtccggctcagcgagccgttccaaaatcttatttttccgctccacgaaactcgccggtggatcgggaaacttggtggtggatttgtgtttcatcgttgtgtgtgacaagtacgtcaaaacttagcgttaggtctgatttagtgcgtactcggcctttgcagtctttcgatcgcgaagaatatattgggcaatagaaacagtaaagtcgtttcgatctagacagaaatggagagcgttgtgtatattggaatgaactgatg

SEQ ID NO: 33418 - DNA, 237 bp, Muscodor strobelii
  misc_feature: SGI cDNA ID NO. 571527
  misc_feature: Encodes the peptide sequence at SEQ ID NO 33419
atggagaaagcgctgatgaactttagtttgggctaccagagacacagtttgaccgctgccttggctggcgcccagaacgcacgaaagtcaaacgccgagtacgatcgaatcgtccgagcgaggcagcccttgggccgtctagtttaccatcatggtcatgggttggatggcaaggaattgttgatattgagtgccgctatgaagcgttggagtgccgtgccatctacgatcaattag

SEQ ID NO: 33419 - protein, 78 aa, Muscodor strobelii
  misc_feature: SGI Peptide ID NO. 571527
MEKALMNFSLGYQRHSLTAALAGAQNARKSNAEYDRIVRARQPLGRLVYHHGHGLDGKELLILSAAMKRWSAVPSTIN

SEQ ID NO: 33420 - DNA, 345 bp, Muscodor strobelii
  misc_feature: SGI cDNA ID NO. 571528
  misc_feature: Encodes the peptide sequence at SEQ ID NO 33421
atggctgaccctccggtttcctctcaacagaccgactcggacagaattgctgaggcttcacaagccctagctgacatgtgcctcgcaatcgcaccccaagtcatgcaagtcgcgacgaaggtgattggtcatgcctcagatggcatctactctcgcgagacgcttcagtacgtcgaggagcctacccgaaacttcaaggccctgagccagaaccacgtccggctggccaatggaagcttccgcaccaaggcccagatggatgaggctatcgacaagatgcagcagctgatggccaccactgagcagggcttggccaccctcaccactcgcctccagtccgagtaa

SEQ ID NO: 33421 - protein, 114 aa, Muscodor strobelii
  misc_feature: SGI Peptide ID NO. 571528
MADPPVSSQQTDSDRIAEASQALADMCLAIAPQVMQVATKVIGHASDGIYSRETLQYVEEPTRNFKALSQNHVRLANGSFRTKAQMDEAIDKMQQLMATTEQGLATLTTRLQSE

SEQ ID NO: 33422 - DNA, 2010 bp, Muscodor strobelii
  misc_feature: SGI cDNA ID NO. 571529
  misc_feature: Encodes the peptide sequence at SEQ ID NO 33423
atgactagcaacgctcagtccgccaagatcaagggcggcaaaggtcgctctgactctgtgtcctcaagtgattcagatggccctagaggaggaggagcccccctccatcctcgcatggagggtctctctgtcagcagcactgctgactcggccccctcggccccctcctcggacgagatcattcgcactggatccgctatcaacattacccagctgcatcaccaacgcaaggttcatgcctctgtatcatacccagaattccagcttggcaaccgccgtcgagacgaggaggatgtattctcgtctagctccgtcaccactgctcctcagcagcaagctactggcggcgctctcatccgagctcctagccaggccattacaacgaccggagccgtcgtccgagctcccgctgagaacgctgctgatgcaggagctctggtccgagctccgactgacgctacaactatcactcgtgcggagaccgtgatgatgtctccctcagatgttgtacccgtccgcaacctgaaccctgtgaatgaacgcaatcgggtagaaggcgtagatgcgcaggcttattacctaccagaggcttgccttttcattgccaaccttcctgagaacaaggatgatcagactctcgaggtctccgtcactagagccttctctaatttcggcccggtgtttgtgaagattcgtcgcgatggcaagaatatgccatttgccttctgtcagtacacaagcgtccattctgctcagcgtgcgcttgcagatggaaaaggcctcttcattgagggccgaccctgtcgcaccgaaatggttaaggctaatcgtacctacgtcatgcgtagccgtggcactctccgtctgcctgtgattgcagatttgcgccaagtgctcattgtatttggtgaaatcgaggctttggagccgttggcccacgacgcagctagaatcatgggaatcgagtcgtatgacgcagtctacattcgctttcaacgctttgaccctgctcgcgacattgttgccgcctataaacacaaccaaatggtggaagtccgcccgtatgagcttcaggcgcctagccagcagtctcgcgaggagcgtaacacgatgtatctgcagcgttatgaggtcgatcgacgctctatctatgttggcaatctgccatcggagatcgacaatattagcgaggtcctacgcggagtcgcgagtgattatggtcgtgtccagtccgtgcagctagtcgaaaagccaggccgcaatggtggacgggttaacatgtttggcttcgtggagttttcccgacctgatgaggccatcaatgcagtcggacgcatgcggggcataatgatcaagggccagcagctccgcgtcgagccgaagaattcgaggtccggacccatgtcctttggtggtcacaacagaactcccaagatcgagagccccggccctagctatgcaggtggaaaccaggagatgcagcagagcccagttgatagtcgtcggcgcatcctccctcgccaaggtggagcaagtctccgtcccgaaagctctgctcgcccggagattcatcctgcaaccccagcacgcctccctcctcaggctgccacccgcaacgaccgtagacatggcgatcagtacggatcaggcaccgtaatctacccgcctcgtcaggcataccagccaacccagcagcatcaggtccacacccaagcccagtacggcgcccagactggtcatctccagcccgctacaccgcacgctgcccccactgcttaccatcaggcgtctcctggttttttcccaactccttatctccaggataacaataacagagttggcaacagctatgccggctacggcaatttccacgagggctacggtcatggtcatgtcgaccaccagcctgcacagattgttcaggctccagttcgtgctcgtcgccaggccgatcacactgccagtggcaaccagcgtgaccgaatgtctcgctccgaaggtggcaaataa

SEQ ID NO: 33423 - protein, 669 aa, Muscodor strobelii
  misc_feature: SGI Peptide ID NO. 571529
  misc_feature (383)..(458): Pfam Id: PF00076 Pfam Desc: RNA recognition motif. (a.k.a. RRM, RBD, or RNP domain)
  misc_feature (199)..(270): Pfam Id: PF00076 Pfam Desc: RNA recognition motif. (a.k.a. RRM, RBD, or RNP domain)
  misc_feature (159)..(464): NCBI GI: 116193703 Blast Desc: CHGG_06569 [Chaetomium globosum CBS 148.51] gi|88182482|gb|EAQ89950.1| CHGG_06569 [Chaetomium globosum CBS 148.51]
  misc_feature (179)..(465): NCBI GI: 154291699 Blast Desc: BC1G_15140 [Botryotinia fuckeliana B05.10] gi|150846640|gb|EDN21833.1| BC1G_15140 [Botryotinia fuckeliana B05.10]
  misc_feature (176)..(466): NCBI GI: 156056533 Blast Desc: [Sclerotinia sclerotiorum 1980] gi|154701783|gb|EDO01522.1| [Sclerotinia sclerotiorum 1980]
  misc_feature (172)..(465): NCBI GI: 85112415 Blast Desc: NCU01976 [Neurospora crassa OR74A] gi|28926118|gb|EAA35104.1| [Neurospora crassa OR74A] gi|38567078|emb|CAE76375.1| [Neurospora crassa]
  misc_feature (187)..(459): NCBI GI: 46129396 Blast Desc: FG08883.1 [Gibberella zeae PH-1]
  misc_feature (188)..(459): NCBI GI: 261353454 Blast Desc: conserved [Verticillium albo-atrum VaMs.102]
  misc_feature (188)..(465): NCBI GI: 256733725 Blast Desc: NECHADRAFT_78130 [Nectria haematococca mpVI 77-13-4]
  misc_feature (187)..(425): NCBI GI: 171676091 Blast Desc: protein product [Podospora anserina] gi|170936111|emb|CAP60771.1| protein product [Podospora anserina]
  misc_feature (178)..(461): NCBI GI: 145615892 Blast Desc: MGG_03722 [Magnaporthe grisea 70-15] gi|145009680|gb|EDJ94336.1| MGG_03722 [Magnaporthe grisea 70-15]
  misc_feature (187)..(459): NCBI GI: 254564669 Blast Desc: [Pichia pastoris GS115] gi|238029241|emb|CAY67164.1| [Pichia pastoris GS115]
MTSNAQSAKIKGGKGRSDSVSSSDSDGPRGGGAPLHPRMEGLSVSSTADSAPSAPSSDEIIRTGSAINITQLHHQRKVHASVSYPEFQLGNRRRDEEDVFSSSSVTTAPQQQATGGALIRAPSQAITTTGAVVRAPAENAADAGALVRAPTDATTITRAETVMMSPSDVVPVRNLNPVNERNRVEGVDAQAYYLPEACLFIANLPENKDDQTLEVSVTRAFSNFGPVFVKIRRDGKNMPFAFCQYTSVHSAQRALADGKGLFIEGRPCRTEMVKANRTYVMRSRGTLRLPVIADLRQVLIVFGEIEALEPLAHDAARIMGIESYDAVYIRFQRFDPARDIVAAYKHNQMVEVRPYELQAPSQQSREERNTMYLQRYEVDRRSIYVGNLPSEIDNISEVLRGVASDYGRVQSVQLVEKPGRNGGRVNMFGFVEFSRPDEAINAVGRMRGIMIKGQQLRVEPKNSRSGPMSFGGHNRTPKIESPGPSYAGGNQEMQQSPVDSRRRILPRQGGASLRPESSARPEIHPATPARLPPQAATRNDRRHGDQYGSGTVIYPPRQAYQPTQQHQVHTQAQYGAQTGHLQPATPHAAPTAYHQASPGFFPTPYLQDNNNRVGNSYAGYGNFHEGYGHGHVDHQPAQIVQAPVRARRQADHTASGNQRDRMSRSEGGK

SEQ ID NO: 33424 - DNA, 1584 bp, Muscodor strobelii
  misc_feature: SGI cDNA ID NO. 571530
  misc_feature: Encodes the peptide sequence at SEQ ID NO 33425
atgggtcaaccatcctttgcggcttcgaatgccatcatatatgtgacctatggggtcttcttaatatttggaacagccttagcttggggcatgagaaaacaatccaagtctgacttcttggctggaaacagaacgcagaaggcatttcctctggcgctcaatttcatcgccgctggtctaggatccggtattctgttctcgtacccgcagctagctgtgcttgccggcctccaaggcgtgatcgtttacgccattgcgtctgctctgccactaatgatctttgcggctgttacaccaatcattcgaaagaagtgcccacaaggatttgtgcttacggaatgggtacgccagcggttcggcatcgtcacagcattgtacttgagtgctctgactctcctaacgctgttcctatacatggtgtcagagctctcggccatcggccaagtcgtcacggcgttgacgggcctggatggtctgcctgtcgtcatagtcgaagctgtagtcacaacggtctacacatcactcggcggattcaagatatccttcatcaccgataacatccaaggtgcaatgatcgtcggtctcatcctcattgccactattactatcggcgtaaagacggagatcaagccagaccttgtcgaaagcactcatcttctcgacgcaagcctcatcggatggcagctgatctatattcttcccgtggctgtactcacgaacgacttctttctcgccaatttttggctacgtgcttttgcatctaggaccgacagagatctttggatcggcatttcgatggctgccgtgatcatcttcgttattctgcttctcgtcggggtgtctggcttgatatctgtatggtcgggcgcctggcctggcaatcctccggatgaggatggctcggtcgccttcttcctactcttagaacagcttcccaattgggttgttggtattgtccttgtaatgtctgttggtttgagcaccgcgtctttcgacagtattcagtctgccatggtctccaccgcatcgaacgacctcttccgaaaccgactcaacatctggtgggttcgaggtggcgtcgttctcatcatcatccccgtcatcgttctcgcgatcaaggcaccgagtatcttgcagatctacttgatttccgatctcttgtctgcttcgactattccagtcctcatgatcggtctgtctgatcgcttccactggtggcgcggctttgaggttgttgtcggtggtctcggtggaatcttaaccgttttcatcttcggtgctatctactacgacgacgtacaaaagggtgccgacctcattctccttgagcaagggctatacactggtgactggggtgctttcggtgcctttgtcgctgcacctgttggtggaatcatttggggcttcattgcacttggcctccgtcttgcgttccagttcacgcagtcaaagatccgaggcactcacttcgatgctctagatcgccctatcgaagccgccgccgccggagagcaaggcagattcagccctgttgagacacaggatgaagtggcatctgccaagtccactggcaagttcttctaa

SEQ ID NO: 33425 - protein, 527 aa, Muscodor strobelii
  misc_feature: SGI Peptide ID NO. 571530
  misc_feature (39)..(418): Pfam Id: PF00474 Pfam Desc: Sodium:solute symporter family
  misc_feature (24)..(527): NCBI GI: 164429597 Blast Desc: NCU11204 [Neurospora crassa OR74A] gi|157073543|gb|EAA35105.2| conserved [Neurospora crassa OR74A]
  misc_feature (1)..(527): NCBI GI: 256733726 Blast Desc: [Nectria haematococca mpVI 77-13-4]
  misc_feature (1)..(527): NCBI GI: 46129398 Blast Desc: FG08884.1 [Gibberella zeae PH-1]
  misc_feature (47)..(527): NCBI GI: 145615894 Blast Desc: MGG_03721 [Magnaporthe grisea 70-15] gi|145009681|gb|EDJ94337.1| MGG_03721 [Magnaporthe grisea 70-15]
  misc_feature (53)..(527): NCBI GI: 171676089 Blast Desc: protein product [Podospora anserina] gi|170936110|emb|CAP60770.1| protein product [Podospora anserina]
  misc_feature (59)..(495): NCBI GI: 239613852 Blast Desc: urea transporter [Ajellomyces dermatitidis ER-3]
  misc_feature (70)..(527): NCBI GI: 38567077 Blast Desc: [Neurospora crassa]
  misc_feature (46)..(496): NCBI GI: 226279275 Blast Desc: urea transport protein [Paracoccidioides brasiliensis Pb01]
  misc_feature (77)..(495): NCBI GI: 154286680 Blast Desc: conserved [Ajellomyces capsulatus NAm1] gi|150407776|gb|EDN03317.1| conserved [Ajellomyces capsulatus NAm1]
  misc_feature (80)..(505): NCBI GI: 258573539 Blast Desc: conserved [Uncinocarpus reesii 1704] gi|237901217|gb|EEP75618.1| conserved [Uncinocarpus reesii 1704]
MGQPSFAASNAIIYVTYGVFLIFGTALAWGMRKQSKSDFLAGNRTQKAFPLALNFIAAGLGSGILFSYPQLAVLAGLQGVIVYAIASALPLMIFAAVTPIIRKKCPQGFVLTEWVRQRFGIVTALYLSALTLLTLFLYMVSELSAIGQVVTALTGLDGLPVVIVEAVVTTVYTSLGGFKISFITDNIQGAMIVGLILIATITIGVKTEIKPDLVESTHLLDASLIGWQLIYILPVAVLTNDFFLANFWLRAFASRTDRDLWIGISMAAVIIFVILLLVGVSGLISVWSGAWPGNPPDEDGSVAFFLLLEQLPNWVVGIVLVMSVGLSTASFDSIQSAMVSTASNDLFRNRLNIWWVRGGVVLIIIPVIVLAIKAPSILQIYLISDLLSASTIPVLMIGLSDRFHWWRGFEVVVGGLGGILTVFIFGAIYYDDVQKGADLILLEQGLYTGDWGAFGAFVAAPVGGIIWGFIALGLRLAFQFTQSKIRGTHFDALDRPIEAAAAGEQGRFSPVETQDEVASAKSTGKFF

SEQ ID NO: 33426 - DNA, 2277 bp, Muscodor strobelii
  misc_feature: SGI EST ID NO. CUFF.79158.0
  misc_feature: Variant of the nucleotide sequence at SEQ ID NO 33424
tacggctggagctaaagagacctagtaatgtctcgtaaacaccattcattgctgattgaaagaaatttgccgtctcctcgacagaccttacgcggtgcaaactcactcatatttgatttctgtcgaagatcaacttttatcgtcacgtctgacgcttaccgactcgacctcgaatccatcgcaattagcgcttatttccagctatgggtcaaccatcctttgcggcttcgaatgccatcatatatgtgacctatggggtcttcttaatatttggaacagccttagcttggggcatgagaaaacaatccaagtctgacttcttggctggaaacagaacgcagaaggcatttcctctggcgctcaatttcatcgccgctggtgagtgacagccgtcgtactgcttatgaaatggatctctgcgcccttttacagagatcaatcaaaagcggtagcacgatgggaaccggcaatgaatgccgcacgcgcaagatcgatacgattccgtcacccagctagcatcgcgagagcgttattagatcagagtatgagttacacataccgtattgtctaggatccggtattctgttctcgtacccgcagctagctgtgcttgccggcctccaaggcgtgatcgtttacgccattgcgtctgctctgccactaatgatctttgcggctgttacaccaatcattcgaaagaagtgcccacaaggatttgtgcttacggaatgggtacgccagcggttcggcatcgtcacagcattgtacttgagtgctctgactctcctaacgctgttcctatacatggtgtcagagctctcggccatcggccaagtcgtcacggcgttgacgggcctggatggtctgcctgtcgtcatagtcgaagctgtagtcacaacggtctacacatcactcggcggattcaagatatccttcatcaccgataacatccaaggtgcaatgatcgtcggtctcatcctcattgccactattactatcggcgtaaagacggagatcaagccagaccttgtcgaaagcactcatcttctcgacgcaagcctcatcggatggcagctgatctatattcttcccgtggctgtactcacgaacgacttctttctcgccaatttttggctacgtgcttttgcatctaggaccgacagagatctttggatcggcatttcgatggctgccgtgatcatcttcgttattctgcttctcgtcggggtgtctggcttgatatctgtatggtcgggcgcctggcctggcaatcctccggatgaggatggctcggtcgccttcttcctactcttagaacagcttcccaattgggttgttggtattgtccttgtaatgtctgttggtttgagcaccgcgtctttcgacagtattcagtctgccatggtctccaccgcatcgaacgacctcttccgaaaccgactcaacatctggtgggttcgaggtggcgtcgttctcatcatcatccccgtcatcgttctcgcgatcaaggcaccgagtatcttgcagatctacttgatttccgatctcttgtctgcttcgactattccagtcctcatgatcggtctgtctgatcgcttccactggtggcgcggctttgaggttgttgtcggtggtctcggtggaatcttaaccgttttcatcttcggtgctatctactacgacgacgtacaaaagggtgccgacctcattctccttgagcaagggctatacactggtgactggggtgctttcggtgcctttgtcgctgcacctgttggtggaatcatttggggcttcattgcacttggcctccgtcttgcgttccagttcacgcagtcaaagatccgaggcactcacttcgatgctctagatcgccctatcgaagccgccgccgccggagagcaaggcagattcagccctgttgagacacaggatgaagtggcatctgccaagtccactggcaagttcttctaagagagcgtagctttacagtcggtcatctcgagaacgatgagatgccaggcgacgtcgaaatatagtacacgatgcatttcgagagtggccaatagatgaggaggaatagaagagagaagagagtttaacaagtggaagattgtaggacgagagatctaaaggaagaggagaccagggcacggtaagagaaggaatacatacgaagaccagattaccttacacaatacgctattgttcataatatacacgcaatgcttgacgactcgtttaggattgatacgttcatacaatgatcctcccgcg

SEQ ID NO: 33427 - DNA, 1740 bp, Muscodor strobelii
  misc_feature: SGI cDNA ID NO. 571531
  misc_feature: Encodes the peptide sequence at SEQ ID NO 33428
atgattaccggtggagaaatcgagcaggcgctggaggcattatccaagatatacagcattggtagagcagcatggaagttctacgagacaacccaggactttggcctggacttcgacacctcaatggaagaatttcatatgcaggagtgggtctttggcagccatttagatttgttcaaagtttcactcgaagcgtatcctgcatcgggtacagatttcgaactcgcgaaacgacgtgcaagcattgcgcacttgatcaaccaagtgatagatctcttcaacgctgcctatgatattgtcaagcgctacgatactcagtgctgtgatgggtcatgcgtggccgctcatgggacgcctgagaggctgagaagatccgtcagggcaccttctagtggccttaggtcctttgaggcctggcttacagatccaagcagaaagcttgaagcaaagttcaaagagatacacgaagatcaaagaaggcggattcgattctcgaaggatgataagccggagtacaagccagctccttcgagtgccgccacttcagcgactgcacaagagcgagcccaaaaacgtcaagaggctgctcgacccgaggatctcgtcagctgggcattacatgggaaagaagaactggaagattcagtggaagaaatcaaaagtaaaaatgaggaactccggaaatcgctggcatatctctctccagttgagcccttcagggtgatcagacccttcagagaagggcctgatctatggatgtggaaaaaaacggcccgcaatgacatttcagcactccatcgagcactacggaaggtcaatcatgccaaaaatgggcaagcatcagtggagcttgctgtgaagctcgagactagacccaaagatgtctttaaaaggttggaaaggcactcgatgatcgatgaggatgcagaccctggcaatatcatttctctggtacctagcgaaccattgtcgacaggtgcattgacaacgggtgcatttcttgctgccacgactatctctgtcaataagcaccataattcattcacgaatctctcccagcgacttggtgaaatgaaaaacggagaatcgattgtaggatatgtcaaatgtgacgaatggaaccattatgatcttcgaatcatcccagtcgtagatgacttagatcacaggcacaagcttgttgacatcgtgcataccggagacatccaagctaagacgagaagaatgatgagtgcaaacattgccatggcgcatgtacacttcgcagatgccacttcggaagccattcctcgtcacttaaacagttaccagatatacccactagccgatgaccctctacacccgcgaacctggaagcccaaagacctaggttcgatgtatgtgagcttcggattcggacagcccaaccaagcacccacagtcagtaaactgccatctgttaaagattcgaacgcctctttgattgacccggcggttgaactcggcgtcctcatcttccaagttgccacccaaaagctactagagtaccccaatactgcacaagggctggacttacaacgacaacggatcatggaccgatttcttagtgatcttgagaaggcctgtggcttatacatgcgagaaatagtacagatttgtttcctaaattcgtactacccgaccaaacgttgggagaatgagaaaatcattgaggaggtagctgacgcgcttcatttctttacgaaggaaagcggtaattga

SEQ ID NO: 33428 - protein, 579 aa, Muscodor strobelii
  misc_feature: SGI Peptide ID NO. 571531
MITGGEIEQALEALSKIYSIGRAAWKFYETTQDFGLDFDTSMEEFHMQEWVFGSHLDLFKVSLEAYPASGTDFELAKRRASIAHLINQVIDLFNAAYDIVKRYDTQCCDGSCVAAHGTPERLRRSVRAPSSGLRSFEAWLTDPSRKLEAKFKEIHEDQRRRIRFSKDDKPEYKPAPSSAATSATAQERAQKRQEAARPEDLVSWALHGKEELEDSVEEIKSKNEELRKSLAYLSPVEPFRVIRPFREGPDLWMWKKTARNDISALHRALRKVNHAKNGQASVELAVKLETRPKDVFKRLERHSMIDEDADPGNIISLVPSEPLSTGALTTGAFLAATTISVNKHHNSFTNLSQRLGEMKNGESIVGYVKCDEWNHYDLRIIPVVDDLDHRHKLVDIVHTGDIQAKTRRMMSANIAMAHVHFADATSEAIPRHLNSYQIYPLADDPLHPRTWKPKDLGSMYVSFGFGQPNQAPTVSKLPSVKDSNASLIDPAVELGVLIFQVATQKLLEYPNTAQGLDLQRQRIMDRFLSDLEKACGLYMREIVQICFLNSYYPTKRWENEKIIEEVADALHFFTKESGN

SEQ ID NO: 33429 - DNA, 1545 bp, Muscodor strobelii
  misc_feature: SGI cDNA ID NO. 571532
  misc_feature: Elevated expression when VOC is produced
  misc_feature: Encodes the peptide sequence at SEQ ID NO 33430
atggatcttgacgctttgggaactctcctcgctgctgaacagcagaggttcaaatctttacgagaagcagcgggtctatatcctccatacgcaaccacgagaattatagacgccatacattcacatattgaacgtgtctcgagtatttcggatgtacctcagcgcgaaacaacgcgcaatgttcctggccgtgttttggatggtcgtgaaactgaaattgatgtccacctacggatcatcaagcagctaaatgatgtattagattccgaagttgtcgtgtcgactcacgaccgccttgtggaggttatggctgagaacctaagcattcgtacccggctttcccatcagcagtctgtcttaaatgcacaggagcaaccactcggccgcatgggatttcaaatgtacaccggatacggccaatctgctaagaaggatcagacccaggactccgttccggatgatggagattcagaggcatcggataccgacacgacttccagcgtggaggtttatcggcccgaccctcggcccgaccctccgactatcgaggggttatataaactaggtctcgcaggattggagaccttcgcaagagagtcgagggttactacttttgagaacttcagtgatcggctggaaatatggtcatttggcctaatcggaggggcggatggagatttagataaattgttctcgtacgaccaagagacagactgttattctgtcgataatggatatagaacgatagcaagccgtcttttcaatattctggattatgtcgatatactcctacgcatcctcgatttcaacacaggggaaacattatcttacatgaatgctctccaaacattcatcataagtgctataagctctgacaactatttgaagtgttttcaggcgcgagggcttgtagaagcctcaacagttgagtctgcggcgatggaatgtgttaccggcatcgaacaacaaattgagcgcctttacgattgccttccagcaatcggttcactgagacagcttcactgtttccgcgagcctcgattcttgccgaaacgcaataagacaagaccaagcagcctaccacagcatgtgacacatcggtcaaacaaggaattacaggacttggtcgagtacaactccatattgagtgcagctattgcggcgtcattggaaaccgaaaaagacgatgacgtccgcatggaagcaaaacttttcgaacaagtcaacagacagctattagattgcaaacgtctccggcgaggcccaacaacagagaaaatggttcagatattgaagaatatgcaagaaccgctcaagaatctacatcaacatctgaagataggacaaggagattcggagtcatcgaagagagaagagatttttatttcgcctaaactcgtgattgaaacccggagaaagttcacggattgcatgaacgacttgaagcatgaggcgatggggcaacctctggacctgacctctaaacttgtctctacaccagatgtacccctggattcgggatttgttgattacgagtcttcgtga

SEQ ID NO: 33430 - protein, 514 aa, Muscodor strobelii
  misc_feature: SGI Peptide ID NO. 571532
  misc_feature: Useful for introducing or modulating the production of volatile compounds
MDLDALGTLLAAEQQRFKSLREAAGLYPPYATTRIIDAIHSHIERVSSISDVPQRETTRNVPGRVLDGRETEIDVHLRIIKQLNDVLDSEVVVSTHDRLVEVMAENLSIRTRLSHQQSVLNAQEQPLGRMGFQMYTGYGQSAKKDQTQDSVPDDGDSEASDTDTTSSVEVYRPDPRPDPPTIEGLYKLGLAGLETFARESRVTTFENFSDRLEIWSFGLIGGADGDLDKLFSYDQETDCYSVDNGYRTIASRLFNILDYVDILLRILDFNTGETLSYMNALQTFIISAISSDNYLKCFQARGLVEASTVESAAMECVTGIEQQIERLYDCLPAIGSLRQLHCFREPRFLPKRNKTRPSSLPQHVTHRSNKELQDLVEYNSILSAAIAASLETEKDDDVRMEAKLFEQVNRQLLDCKRLRRGPTTEKMVQILKNMQEPLKNLHQHLKIGQGDSESSKREEIFISPKLVIETRRKFTDCMNDLKHEAMGQPLDLTSKLVSTPDVPLDSGFVDYESS

SEQ ID NO: 33431 - DNA, 1217 bp, Muscodor strobelii
  misc_feature: SGI EST ID NO. CUFF.79019.0
  misc_feature: Variant of the nucleotide sequence at SEQ ID NO 33429
cgactatcgaggggttatataaactaggtctcgcaggattggagaccttcgcaagagagtcgagggttactacttttgagaacttcagtgatcggctggaaatatggtcatttggcctaatcggaggggcggatggagatttagataaattgttctcgtacgaccaagagacagactgttattctgtcgataatggatatagaacgatagcaagccgtcttttcaatattctggattatgtcggtgagtgtctacacttcgacaagatctcgaatcgctagagttgtaaccaaaatctatcagatatactcctacgcatcctcgatttcaacacaggggaaacattatcttacatgaatgctctccaaacattcatcataagtgctataagctctgacaactatttgaagtgttttcaggcgcgagggcttgtagaagcctcaacagttgagtctgcggcgatggaatgtgttaccggcatcgaacaacaaattgagcgcctttacgattgccttccagcaatcggttcactgagacagcttcactgtttccgcgagcctcgattcttgccgaaacgcaataagacaagaccaagcagcctaccacagcatgtgacacatcggtcaaacaaggaattacaggacttggtcgagtacaactccatattgagtgcagctattgcggcgtcattggaaaccgaaaaagacgatgacgtccgcatggaagcaaaacttttcgaacaagtcaacagacagctattagattgcaaacgtctccggcgaggcccaacaacagagaaaatggttcagatattgaagaatatgcaagaaccgctcaagaatctacatcaacatctgaagataggacaaggagattcggagtcatcgaagagagaagagatttttatttcgcctaaactcgtgattgaaacccggagaaagttcacggattgcatgaacgacttgaagcatgaggcgatggggcaacctctggacctgacctctaaacttgtctctacaccagatgtacccctggattcgggatttgttgattacgagtcttcgtgatcaggatcaccatgtttaactcttcttttcggcgcctcgagcagttagaatacttcagatgagagtagctaacgtcttgtaatgattcggaacagaccagtaatcattgagacacagttctgctaaacgtgagaaccatatatataaatc

SEQ ID NO: 33432 - DNA, 819 bp, Muscodor strobelii
  misc_feature: SGI cDNA ID NO. 571533
  misc_feature: Encodes the peptide sequence at SEQ ID NO 33433
atggatcttgacgctttgggaactctcctcgctgctgaacagcagaggttcaaatctttacgagaagcagcgggtctatatcctccatacgcaaccacgagaattatagacgccatacattcacatattgaacgtgtctcgagtatttcggatgtacctcagcgcgaaacaacgcgcaatgttcctggccgtgttttggatggtcgtgaaactgaaattgatgtccacctacggatcatcaagcagctaaatgatgtattagattccgaagttgtcgtgtcgactcacgaccgccttgtggaggttatggctgagaacctaagcattcgtacccggctttcccatcagcagtctgtcttaaatgcacaggagcaaccactcggccgcatgggatttcaaatgtacaccggatacggccaatctgctaagaaggatcagacccaggactccgttccggatgatggagattcagaggcatcggataccgacacgacttccagcgtggaggtttatcggcccgaccctcggcccgaccctccgactatcgaggggttatataaactaggtctcgcaggattggagaccttcgcaagagagtcgagggttactacttttgagaacttcagtgatcggctggaaatatggtcatttggcctaatcggaggggcggatggagatttagataaattgttctcgtacgaccaagagacagactgttattctgtcgataatggatatagaacgatagcaagccgtcttttcaatattctggattatgtcggtgagtgtctacacttcgacaagatctcgaatcgctag

SEQ ID NO: 33433 - protein, 272 aa, Muscodor strobelii
  misc_feature: SGI Peptide ID NO. 571533
MDLDALGTLLAAEQQRFKSLREAAGLYPPYATTRIIDAIHSHIERVSSISDVPQRETTRNVPGRVLDGRETEIDVHLRIIKQLNDVLDSEVVVSTHDRLVEVMAENLSIRTRLSHQQSVLNAQEQPLGRMGFQMYTGYGQSAKKDQTQDSVPDDGDSEASDTDTTSSVEVYRPDPRPDPPTIEGLYKLGLAGLETFARESRVTTFENFSDRLEIWSFGLIGGADGDLDKLFSYDQETDCYSVDNGYRTIASRLFNILDYVGECLHFDKISNR

SEQ ID NO: 33434 - DNA, 624 bp, Muscodor strobelii
  misc_feature: SGI EST ID NO. CUFF.79016.0
  misc_feature: Variant of the nucleotide sequence at SEQ ID NO 33432
taccattccctgcgtaaacctctggtttactaacacaaaaatgattgtccctatacctgcagagttccttttcacggtataaaggctcgtcagttgcccaaatcgcaccttcatcaacctgactggtgcattgaatcaaccctgatcggtgtctacaactattctatcatagaatcttgatggatcttgacgctttgggaactctcctcgctgctgaacagcagaggttcaaatctttacgagaagcagcgggtctatatcctccatacgcaaccacgagaattatagacgccatacattcacatattgaacgtgtctcgagtatttcggatgtacctcagcgcgaaacaacgcgcaatgttcctggccgtgttttggatggtcgtgaaactgaaattgatgtccacctacggatcatcaagcagctaaatgatgtattagattccgaagttgtcgtgtcgactcacgaccgccttgtggaggttatggctgagaacctaagcattcgtacccggctttcccatcagcagtctgtcttaaatgcacaggagcaaccactcggccgcatgggatttcaaatgtacaccggatacggccaatctgctaagaaggatcagacccagg

SEQ ID NO: 33435 - DNA, 900 bp, Muscodor strobelii
  misc_feature: SGI cDNA ID NO. 571534
  misc_feature: Reduced expression when VOC is produced
  misc_feature: Encodes the peptide sequence at SEQ ID NO 33436
atggccgaactcacacggatatcgaggccatggctgctctcccaaaggtcaaaaattcctctacggacctcggccgccgccctccctctcatctaccgaggtttcagaagcaccacaccacaagccaagaaaccatccagaggcaaagcattaagtcgcgctgccgtcgccaacgcaaaccgacatgccaccatgcagcaaatgaggaacagcgctaccaattcctctcgtctcctcatgatgacgatgataccaccccccatccgccgctggaaccgctcccccctcgaattcatccggatggcttacctagtcagcagcatgcgtctccgcggcgcactatcccacatcggcataaagttcatgtcgatgccgaccttcttctcccgaccccttataaaattcaacaaagcggcctgcgtacccacggtaaaaaacctgcacacgcaaatgaacgaagccgtagccacaggcgacatcggcaccctgcgaaacatctgcgcgctagaatggtacgaagtactcgcgggcggaatccagacaagaccgaagggtacctctatggagtgggaattggtgaattaccatagagagccgcgcgtagcgagcttcatggttaatttccaaccacctgttttccctggcgagccgatggtgttgattaagcaggctgttgtttgtattgagagtacgcagcggctgagtaaggtggtgaatggggttaaggaggaggcgaggccgaagactatgagggagtttcttgttgtgcaggctgagattgatcagaagacttataatcagggaccctggaagatctgggggttggttaatgagcagagttataggcagctggttgaggagaaggagttgtggaatagggctcagcagctcgctgggtag

SEQ ID NO: 33436 - protein, 299 aa, Muscodor strobelii
  misc_feature: SGI Peptide ID NO. 571534
  misc_feature (82)..(288): NCBI GI: 39943280 Blast Desc: MGG_03720 [Magnaporthe grisea 70-15] gi|145009682|gb|EDJ94338.1| MGG_03720 [Magnaporthe grisea 70-15]
  misc_feature (35)..(296): NCBI GI: 85112444 Blast Desc: NCU01983 [Neurospora crassa OR74A] gi|28926125|gb|EAA35111.1| NCU01983 [Neurospora crassa OR74A] gi|38567071|emb|CAE76368.1| [Neurospora crassa]
  misc_feature (1)..(290): NCBI GI: 171676081 Blast Desc: protein product [Podospora anserina] gi|170936106|emb|CAP60766.1| protein product [Podospora anserina]
  misc_feature (114)..(295): NCBI GI: 256734229 Blast Desc: NECHADRAFT_59411 [Nectria haematococca mpVI 77-13-4]
  misc_feature (114)..(299): NCBI GI: 46129419 Blast Desc: FG08885.1 [Gibberella zeae PH-1]
  misc_feature (54)..(274): NCBI GI: 156056531 Blast Desc: SS1G_03996 [Sclerotinia sclerotiorum 1980] gi|154701782|gb|EDO01521.1| SS1G_03996 [Sclerotinia sclerotiorum 1980]
  misc_feature (122)..(286): NCBI GI: 154291697 Blast Desc: BC1G_15139 [Botryotinia fuckeliana B05.10] gi|150846639|gb|EDN21832.1| BC1G_15139 [Botryotinia fuckeliana B05.10]
  misc_feature (36)..(284): NCBI GI: 258573537 Blast Desc: [Uncinocarpus reesii 1704] gi|237901216|gb|EEP75617.1| [Uncinocarpus reesii 1704]
  misc_feature (144)..(274): NCBI GI: 71000595 Blast Desc: conserved [Aspergillus fumigatus Af293] gi|66852616|gb|EAL92941.1| conserved [Aspergillus fumigatus Af293] gi|159127994|gb|EDP53109.1| conserved [Aspergillus A1163]
  misc_feature (144)..(274): NCBI GI: 119493237 Blast Desc: NFIA_070990 [Neosartorya fischeri NRRL 181] gi|119411985|gb|EAW21928.1| conserved [Neosartorya fischeri NRRL 181]
  misc_feature: Useful for introducing or modulating the production of volatile compounds
MAELTRISRPWLLSQRSKIPLRTSAAALPLIYRGFRSTTPQAKKPSRGKALSRAAVANANRHATMQQMRNSATNSSRLLMMTMIPPPIRRWNRSPLEFIRMAYLVSSMRLRGALSHIGIKFMSMPTFFSRPLIKFNKAACVPTVKNLHTQMNEAVATGDIGTLRNICALEWYEVLAGGIQTRPKGTSMEWELVNYHREPRVASFMVNFQPPVFPGEPMVLIKQAVVCIESTQRLSKVVNGVKEEARPKTMREFLVVQAEIDQKTYNQGPWKIWGLVNEQSYRQLVEEKELWNRAQQLAG

SEQ ID NO: 33437 - DNA, 1297 bp, Muscodor strobelii
  misc_feature: SGI EST ID NO. CUFF.79023.0
  misc_feature: Variant of the nucleotide sequence at SEQ ID NO 33435
gcgacctttaatgcttgtcctgagcatagcttcacccgaagccatacctcagcgttcaaggcgattgacggtcgagacgatcccgcatcacactactaagactcacacccatatatcccgacccacggttcattcttcgccgtggcgcgcacgcccatcgcctccgtaggactgaatccggggcggagggcggcaccgtaacccatcaacatcaacgccatctacccacacatcaccaacatggccgaactcacacggatatcgaggccatggctgctctcccaaaggtcaaaaattcctctacggacctcggccgccgccctccctctcatctaccgaggtttcagaagcaccacaccacaagccaagaaaccatccagaggcaaagcattaagtcgcgctgccgtcgccaacgcaaaccgacatgccaccatgcagcaaatgaggaacagcgctaccaattcctctcgtctcctcatgatgacgatgataccaccccccatccgccgctggaaccgctcccccctcgaattcatccggatggcttacctagtcagcagcatgcgtctccgcggcgcactatcccacatcggcataaagttcatgtcgatgccgaccttcttctcccgaccccttataaaattcaacaaagcggcctgcgtacccacggtaaaaaacctgcacacgcaaatgaacgaagccgtagccacaggcgacatcggcaccctgcgaaacatctgcgcgctagaatggtacgaagtactcgcgggcggaatccagacaagaccgaagggtacctctatggagtgggaattggtgaattaccatagagagccgcgcgtagcgagcttcatggttaatttccaaccacctgttttccctggcgagccgatggtgttgattaagcaggctgttgtttgtattgagagtacgcagcggctgagtaaggtggtgaatggggttaaggaggaggcgaggccgaagactatgagggagtttcttgttgtgcaggctgagattgatcagaagacttataatcagggaccctggaagatctgggggttggttaatgagcagagttataggcagctggttgaggagaaggagttgtggaatagggctcagcagctcgctgggtagagaaccgaggagggaggaatgggtgtgtactatatggtggggagactgtagattatgtgtatattgttattgttatattgacgacactcttcatgtattctctgtaaacggaaataatggttgaagctatatgcatagagtgttcgtcaaggaccgc

SEQ ID NO: 33438 - DNA, 2145 bp, Muscodor strobelii
  misc_feature: SGI cDNA ID NO. 571535
  misc_feature: Encodes the peptide sequence at SEQ ID NO 33439
atgagtaatcgccggcgcaaccagaactcggcatcattgtcgaccgagccacaggaagctccggtcaccaggcaaacgcgcagcagtgcgagactggctgggataactgaggcagctccacctctaccagaaccacccaagccaaaagtaccttacgatgggattccacggcgcggcactcggcgacgaactcgtaacaagagcatcgagagtatagccacgcaagacttcattcagagtacaccccgagcgcctgaatatcaggaagctgaagaggagagtgaggctgttgactctgacctaagtgatgacgactcatcgatcattggagccgaccgactgcaggacatcatcgactttgatctcttcaagctcaaccgatggtgcgagaaggcgtgcgcccaagtcgatgccttgactcgtcctcaagtctcagaagctcagcgcaaggatctgaaggcgacaagaaaggcattccttacagtttgtcattctattttcgaaaatgacacagcctacgttgacagatccacgctgaaactgccatacgacgaggtacccggatcgcgtgctctcctcgacaaagcgatacgcttagcaaacctcatttctctctcactctacgctgtgtacacacaacttaccgacaagaactttgcgccctttttccacgagctggacgagtctttccactggttcttcgactcggaattcactggcaaagccgacggcaacaagttagcatttcgaatccggtggcgccttttggctgagcagctcgactctgcgccggatattcacccggcaatcctggccggaacactgttctgcaatcagccccccgtcaatgtggccgaagcaatgcgcaacctcaaaaaagggccattcaggcagattggcgacgttgaaatggacagcgtcacgtcccacgatgggttcgaggctgaatttgaagatattcgcaagatcctctcgcaggacgatcgagccgaagtgaagaagggtttgaatgaggcgtatcgtagggacgatattctgcaggacctacagacttgggctcaaaacatgtacaaacaatggtcccagacgaggccacctaaaagccctctacggacctcaccccgtaacgagaagcctaatgagcaacagtcgtcggagctgtttgtagaacaagaagatgatgattcctcagagtcggaaagtgagaccgaggaatacgataagcttccaggagcctcgacacagccgaccttggcgcgcaatccgacagtgctgaaagctatcagactgagcgagcaaggcattacaaatcggccggctaatggcccaccgtctaatcaagaagccggaaaaggaaaagaggtagagtcgcaaacgacagtggccatccgccagcttgacccggctcaatttatggatatgtcaccccttcgggatatgtctcctcctaaccctctttttaacgtgactctcgagcctcgagagagtcgaaagcgacgccagccgactcaagacgacaacgactcgatacatgacgattttgaggtgaatgaacagatcgtcgacgagtccagacgaattcgattcgggtctgaggtcgagagaggcaatagcggtaggggaccccctaagcgagctcgcgttgcgcccgaagcgcctagacgtacaatcgagagcagtacggtccgagagatgagcgatcctttcgaggactcagaggaggaggggccaccaagcaccctaacgcagcgggacctcgcaagattgaaggcaagggtgaaagctaatgtgcaacgggctcgcgcagacagggagaggccgccgccgcaggtgcgcaaggagtggacagtggcagacatcgagcggctcctaacactcatcgccgatccggacattcactgctcatgggcggtgatggagaagacgcaggggttcgagatatatcggaatcaacagtccatacgtgacaaagcacgtaatctcaagaaagactatctaataggagacaacgtgctgccagagggatttgacagcgttcggttgggccagaaggagcgcaaccagatcacggcggccaaccgcaaccccgacaggatggaagatgatctggacgagagtggggagatcaccaatcatcgtctatga

SEQ ID NO: 33439 - protein, 714 aa, Muscodor strobelii
  misc_feature: SGI Peptide ID NO. 571535
  misc_feature (271)..(707): NCBI GI: 256734096 Blast Desc: NECHADRAFT_91970 [Nectria haematococca mpVI 77-13-4]
  misc_feature (578)..(711): NCBI GI: 171685109 Blast Desc: protein product [Podospora anserina] gi|170942515|emb|CAP68167.1| protein product [Podospora anserina]
  misc_feature (578)..(711): NCBI GI: 116193679 Blast Desc: CHGG_06557 [Chaetomium globosum CBS 148.51] gi|88182470|gb|EAQ89938.1| CHGG_06557 [Chaetomium globosum CBS 148.51]
  misc_feature (251)..(714): NCBI GI: 46128667 Blast Desc: FG08711.1 [Gibberella zeae PH-1]
  misc_feature (593)..(703): NCBI GI: 85115354 Blast Desc: NCU01991 [Neurospora crassa OR74A] gi|28926652|gb|EAA35620.1| [Neurospora crassa OR74A] gi|38567065|emb|CAE76362.1| [Neurospora crassa]
  misc_feature (607)..(711): NCBI GI: 261353551 Blast Desc: conserved [Verticillium albo-atrum VaMs.102]
  misc_feature (566)..(704): NCBI GI: 149209529 Blast Desc: MGCH7_ch7g247 [Magnaporthe grisea 70-15] gi|86196202|gb|EAQ70840.1| MGCH7_ch7g247 [Magnaporthe grisea 70-15]
  misc_feature (566)..(704): NCBI GI: 145610378 Blast Desc: MGG_02537 [Magnaporthe grisea 70-15] gi|145017688|gb|EDK02051.1| MGG_02537 [Magnaporthe grisea 70-15]
  misc_feature (591)..(681): NCBI GI: 156035673 Blast Desc: [Sclerotinia sclerotiorum 1980] gi|154698445|gb|EDN98183.1| [Sclerotinia sclerotiorum 1980]
MSNRRRNQNSASLSTEPQEAPVTRQTRSSARLAGITEAAPPLPEPPKPKVPYDGIPRRGTRRRTRNKSIESIATQDFIQSTPRAPEYQEAEEESEAVDSDLSDDDSSIIGADRLQDIIDFDLFKLNRWCEKACAQVDALTRPQVSEAQRKDLKATRKAFLTVCHSIFENDTAYVDRSTLKLPYDEVPGSRALLDKAIRLANLISLSLYAVYTQLTDKNFAPFFHELDESFHWFFDSEFTGKADGNKLAFRIRWRLLAEQLDSAPDIHPAILAGTLFCNQPPVNVAEAMRNLKKGPFRQIGDVEMDSVTSHDGFEAEFEDIRKILSQDDRAEVKKGLNEAYRRDDILQDLQTWAQNMYKQWSQTRPPKSPLRTSPRNEKPNEQQSSELFVEQEDDDSSESESETEEYDKLPGASTQPTLARNPTVLKAIRLSEQGITNRPANGPPSNQEAGKGKEVESQTTVAIRQLDPAQFMDMSPLRDMSPPNPLFNVTLEPRESRKRRQPTQDDNDSIHDDFEVNEQIVDESRRIRFGSEVERGNSGRGPPKRARVAPEAPRRTIESSTVREMSDPFEDSEEEGPPSTLTQRDLARLKARVKANVQRARADRERPPPQVRKEWTVADIERLLTLIADPDIHCSWAVMEKTQGFEIYRNQQSIRDKARNLKKDYLIGDNVLPEGFDSVRLGQKERNQITAANRNPDRMEDDLDESGEITNHRL

SEQ ID NO: 33440 - DNA, 2592 bp, Muscodor strobelii
  misc_feature: SGI EST ID NO. CUFF.79026.0
  misc_feature: Variant of the nucleotide sequence at SEQ ID NO 33438
ctttcacttgctcaatagctgtcgcgtggaggacgcatagattgttgatgttgtgatcgcattgtacaagtgatagtgcaatacattacaaggcctagctgaagaagtgtgtttgttcttaagtacttatggcaaatgcgtaacgtgtcgccgccgtgttcattgtccgcctttgaccgggtgacagctacacagcgactcgagacacctgcctcacggcctactttggcctaatttgcagtcatgagtaatcgccggcgcaaccagaactcggcatcattgtcgaccgagccacaggaagctccggtcaccaggcaaacgcgcagcagtgcgagactggctgggataactgaggcagctccacctctaccagaaccacccaagccaaaagtaccttacgatgggattccacggcgcggcactcggcgacgaactcgtaacaagagcatcgagagtatagccacgcaagacttcattcagagtacaccccgagcgcctgaatatcaggaagctgaagaggagagtgaggctgttgactctgacctaagtgatgacgactcatcgatcattggagccgaccgactgcaggacatcatcgactttgatctcttcaagctcaaccgatggtgcgagaaggcgtgcgcccaagtcgatgccttgactcgtcctcaagtctcagaagctcagcgcaaggatctgaaggcgacaagaaaggcattccttacagtttgtcattctattttcgaaaatgacacagcctacgttgacagatccacgctgaaactgccatacgacgaggtacccggatcgcgtgctctcctcgacaaagcgatacgcttagcaaacctcatttctctctcactctacgctgtgtacacacaacttaccgacaagaactttgcgccctttttccacgagctggacgagtctttccactggttcttcgactcggaattcactggcaaagccgacggcaacaagttagcatttcgaatccggtggcgccttttggctgagcagctcgactctgcgccggatattcacccggcaatcctggccggaacactgttctgcaatcagccccccgtcaatgtggccgaagcaatgcgcaacctcaaaaaagggccattcaggcagattggcgacgttgaaatggacagcgtcacgtcccacgatgggttcgaggctgaatttgaagatattcgcaagatcctctcgcaggacgatcgagccgaagtgaagaagggtttgaatgaggcgtatcgtagggacgatattctgcaggacctacagacttgggctcaaaacatgtacaaacaatggtcccagacgaggccacctaaaagccctctacggacctcaccccgtaacgagaagcctaatgagcaacagtcgtcggagctgtttgtagaacaagaagatgatgattcctcagagtcggaaagtgagaccgaggaatacgataagcttccaggagcctcgacacagccgaccttggcgcgcaatccgacagtgctgaaagctatcagactgagcgagcaaggcattacaaatcggccggctaatggcccaccgtctaatcaagaagccggaaaaggaaaagaggtagagtcgcaaacgacagtggccatccgccagcttgacccggctcaatttatggatatgtcaccccttcgggatatgtctcctcctaaccctctttttaacgtgactctcgagcctcgagagagtcgaaagcgacgccagccgactcaagacgacaacgactcgatacatgacgattttgaggtgaatgaacagatcgtcgacgagtccagacgaattcgattcgggtctgaggtcgagagaggcaatagcggtaggggaccccctaagcgagctcgcgttgcgcccgaagcgcctagacgtacaatcgagagcagtacggtccgagagatgagcgatcctttcgaggactcagaggaggaggggccaccaagcaccctaacgcagcgggacctcgcaagattgaaggcaagggtgaaagctaatgtgcaacgggctcgcgcagacagggagaggccgccgccgcaggtgcgcaaggagtggacagtggcagacatcgagcggctcctaacactcatcgccgatccggacattcactgctcatgggcggtgatggagaagacgcaggggttcgagatatatcggaatcaacagtccatacgtgacaaagcacgtaatctcaagaaagactatctaataggagacaacgtgctgccagagggatttgacagcgttcggttgggccagaaggagcgcaaccagatcacggcggccaaccgcaaccccgacaggatggaagatgatctggacgagagtggggagatcaccaatcatcgtctatgagagtaggcggcgcagtgtctgtgtgtttggtactatgattgatgcattacgagagcgtttgatttcatggctatacccctgggctggacgggagttgctgtcttctggctgtggaacctggaagcgctggagctcatggcgtttccagattaggactggaaaggatgtagccgcatcgctagctatacagaatgagaatttttt

SEQ ID NO: 33441 - DNA, 1620 bp, Muscodor strobelii
  misc_feature: SGI cDNA ID NO. 571536
  misc_feature: Reduced expression when VOC is produced
  misc_feature: Encodes the peptide sequence at SEQ ID NO 33442
atgaagttccgccaaccacacgcattgatcctcttcttgccttctctcgccgtttctgcagctactcttaaagggaagcagtctagtgatgtccgtgccacgtatggcgattcagacgtcactgattcttcgctcgccatagactccgactacactggttccaaatcgaaagctgatgtgggcacgaagctcgcgccggtcgatggcaaagacggaatgcctcacgagggcccctttgtcactctctccgacaagggccacaagaagaagggcactaccatcgacgccgacgaggacgatgcttccgagctgacgaatttgcgccccctgaagaatcgcccagccgaccccaccgtcgtcgatggcaagaagatacctgactccaacgacggagtcatggacgatcctcatcgcaagccacccaagcagggaaccacgggcacagaaggcggcgtgagcgaaaaggacaaggcgaggaaggcaaaggaatacaagacgggcgagaagcaggagaacacccccgattcccccaaggagaagccacctctgccgcacagcgagcaggagaagatgcagagcagcaaggattccaaaaaggacaccgacaaggacatctcagacacgtatcagggcagcgcggatggctatactggacttgagaaacccaatgatttacccgataagtcctacgaccacgcgaatccactccccggctcggccgataaagaccctctgaacctcaataagccttccaaatcgacctcgaagtccaatgtctacgacaacgagagcaacgagggtatcatccaaccattccactcttttatcctatctctcgccatgatcctcgtctcggaagtcggagacaagaccttcctagtggctgcgctcatggctatgaaacacgaccgcatggtggttttcacggcagctttcggtgctctactagtcatgacggtcctatcagccgttcttggacatactctgccggccttgatcccgaaacgactgacttccttcttggctgctggtctgttcttcgtctttggcgccagactgctacgtgagggtatggcaatggatcccaatgagggcgtttcagcagaaatgcaggaagtagagatggaactccaagagaaagaaaacgaggcttcgaagcgaagacgatcatcagtgactccttacaatctggagatgggcctaggccgtgagcgcaaatcccggacccactctcgatacgcatcacctcctcgcagcccatcgacatctccaggccgtagcccctcgcccaatagaggatttatcactggcatgtccacaggtctcgcgaatctcttttccctcctgttgagtcctgcctgggtacagactttcgttatgacgttcttgggcgaatggggagatcgtagtcaaatcgccacgattgcaatggctgctggtcaggactactggtgggtaactctgggcgctatgcttggtcacgcgtgctgcactggtgtagcagttattggtggcagggcgatcgctggcaaagtcagccttaaagttgtgaccatgggtggcgccattgctttcctcgtattcggctttatctacctagttgaagctttctacgcataa

SEQ ID NO: 33442 - protein, 539 aa, Muscodor strobelii
  misc_feature: SGI Peptide ID NO. 571536
  misc_feature (454)..(529): Pfam Id: PF01169 Pfam Desc: Uncharacterized protein family UPF0016
  misc_feature (275)..(350): Pfam Id: PF01169 Pfam Desc: Uncharacterized protein family UPF0016
  misc_feature (61)..(539): NCBI GI: 171685105 Blast Desc: protein product [Podospora anserina] gi|170942513|emb|CAP68165.1| protein product [Podospora anserina]
  misc_feature (53)..(539): NCBI GI: 116193681 Blast Desc: CHGG_06558 [Chaetomium globosum CBS 148.51] gi|88182471|gb|EAQ89939.1| CHGG_06558 [Chaetomium globosum CBS 148.51]
  misc_feature (1)..(539): NCBI GI: 164429611 Blast Desc: NCU01990 [Neurospora crassa OR74A] gi|157073549|gb|EAA35619.2| conserved [Neurospora crassa OR74A]
  misc_feature (62)..(538): NCBI GI: 145610376 Blast Desc: MGG_12672 [Magnaporthe grisea 70-15] gi|149209531|ref|XP_001522140.1| MGCH7_ch7g248 [Magnaporthe grisea 70-15] gi|86196203|gb|EAQ70841.1| MGCH7_ch7g248 grisea
  misc_feature (57)..(539): NCBI GI: 261353497 Blast Desc: transmembrane protein PFT27 [Verticillium albo-atrum VaMs.102]
  misc_feature (28)..(538): NCBI GI: 154293454 Blast Desc: BC1G_14353 [Botryotinia fuckeliana B05.10] gi|150845334|gb|EDN20527.1| BC1G_14353 [Botryotinia fuckeliana B05.10]
  misc_feature (56)..(538): NCBI GI: 256733717 Blast Desc: NECHADRAFT_67645 [Nectria haematococca mpVI 77-13-4]
  misc_feature (1)..(539): NCBI GI: 38567066 Blast Desc: conserved [Neurospora crassa]
  misc_feature (57)..(539): NCBI GI: 46129376 Blast Desc: FG08873.1 [Gibberella zeae PH-1]
  misc_feature (15)..(516): NCBI GI: 156035671 Blast Desc: SS1G_13039 [Sclerotinia sclerotiorum 1980] gi|154698444|gb|EDN98182.1| SS1G_13039 [Sclerotinia sclerotiorum 1980]
  misc_feature: Useful for introducing or modulating the production of volatile compounds
MKFRQPHALILFLPSLAVSAATLKGKQSSDVRATYGDSDVTDSSLAIDSDYTGSKSKADVGTKLAPVDGKDGMPHEGPFVTLSDKGHKKKGTTIDADEDDASELTNLRPLKNRPADPTVVDGKKIPDSNDGVMDDPHRKPPKQGTTGTEGGVSEKDKARKAKEYKTGEKQENTPDSPKEKPPLPHSEQEKMQSSKDSKKDTDKDISDTYQGSADGYTGLEKPNDLPDKSYDHANPLPGSADKDPLNLNKPSKSTSKSNVYDNESNEGIIQPFHSFILSLAMILVSEVGDKTFLVAALMAMKHDRMVVFTAAFGALLVMTVLSAVLGHTLPALIPKRLTSFLAAGLFFVFGARLLREGMAMDPNEGVSAEMQEVEMELQEKENEASKRRRSSVTPYNLEMGLGRERKSRTHSRYASPPRSPSTSPGRSPSPNRGFITGMSTGLANLFSLLLSPAWVQTFVMTFLGEWGDRSQIATIAMAAGQDYWWVTLGAMLGHACCTGVAVIGGRAIAGKVSLKVVTMGGAIAFLVFGFIYLVEAFYA

SEQ ID NO: 33443 - DNA, 2479 bp, Muscodor strobelii
  misc_feature: SGI EST ID NO. CUFF.79056.0
  misc_feature: Variant of the nucleotide sequence at SEQ ID NO 33441
tttcagcagggcccgcctacaacgtgcagcagcgcaatgcacgcgagcatcgccccctgaactccacgtctaaccaaaaagttggcttgtctctgccaattgtctgatctcgtctcctctgctgtaatttctacccaaagggcaaaagggctgcctggtcatcataatcatcatcatcactcacgacctcacatctgtgtgtatttcgtgatagtgtcttcgtttctcactgtcattttgcggcctccatttcatccaaacaccagcattgcgataccacccttccactttagccagtatacgaagagccttgctgcagacgagccacaggacgagcgtcgtccttcaattccgccatgaagttccgccaaccacacgcattgatcctcttcttgccttctctcgccgtttctgcagctactcttaaagggaagcagtctagtgatgtccgtgccacgtatggcgattcagacgtcactgattcttcgctcgccatagactccgactacactggttccaaatcgaaagctgatgtgggcacgaagctcgcgccggtcgatggcaaagacggaatgcctcacgagggcccctttgtcactctctccgacaagggccacaagaagaagggcactaccatcgacgccgacgaggacgatgcttccgagctgacgaatttgcgccccctgaagaatcgcccagccgaccccaccgtcgtcgatggcaagaagatacctgactccaacgacggagtcatggacgatcctcatcgcaagccacccaagcagggaaccacgggcacagaaggcggcgtgagcgaaaaggacaaggcgaggaaggcaaaggaatacaagacgggcgagaagcaggagaacacccccgattcccccaaggagaagccacctctgccgcacagcgagcaggagaagatgcagagcagcaaggattccaaaaaggacaccgacaaggacatctcagacacgtatcagggcagcgcggatggctatactggacttgagaaacccaatgatttacccgataagtcctacgaccacgcgaatccactccccggctcggccgataaagaccctctgaacctcaataagccttccaaatcgacctcgaagtccaatgtctacgacaacgagagcaacgagggtatcatccaaccattccactcttttatcctatctctcgccatgatcctcgtctcggaagtcggagacaagaccttcctagtggctgcgctcatggctatgaaacacgaccgcatggtggttttcacggcagctttcggtgctctactagtcatgacggtcctatcagccgttcttggacatactctgccggccttgatcccgaaacgactgacttccttcttggctgctggtctgttcttcgtctttggcgccagactgctacgtgagggtatggcaatggatcccaatgagggcgtttcagcagaaatgcaggaagtagagatggaactccaagagaaagaaaacgaggcttcgaagcgaagacgatcatcagtgactccttacaatctggagatgggcctaggccgtgagcgcaaatcccggacccactctcgatacgcatcacctcctcgcagcccatcgacatctccaggccgtagcccctcgcccaatagaggatttatcactggcatgtccacaggtctcgcgaatctcttttccctcctgttgagtcctgcctgggtacagactttcgttatgacgttcttgggcgaatggggagatcgtagtcaaatcgccacgattgcaatggctgctggtcaggactactggtgggtaactctgggcgctatgcttggtcacgcgtgctgcactggtgtagcagttattggtggcagggcgatcgctggcaaagtcagccttaaagttgtgaccatgggtggcgccattgctttcctcgtattcggctttatctacctagttgaagctttctacgcataacctgaaatatcacagacgagagagccaattgtgacatccttgtaccatcttgcgaataacatcaaaacaaaaactaaatgctttcaaagccggcgttgggactactgtgacaggggagctggaagcaggccgtgcgtttttcctgcgtctaggctcacgtgtataactatgcataaactatatataatgacggcacaggtccggctggatataccgagtttcggttgtcgatgcatgatctgcggagttttcggaaaattttgggaggggttgattgtggattgttacgtgtaataaaggagaagtcgagttgatatgggataggacattctatgattcgactttagaggtacgagaatactacaacatgcatttcaacaggttcactccttcctccggactcacgagactatgcctagaagagcagaggtgacaagtatctggcagcgacgaggctatgaagagcactgccgcagggcaggcagtgtggataccaccatccg

SEQ ID NO: 33444 - DNA, 1098 bp, Muscodor strobelii
  misc_feature: SGI cDNA ID NO. 571537
  misc_feature: Encodes the peptide sequence at SEQ ID NO 33445
atggtttcggcaaagaaggccgagtggacacgcgaaaacgaggcaaatctcgttcgcacaatcctagagcatggagccctgaaggaggccctcaacatgcgtttcggaaagattcataactggtgcgcagtatatttcatccacaaagcgttactgaaccacgatgtcagctatcatgctgtacaaaaacgatggaccgacatcaacggccagggtaagagcgccagcagcaaaacggttgagttaaagcttgctcgtcccgccacggacaacttcaatgacaatgtggcaatgctcaaggaaacggttaaacctttccctgaggtcgcagagccgactcgaaagtatcaagggatggttgacatggagaacaatttccattgctttgcttgcaaagccacgatcctgaacgaagctcatgtcataaacaaccacttcatcttccatcatccgacagagcctatggatctccgagatcatatcaaggagcaaggaaagatcctcaaagctgcttccattaatcagacgcagggtaccagggccccggcagctgcgtcggcggctggtcagatcgcgcccgctcctgctgccgttgcccagtcggtccagcctcagagcactcaccatcaatctccctatcctcaggcctttaatacccaggctgctgcatctcaatacaacgactatcaacccctcaatcctcagactgcagcccctcaaccctctcagtccttccagcaccccaacgctgtcaatcaggcctctaaccgacggcccccgaccgctcaacccctccactcgcagttctcaaacactcaggctgccgtagctcaatccctctcacctcagcctatttatggcagcggctatcttactggaaatcactattacaataaccatcactctggcgctggttacagtaacggctatagcaacaattcgggcaatgttcacggtgatctggataacgtgatgcagggcaatggacatgagagccagtatctcgatccggtccttcgccagtatgatcatgaccataccatcaattctgaggacgcagatgacggtattggaggccgccaggctcgaccatcatga

SEQ ID NO: 33445 - protein, 365 aa, Muscodor strobelii
  misc_feature: SGI Peptide ID NO. 571537
MVSAKKAEWTRENEANLVRTILEHGALKEALNMRFGKIHNWCAVYFIHKALLNHDVSYHAVQKRWTDINGQGKSASSKTVELKLARPATDNFNDNVAMLKETVKPFPEVAEPTRKYQGMVDMENNFHCFACKATILNEAHVINNHFIFHHPTEPMDLRDHIKEQGKILKAASINQTQGTRAPAAASAAGQIAPAPAAVAQSVQPQSTHHQSPYPQAFNTQAAASQYNDYQPLNPQTAAPQPSQSFQHPNAVNQASNRRPPTAQPLHSQFSNTQAAVAQSLSPQPIYGSGYLTGNHYYNNHHSGAGYSNGYSNNSGNVHGDLDNVMQGNGHESQYLDPVLRQYDHDHTINSEDADDGIGGRQARPS

SEQ ID NO: 33446 - DNA, 1092 bp, Muscodor strobelii
  misc_feature: SGI cDNA ID NO. 571538
  misc_feature: Encodes the peptide sequence at SEQ ID NO 33447
atgccttggacagatgaggaagacaacgatctcgtccgtacgattcttacgtacgcagtgtttggagatgatgataagaacaagctcttcggaaccgtcaagagctgggatgcggcagtatacgttttcaccgaagtcttgggttatgacaaacatgggaagaagaacatgcaaacccagtggacccgtttagtgggtcagagtaaagacggcaatgcgaagatgaaagatcatcttagaggtcaagacttcggctctgtagtcaacagagccaagctgttggagatcctgactccgttccctgcagcagcagcccgaccagaccagggagtcatcgatgcaaccgacggcaagcatcaatatcattgctttgtctgcaagaacgaagtcagcaacgacagcgaggccatcgacgcccattttcgacaacaccatccgagcgcggagccggatcccctggcgcgttttcgagcacgcccgctgcgtcaaccgaagagggccgcgcctcgggcggctgctggtgaatcatccagaattcccgccgtccatccccagacccgaatcgatcctacggcagctcttaatggcaattctttgtctctgccacccaggccccgaccagcatctgacgcaagcctgccgactctgcttgctcctcatgagccacccttatcacagtccgccgagatgccgggcgcaacaggtgatttatatcagggacgattcgctccgacaattccactcgagggctcttgggctccgatagcttcacctccaggttttgacttcaatatgcaacgccctgccatgactgatcccctgggcatgtatcctccttcgggagatatgtttgtccccgatcagctcgacttcatgccgcctcagggctctgaagtttcttctcaaggttttaccgacgctatttttcctgtatctgccgatccatatccgcttggaccgcttatttcttctccgtctcgctttgctcctctgccttctatggcacctgtctttggagatccgatgtcttctgctggcggcgttccaatggagcctcaggctcaacaatgcaacacggaagagagtaattag

SEQ ID NO: 33447 - protein, 363 aa, Muscodor strobelii
  misc_feature: SGI Peptide ID NO. 571538
MPWTDEEDNDLVRTILTYAVFGDDDKNKLFGTVKSWDAAVYVFTEVLGYDKHGKKNMQTQWTRLVGQSKDGNAKMKDHLRGQDFGSVVNRAKLLEILTPFPAAAARPDQGVIDATDGKHQYHCFVCKNEVSNDSEAIDAHFRQHHPSAEPDPLARFRARPLRQPKRAAPRAAAGESSRIPAVHPQTRIDPTAALNGNSLSLPPRPRPASDASLPTLLAPHEPPLSQSAEMPGATGDLYQGRFAPTIPLEGSWAPIASPPGFDFNMQRPAMTDPLGMYPPSGDMFVPDQLDFMPPQGSEVSSQGFTDAIFPVSADPYPLGPLISSPSRFAPLPSMAPVFGDPMSSAGGVPMEPQAQQCNTEESN

SEQ ID NO: 33448 - DNA, 498 bp, Muscodor strobelii
  misc_feature: SGI cDNA ID NO. 571539
  misc_feature: Elevated expression when VOC is produced
  misc_feature: Encodes the peptide sequence at SEQ ID NO 33449
atgtgggcaaaaccaacagctgtgcgaccgcaagaacccgcggcaataggttcacagcttcatccgctccacccaccatcctcaccgcctccggtaccgggctcgatgccgggccgccagcgcgtctacaccattcgaacgccgtatgctggccgccgtgtggcgcagatcgtgaagttgaagccagagttctatgataagtataaggaggtacacgatgcggtatggccagaggttttgcagcaaatcagggtcagtaatattagggactacagcatcttccacgataagggaacaggtatcctgtttgcgtctttcaaatatgttggatatgactatgcaggtgacatggagcggatgagggagaaccccaaagtcaaggagtggtgggctatgacggatgggtttcaggagagtttggtaccgggcgcagtcaatagcgaatctggagagccggcatggtggcagggcatggaagaggtattctacaccccgtag

SEQ ID NO: 33449 - protein, 165 aa, Muscodor strobelii
  misc_feature: SGI Peptide ID NO. 571539
  misc_feature (52)..(165): Pfam Id: PF05336 Pfam Desc: Domain of function (DUF718)
  misc_feature (46)..(163): NCBI GI: 85112389 Blast Desc: NCU01970 [Neurospora crassa OR74A] gi|28926112|gb|EAA35098.1| conserved [Neurospora crassa OR74A] gi|38567084|emb|CAE76381.1| conserved [Neurospora crassa]
  misc_feature (23)..(164): NCBI GI: 145610374 Blast Desc: MGG_12671 [Magnaporthe grisea 70-15] gi|149209533|ref|XP_001522141.1| MGCH7_ch7g249 [Magnaporthe grisea 70-15] gi|86196204|gb|EAQ70842.1| MGCH7_ch7g249 grisea
  misc_feature (46)..(165): NCBI GI: 261353500 Blast Desc: DUF718 domain-containing protein [Verticillium albo-atrum VaMs.102]
  misc_feature (52)..(165): NCBI GI: 46128259 Blast Desc: FG08507.1 [Gibberella zeae PH-1]
  misc_feature (50)..(165): NCBI GI: 256733487 Blast Desc: [Nectria haematococca mpVI 77-13-4]
  misc_feature (18)..(164): NCBI GI: 154293434 Blast Desc: BC1G_14343 [Botryotinia fuckeliana B05.10] gi|150845324|gb|EDN20517.1| BC1G_14343 [Botryotinia fuckeliana B05.10]
  misc_feature (52)..(164): NCBI GI: 121701417 Blast Desc: DUF718 domain protein [Aspergillus clavatus NRRL 1] gi|119397116|gb|EAW07547.1| DUF718 domain protein [Aspergillus clavatus NRRL 1]
  misc_feature (52)..(164): NCBI GI: 169763414 Blast Desc: [Aspergillus oryzae RIB40] gi|238489321|ref|XP_002375898.1| DUF718 domain protein [Aspergillus flavus NRRL3357] gi|83770635|dbj|BAE60768.1| protein
  misc_feature (51)..(164): NCBI GI: 67517616 Blast Desc: AN1009.2 [Aspergillus nidulans FGSC A4] gi|40746421|gb|EAA65577.1| conserved [Aspergillus nidulans FGSC A4] gi|259488695|tpe|CBF88343.1| TPA: DUF718 domain protein FGSC
  misc_feature (52)..(164): NCBI GI: 119495385 Blast Desc: NFIA_012700 [Neosartorya fischeri NRRL 181] gi|119412640|gb|EAW22581.1| conserved [Neosartorya fischeri NRRL 181]
  misc_feature: Useful for introducing or modulating the production of volatile compounds
MWAKPTAVRPQEPAAIGSQLHPLHPPSSPPPVPGSMPGRQRVYTIRTPYAGRRVAQIVKLKPEFYDKYKEVHDAVWPEVLQQIRVSNIRDYSIFHDKGTGILFASFKYVGYDYAGDMERMRENPKVKEWWAMTDGFQESLVPGAVNSESGEPAWWQGMEEVFYTP

SEQ ID NO: 33450 - DNA, 1626 bp, Muscodor strobelii
  misc_feature: SGI EST ID NO. CUFF.79115.0
  misc_feature: Variant of the nucleotide sequence at SEQ ID NO 33448
tttggatgctcaagtgtcagcttaattgattcttgcttactggatcgtattgtttgttgttctgttgagttctttttcttcaattgacatctttgaaaaaacaaaaaaggtgaagccctagctcatcctcacgattcacatccgctcctcacgcgactaacacactatagaccgaaaccccagcatcccgccctcccgcgccggtccgaaccgatctcactcgattcctttcggatccgaggagtccagcttctatatcacaccaatcgacctcatttcatttccctctctcgaatttcaaaatgtgggcaaaaccaacagctgtgcgaccgcaagaacccgcggcaataggttcacagcttcatccgctccacccaccatcctcaccgcctccggtaccgggctcgatgccgggccgccagcgcgtctacaccattcgaacgccgtatgctggccgccgtgtggcgcagatcgtgaagttgaagccagagttctatgataagtataaggaggtacacgatgcggtatggccagaggttttgcagcaaatcagggtcagtaatattagggactacagcatcttccacgataagggaacaggtatcctgtttgcgtctttcaaatatgttggatatgactatgcaggtgacatggagcggatgagggagaaccccaaagtcaaggagtggtgggctatgacggatgggtttcaggagagtttggtaccgggcgcagtcaatagcgaatctggagagccggcatggtggcagggcatggaagaggtattctacaccccgtagaatggttctgggaggcgcgaaacgagaatcaagcgtaatgagaagggactggccaaaaacagggtggtattctgaaaaggttgattcatcgcaatgtaaggcgtagtggcttccatcctcgttacataattctcttgcttttaccatgctctgcaatgtgatatgtcttcattcttggggtatctctccttgtgcgtcttcgaatctggttccgttgtggcagctttgaagatatcagcttgacattagctcagatcttccatgcggcgtcacttcggtggtttctgagctcctgtgtcgtacgcagacatcctcgagatactcatcacgctctcgggaccataggccagtcacggatgaaccgtcgagcatcatctcacgcaggactgcctccttcaagtcctctaaccatcgtcaagctcaccgcaagctcccaaacaatcccccaagcacactggcctgactccctccaccaccacctccatttctcctcgcctgactcctaacccaatcctccaagaagtctctattagtcagctttcttgcatccataactctttctccagggttctccccatcaaaactgagcagcgtaggtatcgaggtgatcatatatcgcatcggcagactctcggacccattgcccatgatatcgggagcgtcaaactcgacatttgcgtactgtacaccgccttcctcttcgcctatgccggactcgattatggatttcaggagtggggagacggtgtggcaagttcgacaccaggacgccgtccagagagttatgaggggttggttcgatgatgaggagaggagttggtaagag

SEQ ID NO: 33451 - DNA, 1698 bp, Muscodor strobelii
  misc_feature: SGI cDNA ID NO. 571540
  misc_feature: Encodes the peptide sequence at SEQ ID NO 33452
atggagaattcggacggagcaacaagacacaacttcaatgccgtcatatcgatccaagatctcgtcgagtactatctgcctccattccagcagtgcgctcgtgactcgcaagcaggctctgtgatgtgctcctacaattcgattaacggattacctgcatgtgccgacgagtacattctcggaactattcttcgcaagcattggaattggacagccggagaatactacgttgtgacagactgtggcgtgctacaagacacctttgagcagcacaactactcaaagacagcagctgaggcagtggctgttcttttcgctgctggaaccgacaacatctgttctggtcaagcatcggatgtcctagatgcctatgatcaagccctgatatcggaggagacgatggatcaatccctgaatcgactcttcgaggctctcatcagcctaggcatgttcgaacctattggcagtggtacatatgacagtcttgattggactgatgtgagcacaacggccaccgatgagcttgcgaggcgaagtgcagccaaaagtatggtcttaatgaagaacgatgggactctgcctctcaatttgctgcagtcaaatagttcagtagctatgattgggaattgggcgaacagcactttcaaccttctggggacctactttgggatgcctccttaccaacataccccattgtttgccgccaatgacctcggtatacccgttcactacgcgccaggtgctcccgacttcaacgcaactatcggagatgggcttcaagagagtttggcggctgcgtctgcttcggatttggttctttattttgcgggcataagtctcgcggaagagtcagaaacaaatgaccgaatttcgattgcttggtcagccgcgcaactagctgagatcagagaattgtgttctctcggcaagccatgtgttgtcgttgcgtatggcgatcagatggaccagacccccttactcgataattccaatgtctctgctattctctggggtggctatccggggcaagatggtggtccagcagcttttgacgtccttacaggcactgtcccgccagcaggtcgactaccagttacgcaatacccagctgcgtatgttgaccaagtcctgatgacagatatgacattgcgacccaacaacacgacaaatccgggtcgaacgtacatgtggtacgataaggtagtactcccattcgggttcggcttgcactacacggagttttctgcttcttttgatgggctgaccagatcatcgctgtctatcgacattagcatgccctctttcataatctcagatctggtatcagtctgttcagaagactatctggacctctgcctcttcagcaatgtcacagtctctataaccaacgttggccgtgtcacttcagacttcgtcgcgcttgtgtttatatcaggagaatatggtcctacccctcgtcccattaagaagcttgccaattacgcgcggcttcacgatctcgagccgggtaaaagtaaatcagtggccctcgatttgactttggggaatctcgcccgtgttgataaatttggcaacacggttctgtatcccggccgatacagtctcatgctcgatgtcccgacccaggcaacaatgaatttccaattagttggcgatgaagtcatcctcgatagttggccacagccgcccgtggagtaa

SEQ ID NO: 33452 - protein, 565 aa, Muscodor strobelii
  misc_feature: SGI Peptide ID NO. 571540
  misc_feature (1)..(114): Pfam Id: PF00933 Pfam Desc: Glycosyl hydrolase family 3 N terminal domain
  misc_feature (184)..(413): Pfam Id: PF01915 Pfam Desc: Glycosyl hydrolase family 3 C terminal domain
  misc_feature (2)..(114): Pfam Id: PF00933 Pfam Desc: Glycosyl hydrolase family 3 N terminal domain
  misc_feature (1)..(563): NCBI GI: 171695518 Blast Desc: protein product [Podospora anserina] gi|170948001|emb|CAP60165.1| protein product [Podospora anserina]
  misc_feature (1)..(562): NCBI GI: 164429277 Blast Desc: NCU09923 [Neurospora crassa OR74A] gi|16945419|emb|CAB91343.2| related to xylan 1, 4-beta-xylosidase [Neurospora crassa] gi|157073010|gb|EAA28973.2| NCU09923 crassa
  misc_feature (1)..(562): NCBI GI: 116197206 Blast Desc: CHGG_05201 [Chaetomium globosum CBS 148.51] gi|88181114|gb|EAQ88582.1| CHGG_05201 [Chaetomium globosum CBS 148.51]
  misc_feature (1)..(563): NCBI GI: 189201569 Blast Desc: beta-xylosidase [Pyrenophora tritici-repentis Pt-1C-BFP] gi|187984220|gb|EDU49708.1| beta-xylosidase [Pyrenophora tritici-repentis Pt-1C-BFP]
  misc_feature (1)..(565): NCBI GI: 169611757 Blast Desc: SNOG_08993 [Phaeosphaeria nodorum SN15] gi|160702362|gb|EAT83185.2| SNOG_08993 [Phaeosphaeria nodorum SN15]
  misc_feature (1)..(562): NCBI GI: 39955188 Blast Desc: MGG_08985 [Magnaporthe grisea 70-15] gi|145021056|gb|EDK05185.1| MGG_08985 [Magnaporthe grisea 70-15]
  misc_feature (31)..(561): NCBI GI: 46127231 Blast Desc: FG07993.1 [Gibberella zeae PH-1]
  misc_feature (1)..(563): NCBI GI: 171678585 Blast Desc: protein product [Podospora anserina] gi|170937362|emb|CAP62020.1| protein product [Podospora anserina]
  misc_feature (1)..(563): NCBI GI: 115436902 Blast Desc: conserved [Aspergillus terreus NIH2624] gi|114188489|gb|EAU30189.1| conserved [Aspergillus terreus NIH2624]
  misc_feature (1)..(563): NCBI GI: 121712174 Blast Desc: beta-xylosidase [Aspergillus clavatus NRRL 1] gi|119401854|gb|EAW12276.1| beta-xylosidase [Aspergillus clavatus NRRL 1]
  misc_feature (1)..(418): SWISSPROT Homolog: EC 3.2.1.37 Xylan 1,4-beta-xylosidase
MENSDGATRHNFNAVISIQDLVEYYLPPFQQCARDSQAGSVMCSYNSINGLPACADEYILGTILRKHWNWTAGEYYVVTDCGVLQDTFEQHNYSKTAAEAVAVLFAAGTDNICSGQASDVLDAYDQALISEETMDQSLNRLFEALISLGMFEPIGSGTYDSLDWTDVSTTATDELARRSAAKSMVLMKNDGTLPLNLLQSNSSVAMIGNWANSTFNLLGTYFGMPPYQHTPLFAANDLGIPVHYAPGAPDFNATIGDGLQESLAAASASDLVLYFAGISLAEESETNDRISIAWSAAQLAEIRELCSLGKPCVVVAYGDQMDQTPLLDNSNVSAILWGGYPGQDGGPAAFDVLTGTVPPAGRLPVTQYPAAYVDQVLMTDMTLRPNNTTNPGRTYMWYDKVVLPFGFGLHYTEFSASFDGLTRSSLSIDISMPSFIISDLVSVCSEDYLDLCLFSNVTVSITNVGRVTSDFVALVFISGEYGPTPRPIKKLANYARLHDLEPGKSKSVALDLTLGNLARVDKFGNTVLYPGRYSLMLDVPTQATMNFQLVGDEVILDSWPQPPVE

SEQ ID NO: 33453 - DNA, 1392 bp, Muscodor strobelii
  misc_feature: SGI EST ID NO. CUFF.79071.1
  misc_feature: Variant of the nucleotide sequence at SEQ ID NO 33451
gactgatgtgagcacaacggccaccgatgagcttgcgaggcgaagtgcagccaaaagtatggtcttaatgaagaacgatgggactctgcctctcaatttgctgcagtcaaatagttcagtagctatgattgggaattgggcgaacagcactttcaaccttctggggacctactttgggatgcctccttaccaacataccccattgtttgccgccaatgacctcggtatacccgttcactacgcgccaggtgctcccgacttcaacgcaactatcggagatgggcttcaagagagtttggcggctgcgtctgcttcggatttggttctttattttgcgggcataagtctcgcggaagagtcagaaacaaatgaccgaatttcgattgcttggtcagccgcgcaactagctgagatcagagaattgtgttctctcggcaagccatgtgttgtcgttgcgtatggcgatcagatggaccagacccccttactcgataattccaatgtctctgctattctctggggtggctatccggggcaagatggtggtccagcagcttttgacgtccttacaggcactgtcccgccagcaggtcgactaccagttacgcaatacccagctgcgtatgttgaccaagtcctgatgacagatatgacattgcgacccaacaacacgacaaatccgggtcgaacgtacatgtggtacgataaggtagtactcccattcgggttcggcttgcactacacggagttttctgcttcttttgatgggctgaccagatcatcgctgtctatcgacattagcatgccctctttcataatctcagatctggtatcagtctgttcagaagactatctggacctctgcctcttcagcaatgtcacagtctctataaccaacgttggccgtgtcacttcagacttcgtcgcgcttgtgtttatatcaggagaatatggtcctacccctcgtcccattaagaagcttgccaattacgcgcggcttcacgatctcgagccgggtaaaagtaaatcagtggccctcgatttgactttggggaatctcgcccgtgttgataaatttggcaacacggttctgtatcccggccgatacagtctcatgctcgatgtcccgacccaggcaacaatgaatttccaattagttggcgatgaagtcatcctcgatagttggccacagccgcccgtggagtaacttttcgcgtaaagcagagggccaggtgtagccgacttcgctggggaatgcacacaaaactgtacccattctagagagcagagatgaagatatttcgaaacccaaagttggaccttgtataccgcaacactctagtcaaaagcgtcagagtacattgtcaatacaaaagaagtaggaaattggac

SEQ ID NO: 33454 - DNA, 2361 bp, Muscodor strobelii
  misc_feature: SGI cDNA ID NO. 571541
  misc_feature: Encodes the peptide sequence at SEQ ID NO 33455
atgacattcgttaccttctcattattctgggtttattacctgacaattcctgctcgttcatttctgattagaccaaactgttcggcaccagggcttcttggccatgtcgtttgtaacacttcgctgacgcaagcgcaacgggcagcagcacttacggcgtccctgactcttgaaaagaaggccggatatttgttcgataatgctacgggtgcatcaagattaggactacccgcatacgaatggtggaatgagggattacacggtttgggtttctctgaaggtgtggacttcggcggcaccaatttcgcctcggtcatcatgggccagggtccgtctggagagcctttctcatcagctacatcatttgcgaaccccattctacttgcagcagcttttgatgatgacatgatccgcgaagttgcagacgcaatctctaccgaggcacgggcattctggaatggcgggagagcaggcttggactattggacaccaaacataaacccttacagagatccacgttggggccgaggagaggaaacgcccggcgaagatccggtacggataaagaaatacgtgaaggcattcattgaaggactccagggcccatctggaaaatacccaaagaagactatcgccgcttgcaaacatctcgctggctacgacatggagaattcggacggagcaacaagacacaacttcaatgccgtcatatcgatccaagatctcgtcgagtactatctgcctccattccagcagtgcgctcgtgactcgcaagcaggctctgtgatgtgctcctacaattcgattaacggattacctgcatgtgccgacgagtacattctcggaactattcttcgcaagcattggaattggacagccggagaatactacgttgtgacagactgtggcgtgctacaagacacctttgagcagcacaactactcaaagacagcagctgaggcagtggctgttcttttcgctgctggaaccgacaacatctgttctggtcaagcatcggatgtcctagatgcctatgatcaagccctgatatcggaggagacgatggatcaatccctgaatcgactcttcgaggctctcatcagcctaggcatgttcgaacctattggcagtggtacatatgacagtcttgattggactgatgtgagcacaacggccaccgatgagcttgcgaggcgaagtgcagccaaaagtatggtcttaatgaagaacgatgggactctgcctctcaatttgctgcagtcaaatagttcagtagctatgattgggaattgggcgaacagcactttcaaccttctggggacctactttgggatgcctccttaccaacataccccattgtttgccgccaatgacctcggtatacccgttcactacgcgccaggtgctcccgacttcaacgcaactatcggagatgggcttcaagagagtttggcggctgcgtctgcttcggatttggttctttattttgcgggcataagtctcgcggaagagtcagaaacaaatgaccgaatttcgattgcttggtcagccgcgcaactagctgagatcagagaattgtgttctctcggcaagccatgtgttgtcgttgcgtatggcgatcagatggaccagacccccttactcgataattccaatgtctctgctattctctggggtggctatccggggcaagatggtggtccagcagcttttgacgtccttacaggcactgtcccgccagcaggtcgactaccagttacgcaatacccagctgcgtatgttgaccaagtcctgatgacagatatgacattgcgacccaacaacacgacaaatccgggtcgaacgtacatgtggtacgataaggtagtactcccattcgggttcggcttgcactacacggagttttctgcttcttttgatgggctgaccagatcatcgctgtctatcgacattagcatgccctctttcataatctcagatctggtatcagtctgttcagaagactatctggacctctgcctcttcagcaatgtcacagtctctataaccaacgttggccgtgtcacttcagacttcgtcgcgcttgtgtttatatcaggagaatatggtcctacccctcgtcccattaagaagcttgccaattacgcgcggcttcacgatctcgagccgggtaaaagtaaatcagtggccctcgatttgactttggggaatctcgcccgtgttgataaatttggcaacacggttctgtatcccggccgatacagtctcatgctcgatgtcccgacccaggcaacaatgaatttccaattagttggcgatgaagtcatcctcgatagttggccacagccgcccgtggagtaa

SEQ ID NO: 33455 - protein, 786 aa, Muscodor strobelii
  misc_feature: SGI Peptide ID NO. 571541
  misc_feature (68)..(335): Pfam Id: PF00933 Pfam Desc: Glycosyl hydrolase family 3 N terminal domain
  misc_feature (405)..(634): Pfam Id: PF01915 Pfam Desc: Glycosyl hydrolase family 3 C terminal domain
  misc_feature (21)..(783): NCBI GI: 164429277 Blast Desc: NCU09923 [Neurospora crassa OR74A] gi|16945419|emb|CAB91343.2| related to xylan 1, 4-beta-xylosidase [Neurospora crassa] gi|157073010|gb|EAA28973.2| NCU09923 crassa
  misc_feature (25)..(784): NCBI GI: 171695518 Blast Desc: protein product [Podospora anserina] gi|170948001|emb|CAP60165.1| protein product [Podospora anserina]
  misc_feature (13)..(783): NCBI GI: 39955188 Blast Desc: MGG_08985 [Magnaporthe grisea 70-15] gi|145021056|gb|EDK05185.1| MGG_08985 [Magnaporthe grisea 70-15]
  misc_feature (20)..(784): NCBI GI: 189201569 Blast Desc: beta-xylosidase [Pyrenophora tritici-repentis Pt-1C-BFP] gi|187984220|gb|EDU49708.1| beta-xylosidase [Pyrenophora tritici-repentis Pt-1C-BFP]
  misc_feature (1)..(783): NCBI GI: 116197206 Blast Desc: CHGG_05201 [Chaetomium globosum CBS 148.51] gi|88181114|gb|EAQ88582.1| CHGG_05201 [Chaetomium globosum CBS 148.51]
  misc_feature (23)..(786): NCBI GI: 169611757 Blast Desc: SNOG_08993 [Phaeosphaeria nodorum SN15] gi|160702362|gb|EAT83185.2| SNOG_08993 [Phaeosphaeria nodorum SN15]
  misc_feature (25)..(784): NCBI GI: 115436902 Blast Desc: conserved [Aspergillus terreus NIH2624] gi|114188489|gb|EAU30189.1| conserved [Aspergillus terreus NIH2624]
  misc_feature (13)..(783): NCBI GI: 238508313 Blast Desc: beta-xylosidase, [Aspergillus flavus NRRL3357] gi|220688872|gb|EED45224.1| beta-xylosidase, [Aspergillus flavus NRRL3357]
  misc_feature (23)..(783): NCBI GI: 169784526 Blast Desc: [Aspergillus oryzae RIB40] gi|83775471|dbj|BAE65591.1| protein product [Aspergillus oryzae]
  misc_feature (7)..(784): NCBI GI: 171678585 Blast Desc: protein product [Podospora anserina] gi|170937362|emb|CAP62020.1| protein product [Podospora anserina]
  misc_feature (1)..(639): SWISSPROT Homolog: EC 3.2.1.37 Xylan 1,4-beta-xylosidase
MTFVTFSLFWVYYLTIPARSFLIRPNCSAPGLLGHVVCNTSLTQAQRAAALTASLTLEKKAGYLFDNATGASRLGLPAYEWWNEGLHGLGFSEGVDFGGTNFASVIMGQGPSGEPFSSATSFANPILLAAAFDDDMIREVADAISTEARAFWNGGRAGLDYWTPNINPYRDPRWGRGEETPGEDPVRIKKYVKAFIEGLQGPSGKYPKKTIAACKHLAGYDMENSDGATRHNFNAVISIQDLVEYYLPPFQQCARDSQAGSVMCSYNSINGLPACADEYILGTILRKHWNWTAGEYYVVTDCGVLQDTFEQHNYSKTAAEAVAVLFAAGTDNICSGQASDVLDAYDQALISEETMDQSLNRLFEALISLGMFEPIGSGTYDSLDWTDVSTTATDELARRSAAKSMVLMKNDGTLPLNLLQSNSSVAMIGNWANSTFNLLGTYFGMPPYQHTPLFAANDLGIPVHYAPGAPDFNATIGDGLQESLAAASASDLVLYFAGISLAEESETNDRISIAWSAAQLAEIRELCSLGKPCVVVAYGDQMDQTPLLDNSNVSAILWGGYPGQDGGPAAFDVLTGTVPPAGRLPVTQYPAAYVDQVLMTDMTLRPNNTTNPGRTYMWYDKVVLPFGFGLHYTEFSASFDGLTRSSLSIDISMPSFIISDLVSVCSEDYLDLCLFSNVTVSITNVGRVTSDFVALVFISGEYGPTPRPIKKLANYARLHDLEPGKSKSVALDLTLGNLARVDKFGNTVLYPGRYSLMLDVPTQATMNFQLVGDEVILDSWPQPPVE

SEQ ID NO: 33456 - DNA, 761 bp, Muscodor strobelii
  misc_feature: SGI EST ID NO. CUFF.79060.0
  misc_feature: Variant of the nucleotide sequence at SEQ ID NO 33454
gcctcggtcatcatgggccagggtccgtctggagagcctttctcatcagctacatcatttgcgaaccccattctacttgcagcagcttttgatgatgacatgatccgcgaagttgcagacgcaatctctaccgaggcacgggcattctggaatggcgggagagcaggcttggactattggacaccaaacataaacccttacagagatccacgttggggccgaggagaggaaacgcccggcgaagatccggtacggataaagaaatacgtgaaggcattcattgaaggactccagggcccatctggaaaatacccaaagaagactatcgccgcttgcaaacatctcgctggctacgacatggagaattcggacggagcaacaagacacaacttcaatgccgtcatatcgatccaagatctcgtcgagtactatctgcctccattccagcagtgcgctcgtgactcgcaagcaggctctgtgatgtgctcctacaattcgattaacggattacctgcatgtgccgacgagtacattctcggaactattcttcgcaagcattggaattggacagccggagaatactacgttgtgacagactgtggcgtgctacaagacacctttgagcagcacaactactcaaagacagcagctgaggcagtggctgttcttttcgctgctggaaccgacaacatctgttctggtcaagcatcggatgtcctagatgcctatgatcaagccctgatatcggaggagacgatgga

SEQ ID NO: 33457 - DNA, 624 bp, Muscodor strobelii
  misc_feature: SGI cDNA ID NO. 571542
  misc_feature: Encodes the peptide sequence at SEQ ID NO 33458
atggctgagaaaaagttcacaacggaaatgctcgacgatttagtccgcattatgtatgaatatgggggcatgactgacgatgacagtaagcctctcggtaaagttggtagttggaaccccgtagtctacatttaccttgaagtcctggggtacaaggccgatgtccattatgacaatataaaaaccacctggggtcgcgaaacgggatcgatgcaggacgggcaaaaacgactactcaagcgtctcggtgatgaaataggtgattttgaaagcaacaaggccaagctgctcagtacgatcaagtcactccccaaagccgcgactagagggaaccagggggtaattgacagggacaggaatttctgttgcttcctgtgcagaaagaagattgccaatatcgagagggacatcgataagcattttcgaaatgaccatccgggccagaacgaaaatctccgagggtattgtgggagggagggcgccaagctgatagcaaagcataacgcgaccaaaaaccccgaaaatccaggtatagccgtcgatgccttggcgcgattccgtaattgtctcggggaattgtatgatcaggttcttgaagagatcaatcaaggtcgtagtagttag

SEQ ID NO: 33458 - protein, 207 aa, Muscodor strobelii
  misc_feature: SGI Peptide ID NO. 571542
MAEKKFTTEMLDDLVRIMYEYGGMTDDDSKPLGKVGSWNPVVYIYLEVLGYKADVHYDNIKTTWGRETGSMQDGQKRLLKRLGDEIGDFESNKAKLLSTIKSLPKAATRGNQGVIDRDRNFCCFLCRKKIANIERDIDKHFRNDHPGQNENLRGYCGREGAKLIAKHNATKNPENPGIAVDALARFRNCLGELYDQVLEEINQGRSS

SEQ ID NO: 33459 - DNA, 2370 bp, Muscodor strobelii
  misc_feature: SGI cDNA ID NO. 571543
  misc_feature: Elevated expression when VOC is produced
  misc_feature: Encodes the peptide sequence at SEQ ID NO 33460
atggcagaggagacaaaccctcgcgcccctgggcgttcatggcggaatccatttggcagtcgtagtgattcatccctcgaccaaggcggacttggtgaaaaacaggcgaagccgttatggaacatgggcatgcttaatgataaggaaacaatagaagtaccaggatctgttctattgctttcaaaggagaggaatgagcctctaggtcttcggcatgcaccggccagaacttctcactcatcactcccgacgggatatttaccagatccgccggtatccaaggaggacgagaaaaagaagacgtcggacggcgagatcattctggagccgcagcctgacgattctcacaatgacccattgaactggcctgcctggcggcgcgactgtgctttgctctctttaggattatactgcatggtcggaggcggtaccactccgatcatcgcggcaggtttcacaaatgttgctgaagattacggcatcaacgtttcagaagtatcttacacgacaggattgtatatgttgggacttggtattggctgcgtcctcttctcgcctactgccattctctacggaaagcgtcctgtgtatctatgcagcgcgatcctctacatcatttccgctgtgtggtgcgcattatcacccaatttcccctcactcattcttgcccgaatcttccagggtattgcagtcagccctgtagaatgtcttccatcagctaccatagccgagattttcttcctgcatgaaagggcgttccggattggaatatacacattacttcttctcggcggtaaaaatttggttccccttgtttctgcggctatcattcaaagtctttcctggcgttgggtgttttggattcttgcccttgtcatagccttttgcagtattctgctctttttcttcgtcccagagacattttgggaccgaaatcctattccgagacctcgcaaagtgtccaaacgcccaagtttcttcagccgaaaatcgaccgagagacattttgtcacattgaaagccaaaccagtcgatgagaccaagccaaaacccgagttgcctgctgaaagtagtgtggttacaaaagcttcagaacaacagcatgatgaggaaaagcaggctgctgataagcctcacaagactcaaggcctccatgttggatttgccgcaaatgttgaagatcacccaactgaggaagagaagcacagacagggagaatcgcctcgcgattcaactgatatcgatataggatcagtgacaccaggccagacctctgccgctccgtccatactcaaagctgatggagtcaagaaacccgactcgcttcatactccttctcgacctcaatctcaccgagcgcgatcgagctatagtatcatgtcaccgaagagtgcccctgacgaacgtgctaatgttcctcctacacctgatatgcacaatttcaattcaccattttaccaaggagtatcgagagacgattatttcaaagatcaagaagctcaaggtacgagccacggcgccgtcagttccgatactgacagcgagaggatgtcattctcgaacttggcggctattgcgagcagatcccagatgtatacccataaactacgcgaggctcctcctcagtcgttcaaatcactgctgaggatccacaatggacgtatcaaccaagataagtggtggaaggccgctgttcgccccttcatcttgttctcttaccctgctgttctttggtcatcagcagtctacgcttgttccgtgggctggctaattgtgatctccgagtctgtcgcggtcatctaccgaaacggtggttaccatttcagcgccttgtcaactggtctcgtctacatctcaccgttcatcggcggtgtcctcggtacagcagtagcgggcaaagttagcgacataattgtgaaagcgatggcacgacgaaacggaggactctacgagccagagttccgacttgtaatggcgattcctatcctaattacgactgtaataggactcatcggattcggatggtcagccggcgtcgacgatccgtggattgtaccgacagtgttcttcggagttgtgtcgtttgggtgttcgcttggttctacgacggctatcacgtttgtcgtggactcttaccggcagtatgctggcgaggcgcttgtcacgcttaacttctcgaagaatgtcttccatgggtttgtgtttagttggtttgttactgggtggttggagagcgatgggcctaagagtgtgtatatgtggattggcatcatacagttgatcgtcctgctgtttacgccgctgatgtatatctatggcaagagggcacgtatgtggactgtcaggatgaaccttatggagaagttctga

SEQ ID NO: 33460 - protein, 789 aa, Muscodor strobelii
  misc_feature: SGI Peptide ID NO. 571543
  misc_feature (130)..(735): Pfam Id: PF07690 Pfam Desc: Major Facilitator Superfamily
  misc_feature (159)..(231): Pfam Id: PF00083 Pfam Desc: Sugar (and other) transporter
  misc_feature (14)..(789): NCBI GI: 164429590 Blast Desc: NCU01968 [Neurospora crassa OR74A] gi|157073540|gb|EAA35096.2| conserved [Neurospora crassa OR74A]
  misc_feature (1)..(789): NCBI GI: 261353498 Blast Desc: MFS1 family protein [Verticillium albo-atrum VaMs.102]
  misc_feature (1)..(789): NCBI GI: 116193717 Blast Desc: CHGG_06576 [Chaetomium globosum CBS 148.51] gi|88182489|gb|EAQ89957.1| CHGG_06576 [Chaetomium globosum CBS 148.51]
  misc_feature (40)..(789): NCBI GI: 256734086 Blast Desc: NECHADRAFT_35289 [Nectria haematococca mpVI 77-13-4]
  misc_feature (1)..(789): NCBI GI: 46128589 Blast Desc: FG08672.1 [Gibberella zeae PH-1]
  misc_feature (18)..(789): NCBI GI: 39969041 Blast Desc: MGG_10131 [Magnaporthe grisea 70-15] gi|145015166|gb|EDJ99734.1| MGG_10131 [Magnaporthe grisea 70-15]
  misc_feature (16)..(789): NCBI GI: 156035641 Blast Desc: SS1G_13024 [Sclerotinia sclerotiorum 1980] gi|154698429|gb|EDN98167.1| SS1G_13024 [Sclerotinia sclerotiorum 1980]
  misc_feature (33)..(789): NCBI GI: 212544488 Blast Desc: MFS transporter, [Penicillium marneffei ATCC 18224] gi|210065367|gb|EEA19461.1| MFS transporter, [Penicillium marneffei ATCC 18224]
  misc_feature (2)..(789): NCBI GI: 240106278 Blast Desc: Major Facilitator Superfamily protein [Coccidioides posadasii C735 delta SOWgp]
  misc_feature (8)..(789): NCBI GI: 71000399 Blast Desc: MFS transporter [Aspergillus fumigatus Af293] gi|66852531|gb|EAL92856.1| MFS transporter, [Aspergillus fumigatus Af293]
  misc_feature: Useful for introducing or modulating the production of volatile compounds
MAEETNPRAPGRSWRNPFGSRSDSSLDQGGLGEKQAKPLWNMGMLNDKETIEVPGSVLLLSKERNEPLGLRHAPARTSHSSLPTGYLPDPPVSKEDEKKKTSDGEIILEPQPDDSHNDPLNWPAWRRDCALLSLGLYCMVGGGTTPIIAAGFTNVAEDYGINVSEVSYTTGLYMLGLGIGCVLFSPTAILYGKRPVYLCSAILYIISAVWCALSPNFPSLILARIFQGIAVSPVECLPSATIAEIFFLHERAFRIGIYTLLLLGGKNLVPLVSAAIIQSLSWRWVFWILALVIAFCSILLFFFVPETFWDRNPIPRPRKVSKRPSFFSRKSTERHFVTLKAKPVDETKPKPELPAESSVVTKASEQQHDEEKQAADKPHKTQGLHVGFAANVEDHPTEEEKHRQGESPRDSTDIDIGSVTPGQTSAAPSILKADGVKKPDSLHTPSRPQSHRARSSYSIMSPKSAPDERANVPPTPDMHNFNSPFYQGVSRDDYFKDQEAQGTSHGAVSSDTDSERMSFSNLAAIASRSQMYTHKLREAPPQSFKSLLRIHNGRINQDKWWKAAVRPFILFSYPAVLWSSAVYACSVGWLIVISESVAVIYRNGGYHFSALSTGLVYISPFIGGVLGTAVAGKVSDIIVKAMARRNGGLYEPEFRLVMAIPILITTVIGLIGFGWSAGVDDPWIVPTVFFGVVSFGCSLGSTTAITFVVDSYRQYAGEALVTLNFSKNVFHGFVFSWFVTGWLESDGPKSVYMWIGIIQLIVLLFTPLMYIYGKRARMWTVRMNLMEKF

SEQ ID NO: 33461 - DNA, 3844 bp, Muscodor strobelii
  misc_feature: SGI EST ID NO. CUFF.79078.0
  misc_feature: Variant of the nucleotide sequence at SEQ ID NO 33459
gtcggtatcaccgctcttcattggctctgaagacttctgcagcatgggcacgttactcacacctgctcgtgttaagtgttgtctgcattcctgatgcactgttgcctcatacctccaccgaattgctgctgtactgctaacaaacttgaccacactccaattattgatgctgcatgagcagcaccaccattttccgtactggcatgcatgatagatgcttatatctgtaaaccgctaatgataaataagcatcgccatttgacccttgaaattgccagtatttattcacctgtgcttctcattaacgaagtattcggatattctccgatcttctcttcccccagaaagatctggccggggttgatattgactagtcgagatcaaggagtgaataaggcacattctcgacatccctatcgacggcccgtttcacaaccttaatctaagtattttctgagacgctgggtctagctctagacaaacccatctttcattctccggactgatcggctccgccttctcatctttagaacccgtacatcttgtcactatcgtgcttgccaccaccgtctctgcgtccggctgtcgcgctagcacagacaccctgctgatcttggccccaactcaacgttcttcacttgctccccgcctgcaaggttgtcaatcatctactatattatggggatgagatttgaatagatctcgcatacggagggaaacggcggtggatgttacatgaatatttgccaaggccctattgccatcatccttcacctaccttatcatatactaacgcctaaccaccgctgatcaccaacgtgtgtggaggctggcaggacagggttgccagagcaagagtatctgactcaaccttgtttatttcccgactaccgtctataacaggaccctgcatccacacctagatcctattagctgccgcatctcgcaacattatcgactttccttttcgctcttttgagttcttgcttgctcatctatatcttttatcaacatatttagggtatagaatcgcctgttggaacacttatatacgggttgagttagagttggatcgaagatggcagaggagacaaaccctcgcgcccctgggcgttcatggcggaatccatttggcagtcgtagtgattcatccctcgaccaaggcggacttggtgaaaaacaggcgaagccgttatggaacatgggcatgcttaatgataaggaaacaatagaagtaccaggatctgttctattgctttcaaaggagaggaatgagcctctaggtcttcggcatgcaccggccagaacttctcactcatcactcccgacgggatatttaccagatccgccggtatccaaggaggacgagaaaaagaagacgtcggacggcgagatcattctggagccgcagcctgacgattctcacaatgacccattgaactggcctgcctggcggcgcgactgtgctttgctctctttaggattatactgcatggtcggaggcggtaccactccgatcatcgcggcaggtttcacaaatgttgctgaagattacggcatcaacgtttcagaagtatcttacacgacaggattgtatatgttgggacttggtattggctgcgtcctcttctcgcctactgccattctctacggaaagcgtcctgtgtatctatgcagcgcgatcctctacatcatttccgctgtgtggtgcgcattatcacccaatttcccctcactcattcttgcccgaatcttccagggtattgcagtcagccctgtagaatgtcttccatcagctaccatagccgagattttcttcctgcatgaaagggcgttccggattggaatatacacattacttcttctcggcggtaaaaatttggttccccttgtttctgcggctatcattcaaagtctttcctggcgttgggtgttttggattcttgcccttgtcatagccttttgcagtattctgctctttttcttcgtcccagagacattttgggaccgaaatcctattccgagacctcgcaaagtgtccaaacgcccaagtttcttcagccgaaaatcgaccgagagacattttgtcacattgaaagccaaaccagtcgatgagaccaagccaaaacccgagttgcctgctgaaagtagtgtggttacaaaagcttcagaacaacagcatgatgaggaaaagcaggctgctgataagcctcacaagactcaaggcctccatgttggatttgccgcaaatgttgaagatcacccaactgaggaagagaagcacagacagggagaatcgcctcgcgattcaactgatatcgatataggatcagtgacaccaggccagacctctgccgctccgtccatactcaaagctgatggagtcaagaaacccgactcgcttcatactccttctcgacctcaatctcaccgagcgcgatcgagctatagtatcatgtcaccgaagagtgcccctgacgaacgtgctaatgttcctcctacacctgatatgcacaatttcaattcaccattttaccaaggagtatcgagagacgattatttcaaagatcaagaagctcaaggtacgagccacggcgccgtcagttccgatactgacagcgagaggatgtcattctcgaacttggcggctattgcgagcagatcccagatgtatacccataaactacgcgaggctcctcctcagtcgttcaaatcactgctgaggatccacaatggacgtatcaaccaagataagtggtggaaggccgctgttcgccccttcatcttgttctcttaccctgctgttctttggtcatcagcagtctacgcttgttccgtgggctggctaattgtgatctccgagtctgtcgcggtcatctaccgaaacggtggttaccatttcagcgccttgtcaactggtctcgtctacatctcaccgttcatcggcggtgtcctcggtacagcagtagcgggcaaagttagcgacataattgtgaaagcgatggcacgacgaaacggaggactctacgagccagagttccgacttgtaatggcgattcctatcctaattacgactgtaataggactcatcggattcggatggtcagccggcgtcgacgatccgtggattgtaccgacagtgttcttcggagttgtgtcgtttgggtgttcgcttggttctacgacggctatcacgtttgtcgtggactcttaccggcagtatgctggcgaggcgcttgtcacgcttaacttctcgaagaatgtcttccatgggtttgtgtttagttggtttgttactgggtggttggagagcgatgggcctaagagtgtgtatatgtggattggcatcatacagttgatcgtcctgctgtttacgccgctgatgtatatctatggcaagagggcacgtatgtggactgtcaggatgaaccttatggagaagttctgatttgttcactgcgatggaaatgtggatgtaccagggggcaagagggacaggtccattttggcagtggttactcgtttgtctgcgtctcagctgctggacataccattcttcggcagaatcgagttcagggcaagggctcttgaaacatttcgtgagcgtaacatgcaatactgtcaaacagcgtttgtcggtatggttgtccctaatggtcttggggtaccactggtgttgaaggcgttctccggggacttctgaatacctcttgcatagcatttagggaaggtcacgagattgggtcttagtatcttacatagcatgattatggcgttgtggtatcaatcggaatgatcatcgtcttttgaacatttcatctacttgaaactgacttatttcatt

SEQ ID NO: 33462 - DNA, 849 bp, Muscodor strobelii
  misc_feature: SGI cDNA ID NO. 571544
  misc_feature: Encodes the peptide sequence at SEQ ID NO 33463
atggcctcgagagcaccacccctcctcgagccttacgtccgcttgccccacgagacctcgcttgtgctactcactagcgttctaggctcgagtacgaactggcttgttcagcgatttatttactcacttctttcgtctccaaatacttcgctacaccatactcacatacatgagagtatacaaaacagcgagaatgagaaggtcagcgtcgtgctcgtgagcttccttcgcgattatgccttctggaaggatggcgtgaagcgcttgggtcttgacctagaccaagctatgaagaagggctcttttgccttcatcgatggacttaccggtttgtttaccggaaaccaacagattgccgcaaatgggacaggcttggctccgaaggtgctgtcggcgggcgtaaatcactttgaagcagccgtccgggacgctgtgcaccatttccagacttcaacaccaggaacaaagactgtattgatcgtcgatcagccggatttgctactggcagctacggagagcgcgacgagtcagaatctacgggcttcaatcttggctctacgtgagcacgtccattcatgcatcgttaccgtgtctgccgatgagcctcttatcgcccagcaaacatctacgttggaaaaagaacatgcgtccttcgctctgtcattagcacacgatgcaggacttgtcatgagcttacgaatgctagaaacgggtgtagccaaggatgtgagcggtgtcatcagagtcacgccgggaggtgacgaaagtggagggtcagtggaagatcgagagttactgtactttattggaggtgatggtggagttcgtgtatttgagcgtggacaataa

SEQ ID NO: 33463 - protein, 282 aa, Muscodor strobelii
  misc_feature: SGI Peptide ID NO. 571544
  misc_feature (1)..(282): NCBI GI: 261353501 Blast Desc: conserved [Verticillium albo-atrum VaMs.102]
  misc_feature (6)..(282): NCBI GI: 171676109 Blast Desc: protein product [Podospora anserina] gi|170936120|emb|CAP60780.1| protein product [Podospora anserina]
  misc_feature (1)..(282): NCBI GI: 145610256 Blast Desc: MGG_02621 [Magnaporthe grisea 70-15] gi|145017597|gb|EDK01960.1| MGG_02621 [Magnaporthe grisea 70-15]
  misc_feature (1)..(282): NCBI GI: 149209721 Blast Desc: MGCH7_ch7g343 [Magnaporthe grisea 70-15] gi|86196298|gb|EAQ70936.1| MGCH7_ch7g343 [Magnaporthe grisea 70-15]
  misc_feature (2)..(281): NCBI GI: 256733633 Blast Desc: NECHADRAFT_77940 [Nectria haematococca mpVI 77-13-4]
  misc_feature (6)..(280): NCBI GI: 154293438 Blast Desc: BC1G_14345 [Botryotinia fuckeliana B05.10] gi|150845326|gb|EDN20519.1| BC1G_14345 [Botryotinia fuckeliana B05.10]
  misc_feature (12)..(282): NCBI GI: 238505481 Blast Desc: conserved [Aspergillus flavus NRRL3357] gi|220690079|gb|EED46429.1| conserved [Aspergillus flavus NRRL3357]
  misc_feature (3)..(281): NCBI GI: 46128587 Blast Desc: FG08671.1 [Gibberella zeae PH-1]
  misc_feature (12)..(282): NCBI GI: 255944169 Blast Desc: Pc20g02990 [Penicillium chrysogenum Wisconsin 54-1255] gi|211587587|emb|CAP85628.1| Pc20g02990 [Penicillium chrysogenum Wisconsin 54-1255]
  misc_feature (6)..(282): NCBI GI: 259482368 Blast Desc: TPA: conserved [Aspergillus nidulans FGSC A4]
MASRAPPLLEPYVRLPHETSLVLLTSVLGSSTNWLVQRFIYSLLSSPNTSLHHTHIHESIQNSENEKVSVVLVSFLRDYAFWKDGVKRLGLDLDQAMKKGSFAFIDGLTGLFTGNQQIAANGTGLAPKVLSAGVNHFEAAVRDAVHHFQTSTPGTKTVLIVDQPDLLLAATESATSQNLRASILALREHVHSCIVTVSADEPLIAQQTSTLEKEHASFALSLAHDAGLVMSLRMLETGVAKDVSGVIRVTPGGDESGGSVEDRELLYFIGGDGGVRVFERGQ

SEQ ID NO: 33464 - DNA, 2284 bp, Muscodor strobelii
  misc_feature: SGI EST ID NO. CUFF.79673.0
  misc_feature: Variant of the nucleotide sequence at SEQ ID NO 33462
cgcacacctcgagacccaggaccctgacaccactccagagaacaacaattcccaacgctccaacgtgacgaccgtgcagccaagcgaatgcacgtatttctcagcgcggcaatccctcctaccgtaatctcattgtacacattttcaccctttgtgcctcacttgtttcaagacgatagaggccacctgactctagaaattctagccgagtcagcgtgcccagcccctctcgactcatggcctcgagagcaccacccctcctcgagccttacgtccgcttgccccacgagacctcgcttgtgctactcactagcgttctaggctcgagtacgaactggcttgttcagcgatttatttactcacttctttcgtctccaaatacttcgctacaccatactcacatacatgagagtatacaaaacagcgagaatgagaaggtcagcgtcgtgctcgtgagcttccttcgcgattatgccttctggaaggatggcgtgaagcgcttgggtcttgacctagaccaagctatgaagaagggctcttttgccttcatcgatggacttaccggtttgtttaccggaaaccaacagattgccgcaaatgggacaggcttggctccgaaggtgctgtcggcgggcgtaaatcactttgaagcagccgtccgggacgctgtgcaccatttccagacttcaacaccaggaacaaagactgtattgatcgtcgatcagccggatttgctactggcagctacggagagcgcgacgagtcagaatctacgggcttcaatcttggctctacgtgagcacgtccattcatgcatcgttaccgtgtctgccgatgagcctcttatcgcccagcaaacatctacgttggaaaaagaacatgcgtccttcgctctgtcattagcacacgatgcaggacttgtcatgagcttacgaatgctagaaacgggtgtagccaaggatgtgagcggtgtcatcagagtcacgccgggaggtgacgaaagtggagggtcagtggaagatcgagagttactgtactttattggaggtgatggtggagttcgtgtatttgagcgtggacaataacatgatatgcaccatgccacacattcttccacttgccatacaactccataatcattgctcgtccgccctgtggtcactagcagaagtgctattccgtccatgccaacttctggttttcgtctacagtcttatcaagtagtcgggacatgcaccgtcatcgaagagagccatcggtttggtgttaattttgccgtttgtcttggccgttgccagatcgtgatgcaaagttttgagggatgttgctagcataacatttccctcgaactcaagaatgctgagagtccatgaagtaccagtccgaatgtcaaaaacaccgtcccattgccatgccccatccagattggtcgtcctcgcttttcgttccccgttcatttcagccgcgcgttgtgttgatcgatttagaagggagccttggagtccttctgcacgccggtctggaagccgttcttgaagcggcgggagacgtcgctgaggtatcgcatgcggccagttccgacagtctttctgcgcttggccttctcgctccagttgtctgtagtcaatgcgtcagcctcctatatccgtttactgagtataaatcgctcgagagatccgattgtatgtgtcgatgcggtgcaatattgggtcgaggaattgtggttcacatacacttgcgagtcttagcggaggggtagccacatgacgagcaggtgtgcttctggatgtggagagagcggcgtcctgcaaaataaacccatcagtatcaattcaaattttctctagcgaacagcgacggcgcatttcgatgacgtgaaattcggccggtcggtcctcctccagctccagtcctcctcttgtctgccatcatcattgaaaattgccatgccgtcgtgccatatcctgggatcgagattgactaaccgcaacgacggcacagagtgtgcgtcttgttgtggcgctttccgaagctggaagttcccttggctgttgtcgatggttagcgacatcgaacggagacggcaatgcggatcgaggtggtaacgcactcattttggcgacgaggctgtgtgaagggtcgggttagtagaagtcgtcgacagaagtcatgaagaggcgggcgcgggaaagatgccgtacctcgatggctgtccgactgggagaaatgtctagattatgggcttgtaccgtgtttgagcgggtagcgttgggtgggtttttct

SEQ ID NO: 33465 - DNA, 273 bp, Muscodor strobelii
  misc_feature: SGI cDNA ID NO. 571545
  misc_feature: Reduced expression when VOC is produced
  misc_feature: Encodes the peptide sequence at SEQ ID NO 33466
atgaccaagggaacttccagcttcggaaagcgccacaacaagacgcacactctgtgccgtcgttgcggacgccgctctctccacatccagaagcacacctgctcgtcatgtggctacccctccgctaagactcgcaagtacaactggagcgagaaggccaagcgcagaaagactgtcggaactggccgcatgcgatacctcagcgacgtctcccgccgcttcaagaacggcttccagaccggcgtgcagaaggactccaaggctcccttctaa

SEQ ID NO: 33466 - protein, 90 aa, Muscodor strobelii
  misc_feature: SGI Peptide ID NO. 571545
  misc_feature (2)..(55): Pfam Id: PF01907 Pfam Desc: Ribosomal protein L37e
  misc_feature (1)..(88): NCBI GI: 261353502 Blast Desc: 60S ribosomal protein L37 [Verticillium albo-atrum VaMs.102]
  misc_feature (1)..(89): NCBI GI: 154293440 Blast Desc: 60S ribosomal protein L37 [Botryotinia fuckeliana B05.10] gi|150845327|gb|EDN20520.1| 60S ribosomal protein L37 [Botryotinia fuckeliana B05.10]
  misc_feature (1)..(89): NCBI GI: 171676111 Blast Desc: protein product [Podospora anserina] gi|170936121|emb|CAP60781.1| protein product [Podospora anserina]
  misc_feature (1)..(89): NCBI GI: 189202808 Blast Desc: 60S ribosomal protein L37 [Pyrenophora tritici-repentis Pt-1C-BFP] gi|187984839|gb|EDU50327.1| 60S ribosomal protein L37 [Pyrenophora tritici-repentis Pt-1C-BFP]
  misc_feature (1)..(88): NCBI GI: 145610258 Blast Desc: ribosomal protein L37 [Magnaporthe grisea 70-15] gi|145017598|gb|EDK01961.1| ribosomal protein L37 [Magnaporthe grisea 70-15]
  misc_feature (1)..(89): NCBI GI: 156035659 Blast Desc: ribosomal protein L37 [Sclerotinia sclerotiorum 1980] gi|154698438|gb|EDN98176.1| ribosomal protein L37 [Sclerotinia sclerotiorum 1980]
  misc_feature (1)..(89): NCBI GI: 240282188 Blast Desc: conserved [Ajellomyces capsulatus H143]
  misc_feature (1)..(90): NCBI GI: 85112371 Blast Desc: 60S ribosomal protein L37 [Neurospora crassa OR74A] gi|28926108|gb|EAA35094.1| 60S ribosomal protein L37 [Neurospora crassa OR74A]
  misc_feature (1)..(89): NCBI GI: 116193721 Blast Desc: conserved [Chaetomium globosum CBS 148.51] gi|88182491|gb|EAQ89959.1| conserved [Chaetomium globosum CBS 148.51]
  misc_feature (1)..(89): NCBI GI: 238505483 Blast Desc: 60S ribosomal protein L37 [Aspergillus flavus NRRL3357] gi|220690080|gb|EED46430.1| 60S ribosomal protein L37 [Aspergillus flavus NRRL3357]
  misc_feature: Useful for introducing or modulating the production of volatile compounds
MTKGTSSFGKRHNKTHTLCRRCGRRSLHIQKHTCSSCGYPSAKTRKYNWSEKAKRRKTVGTGRMRYLSDVSRRFKNGFQTGVQKDSKAPF

SEQ ID NO: 33467 - DNA, 1917 bp, Muscodor strobelii
  misc_feature: SGI EST ID NO. CUFF.79674.2
  misc_feature: Variant of the nucleotide sequence at SEQ ID NO 33465
agaaaaacccacccaacgctacccgctcaaacacggtacaagcccataatctagacatttctcccagtcggacagccatcgagcctcgtcgccaaaatgaccaagggaacttccagcttcggaaagcgccacaacaagacgcacactctgtgccgtcgttgcggacgccgctctctccacatccagaagcacacctgctcgtcatgtggctacccctccgctaagactcgcaagtacaactggagcgagaaggccaagcgcagaaagactgtcggaactggccgcatgcgatacctcagcgacgtctcccgccgcttcaagaacggcttccagaccggcgtgcagaaggactccaaggctcccttctaaatcgatcaacacaacgcgcggctgaaatgaacggggaacgaaaagcgaggacgaccaatctggatggggcatggcaatgggacggtgtttttgacattcggactggtacttcatggactctcagcattcttgagttcgagggaaatgttatgctagcaacatccctcaaaactttgcatcacgatctggcaacggccaagacaaacggcaaaattaacaccaaaccgatggctctcttcgatgacggtgcatgtcccgactacttgataagactgtagacgaaaaccagaagttggcatggacggaatagcacttctgctagtgaccacagggcggacgagcaatgattatggagttgtatggcaagtggaagaatgtgtggcatggtgcatatcatgttattgtccacgctcaaatacacgaactccaccatcacctccaataaagtacagtaactctcgatcttccactgaccctccactttcgtcacctcccggcgtgactctgatgacaccgctcacatccttggctacacccgtttctagcattcgtaagctcatgacaagtcctgcatcgtgtgctaatgacagagcgaaggacgcatgttctttttccaacgtagatgtttgctgggcgataagaggctcatcggcagacacggtaacgatgcatgaatggacgtgctattatgatatttattattatatgattctagataacatagcatgttcctccatatccgacttacctcacgtagagccaagattgaagcccgtagattctgactcgtcgcgctctccgtagctgccagtagcaaatccggctgatcgacgatcaatacagtctttgttcctggtgttgaagtctggaaatggtgcacagcgtcccggacggctgcttcaaagtgatttacgcccgccgacagcaccttcggagccaagcctgtcccatttgcggcaatctgttggtttccggtaaacaaaccggtaagtccatcgatgaaggcaaaagagcccttcttcatagcttggtctaggtcaagacccaagcgcttcacgccatccttccagaaggcataatcgcgaaggaagctcacgagcacgacgctgaccttctcattctcgctgttttgtatactctcatgtatgtgagtatggtgtagcgaagtatttggagacgaaagaagtgagtaaataaatcgctgaacaagccagttcgtactcgagcctagaacgctagtgagtagcacaagcgaggtctcgtggggcaagcggacgtaaggctcgaggaggggtggtgctctcgaggccatgagtcgagaggggctgggcacgctgactcggctagaatttctagagtcaggtggcctctatcgtcttgaaacaagtgaggcacaaagggtgaaaatgtgtacaatgagattacggtaggagggattgccgcgctgagaaatacgtgcattcgcttggctgcacggtcgtcacgttggagcgttgggaattgttgttctctggagtggtgtcagggtcctgggtctcgaggtgtgcg

SEQ ID NO: 33468 - DNA, 1038 bp, Muscodor strobelii
  misc_feature: SGI cDNA ID NO. 571546
  misc_feature: Encodes the peptide sequence at SEQ ID NO 33469
atgaattatctctactccaccgtcaatacactgcgggacagcttggcgcccgtatcccacacctcgacctttcgcaagaccggccaaatcacgcccgaggagttcatagctgccggcgactatcttgtcttcaagtttcccacctggtcttgggccgacgccgacgccgagtcccgccgcgtatcgtacttgccaccgggcaagcagttcctcgtcacgcgtaacgtaccgtgcaaccgtcgcctggacgatgacttcgcgggagatgcaggccacgaagaggctgttgtcaacgaaggcgccgacttcaagctcaagggacaagccgacgaggacgatggatggctaaggactggcggcctaagcagctcacagcccctcaaggccaaggacattcgaaccgttgatgacgccggaaacgtcggagatagcatagatgacgacgacgatatccccgatatggaggacgaagacgatgacgaggccatcattcgcgatgacgatgctgtcaagaggataggctctcgccggacgtatacgctatatatcatgtactcaccatactactcaacaccacgtttgtacctatcgggctactctgaaggccagcctctcgcgccgcagctcatgatggaggatatcgtcggagattataaggacaagaccgtcacattggaaaacttccccttcttcgccaaccacgtcaagatggccagtgttcacccttgcaaacacgcatccgtcatgaagacgctcctggaccgcgccgatgcagctctcaagattagacgggacaaaatgagggctggtaaacaaattggcaacgatgccgggatggagggtctggtcgatgagattaacaagttggacgtgaagagtgccgaagctgcagccgagtcaagtaacgacgactgggaagaggttgaggccgaggatcaggaagtggctatccgggttgaccagtatctcgtggtattcttaaagttcatggccagtgtcacacctggtatcgagcatgatttcactatgggtgtctag

SEQ ID NO: 33469 - protein, 345 aa, Muscodor strobelii
  misc_feature: SGI Peptide ID NO. 571546
  misc_feature (171)..(343): Pfam Id: PF03987 Pfam Desc: Autophagocytosis associated protein, C-terminal domain
  misc_feature (3)..(166): Pfam Id: PF03986 Pfam Desc: Autophagocytosis associated protein, N-terminal domain
  misc_feature (171)..(254): Pfam Id: PF03987 Pfam Desc: Autophagocytosis associated protein, C-terminal domain
  misc_feature (304)..(343): Pfam Id: PF03987 Pfam Desc: Autophagocytosis associated protein, C-terminal domain
  misc_feature (3)..(118): Pfam Id: PF03986 Pfam Desc: Autophagocytosis associated protein, N-terminal domain
  misc_feature (1)..(345): NCBI GI: 46129449 Blast Desc: FG08900.1 [Gibberella zeae PH-1]
  misc_feature (1)..(345): NCBI GI: 256734237 Blast Desc: NECHADRAFT_36177 [Nectria haematococca mpVI 77-13-4]
  misc_feature (1)..(345): NCBI GI: 39970985 Blast Desc: MGG_02959 [Magnaporthe grisea 70-15] gi|149210517|ref|XP_001522633.1| MGCH7_ch7g733 [Magnaporthe grisea 70-15] gi|71152284|sp|Q51LD2.1|ATG3_MAGGR RecName: protein
  misc_feature (1)..(345): NCBI GI: 85112065 Blast Desc: NCU01955 [Neurospora crassa OR74A] gi|62899774|sp|Q7SDY2.1|ATG3_NEUCR RecName: Full=Autophagy-related protein 3; AltName: Full=Autophagy-related
  misc_feature (1)..(345): NCBI GI: 156040728 Blast Desc: SS1G_11342 [Sclerotinia sclerotiorum 1980] gi|166990608|sp|A7F172.1|ATG3_SCLS1 RecName: Full=Autophagy-related protein 3; AltName: Full=Autophagy-related
  misc_feature (1)..(345): NCBI GI: 171676127 Blast Desc: protein product [Podospora anserina] gi|170936129|emb|CAP60789.1| protein product [Podospora anserina]
  misc_feature (1)..(345): NCBI GI: 116193741 Blast Desc: CHGG_06588 [Chaetomium globosum CBS 148.51] gi|121785092|sp|Q2H427.1|ATG3_CHAGB RecName: Full=Autophagy-related protein 3; AltName: Full=Autophagy-related
  misc_feature (2)..(345): NCBI GI: 189206742 Blast Desc: autophagocytosis protein [Pyrenophora tritici-repentis Pt-1C-BFP] gi|187975798|gb|EDU42424.1| autophagocytosis protein [Pyrenophora tritici-repentis Pt-1C-BFP]
  misc_feature (2)..(345): NCBI GI: 169621141 Blast Desc: SNOG_13776 [Phaeosphaeria nodorum SN15] gi|121924545|sp|Q0U388.1|ATG3_PHANO RecName: Full=Autophagy-related protein 3; AltName: Full=Autophagy-related
  misc_feature (1)..(345): NCBI GI: 119479681 Blast Desc: autophagocytosis protein Aut1, [Neosartorya fischeri NRRL 181] gi|166990599|sp|A1DF15.1|ATG3_NEOFI RecName: Full=Autophagy-related protein 3; AltName: Full=Autophagy-related
MNYLYSTVNTLRDSLAPVSHTSTFRKTGQITPEEFIAAGDYLVFKFPTWSWADADAESRRVSYLPPGKQFLVTRNVPCNRRLDDDFAGDAGHEEAVVNEGADFKLKGQADEDDGWLRTGGLSSSQPLKAKDIRTVDDAGNVGDSIDDDDDIPDMEDEDDDEAIIRDDDAVKRIGSRRTYTLYIMYSPYYSTPRLYLSGYSEGQPLAPQLMMEDIVGDYKDKTVTLENFPFFANHVKMASVHPCKHASVMKTLLDRADAALKIRRDKMRAGKQIGNDAGMEGLVDEINKLDVKSAEAAAESSNDDWEEVEAEDQEVAIRVDQYLVVFLKFMASVTPGIEHDFTMGV

SEQ ID NO: 33470 - DNA, 1826 bp, Muscodor strobelii
  misc_feature: SGI EST ID NO. CUFF.79080.0
  misc_feature: Variant of the nucleotide sequence at SEQ ID NO 33468
gcagtcagaagggtggttcagctcataggagctcatagctatctctcattgacaaccttgctgaatgtgtcatttcattcgcgtctccagaaataacatcatgtgatgccagagcagccttgtggcctatccaacgtgaatcagaatcaatacagccatcagatcaataagcagtgcctgtcagtcgctctgacactacaggcaaccattaagcttttgtcgtttctattgctttcctctgctttgcgctgtgtgaaacccttctggcgtcatcttatcctctgacgtctaagtgtacctacttactacttctttgtgttccacctaccgcacatccgcaaccacgctgctttctcctctcttcaaagatagactgcaacattacactccctgcttgtcctctttgcataaacagtacatctgaggagcatcaaatttcatcacaatgaattatctctactccaccgtcaatacactgcgggacagcttggcgcccgtatcccacacctcgacctttcgcaagaccggccaaatcacgcccgaggagttcatagctgccggcgactatcttgtcttcaagtttcccacctggtcttgggccgacgccgacgccgagtcccgccgcgtatcgtacttgccaccgggcaagcagttcctcgtcacgcgtaacgtaccgtgcaaccgtcgcctggacgatgacttcgcgggagatgcaggccacgaagaggctgttgtcaacgaaggcgccgacttcaagctcaagggacaagccgacgaggacgatggatggctaaggactggcggcctaagcagctcacagcccctcaaggccaaggacattcgaaccgttgatgacgccggaaacgtcggagatagcatagatgacgacgacgatatccccgatatggaggacgaagacgatgacgaggccatcattcgcgatgacgatgctgtcaagaggataggctctcgccggacgtatacgctatatatcatgtactcaccatactactcaacaccacgtttgtacctatcgggctactctgaaggccagcctctcgcgccgcagctcatgatggaggatatcgtcggagattataaggacaagaccgtcacattggaaaacttccccttcttcgccaaccacgtcaagatggccagtgttcacccttgcaaacacgcatccgtcatgaagacgctcctggaccgcgccgatgcagctctcaagattagacgggacaaaatgagggctggtaaacaaattggcaacgatgccgggatggagggtctggtcgatgagattaacaagttggacgtgaagagtgccgaagctgcagccgagtcaagtaacgacgactgggaagaggttgaggccgaggatcaggaagtggctatccgggttgaccagtatctcgtggtattcttaaagttcatggccagtgtcacacctggtatcgagcatgatttcactatgggtgtctagttcagctagcatgatcttgtttttatgtctaccagtagtctcgcgagaacatgtctacatggctttgtaacttcgccctacattagggaatttgggagcatcctcggggcgtttgggggttcttgttggattgtggcgcggttcagatacaggattgggtttggttcctcgcgaaagatgagatatgtgaaagatcaagcgtgcgagcaaatcaattcatcaacgtttaatacgatttcccgaatgttgtatttcgtgactcgatgtattcgtattttcactattcggagctgtatctattgacatcaagtaaggtcgcttccagtggaccattgtatctggg

SEQ ID NO: 33471 - DNA, 1764 bp, Muscodor strobelii
  misc_feature: SGI cDNA ID NO. 571547
  misc_feature: Encodes the peptide sequence at SEQ ID NO 33472
atgcattggatacagtcctggaatcaacgagtcgcaaagagcccagttggccggtatttcaggcttgatggctccggtcacccgaaggagcgaaaaggctcatcgttctgcactgagctacgcgctggtattgcgacgttcttcgctatggcttatattattgccgtaaacgcgaatatcctgagcgaaagtggaggaacctgtgtctgtaatgtcggcccagacgacccaacatgtatctcagacccagagtatgcgctatgcatcgcagccgtcaagcgcgatctcgtaacggcgacagccgcaatatccagtctttcgtcaatatgcatgggtctgttcgcaaatctccccatagccctcgcaccaggcctaggtctcaacgcctacttcacatacacagtcgttggctaccacggaacaggttccgtctcctattccgtagcagtgaccgctgtcttcgtcgagggacttatattctttgctctcgcgcttctcggtatgcgacaatggctagctcgtgctatcccgcgctccattaaactcgctactagtgtcggcattggtctcttcatgacactcattggcttcacgtatagtgagggtattggattggtgcaaggtggcgtgtctacgcctttggtcttggctggatgccctaaggatggatttgggagcgatggactgtgcactgatgctacaaagatgcggaatccggctatgtgggttggaattctggctggtggtgttctaacgatgatcctcatgttataccgagctaaaggagccataattgccggcattttgatcgttagcatagcatcctggccacgatcatcacccatcacgtacttcccggatacggcccttggtaacgacgcgttcgatttctttaagaaagttgtgaactttcacagcatttctaagaccctcgttgtccaagactggaacatctcgaagtacggagcccaattcggcatggctctcatcacattcctttatgtcgatatcctggactgtacgggaacactgtactccatggcacacctcgccggcgccgtagacccacaaacccaagacttcgaaggcagcacagtagcatacatggtcgatgctctcagcatatccgttggttccctcttcggtagctccccggttacggcattcatcgaaagcggcgccggcatatctgagggcgggcgaaccggcctgactgccatagccacaggactttgctttttcatatccatattcttcgcaccgatattcgcctcaataccgccatgggccacgggtcccgtccttgttcttgtcggctccatgatgatgccctctgcggtggacatcaactggcgatatatcggagatgcagtaccggcctttgtaacgattgtcgtcatgccgttcacatacagcattgcgtatgggatgatcgcgggaattgtgctctacattgtcatcaatacgcttgtttggcttctcgagatagtatcaagaggccgtgtcgtgcctccgaataaggatgagaaagacccatggacatggcgcagtcctgttggtgttctgcctttttgggtgaaattcttcataaggcagaacaagactcgtgctcgcgccgaatctcatggtgacaacataatattggtgaagtcaactaccgaaggatctacaagtggtggcgactcacccacgagtacaaacaagaccacccgtttagacacgatttatgaggaggattattggctcgaggaagtacacctctga

SEQ ID NO: 33472 - protein, 587 aa, Muscodor strobelii
  misc_feature: SGI Peptide ID NO. 571547
  misc_feature (37)..(479): Pfam Id: PF00860 Pfam Desc: Permease family
  misc_feature (367)..(479): Pfam Id: PF00860 Pfam Desc: Permease family
  misc_feature (1)..(563): NCBI GI: 39946464 Blast Desc: MGG_08279 [Magnaporthe grisea 70-15] gi|145020079|gb|EDK04307.1| MGG_08279 [Magnaporthe grisea 70-15]
  misc_feature (4)..(534): NCBI GI: 189191058 Blast Desc: purine transporter [Pyrenophora tritici-repentis Pt-1C-BFP] gi|187973474|gb|EDU40973.1| purine transporter [Pyrenophora tritici-repentis Pt-1C-BFP]
  misc_feature (1)..(564): NCBI GI: 169785773 Blast Desc: [Aspergillus oryzae RIB40] gi|83776095|dbj|BAE66214.1| protein product [Aspergillus oryzae]
  misc_feature (1)..(564): NCBI GI: 238506669 Blast Desc: nucleoside transporter, [Aspergillus flavus NRRL3357] gi|220689249|gb|EED45600.1| nucleoside transporter, [Aspergillus flavus NRRL3357]
  misc_feature (1)..(565): NCBI GI: 116193889 Blast Desc: CHGG_06662 [Chaetomium globosum CBS 148.51] gi|88182575|gb|EAQ90043.1| CHGG_06662 [Chaetomium globosum CBS 148.51]
  misc_feature (1)..(570): NCBI GI: 46140205 Blast Desc: FG11617.1 [Gibberella zeae PH-1]
  misc_feature (3)..(561): NCBI GI: 154317196 Blast Desc: BC1G_03500 [Botryotinia fuckeliana B05.10] gi|150844917|gb|EDN20110.1| BC1G_03500 [Botryotinia fuckeliana B05.10]
  misc_feature (2)..(548): NCBI GI: 67903094 Blast Desc: AN8534.2 [Aspergillus nidulans FGSC A4] gi|32440906|emb|CAE00849.1| purine transporter [Emericella nidulans] gi|40747664|gb|EAA66820.1| AN8534.2 [Aspergillus FGSC ;
  misc_feature (8)..(563): NCBI GI: 70997864 Blast Desc: nucleoside transporter [Aspergillus fumigatus Af293] gi|66851300|gb|EAL91626.1| nucleoside transporter, [Aspergillus fumigatus Af293] gi|159126603|gb|EDP51719.1| nucleoside fumigatus
  misc_feature (3)..(541): NCBI GI: 258564062 Blast Desc: UREG_07549 [Uncinocarpus reesii 1704] gi|237908283|gb|EEP82684.1| UREG_07549 [Uncinocarpus reesii 1704]
MHWIQSWNQRVAKSPVGRYFRLDGSGHPKERKGSSFCTELRAGIATFFAMAYIIAVNANILSESGGTCVCNVGPDDPTCISDPEYALCIAAVKRDLVTATAAISSLSSICMGLFANLPIALAPGLGLNAYFTYTVVGYHGTGSVSYSVAVTAVFVEGLIFFALALLGMRQWLARAIPRSIKLATSVGIGLFMTLIGFTYSEGIGLVQGGVSTPLVLAGCPKDGFGSDGLCTDATKMRNPAMWVGILAGGVLTMILMLYRAKGAIIAGILIVSIASWPRSSPITYFPDTALGNDAFDFFKKVVNFHSISKTLVVQDWNISKYGAQFGMALITFLYVDILDCTGTLYSMAHLAGAVDPQTQDFEGSTVAYMVDALSISVGSLFGSSPVTAFIESGAGISEGGRTGLTAIATGLCFFISIFFAPIFASIPPWATGPVLVLVGSMMMPSAVDINWRYIGDAVPAFVTIVVMPFTYSIAYGMIAGIVLYIVINTLVWLLEIVSRGRVVPPNKDEKDPWTWRSPVGVLPFWVKFFIRQNKTRARAESHGDNIILVKSTTEGSTSGGDSPTSTNKTTRLDTIYEEDYWLEEVHL

SEQ ID NO: 33473 - DNA, 957 bp, Muscodor strobelii
  misc_feature: SGI cDNA ID NO. 571548
  misc_feature: Encodes the peptide sequence at SEQ ID NO 33474
atcaacaagcccgaggctatcaacaaggccaaaagtgtcaagaagctccaaggcgccaacaagcccaagactgctggcgagcccaaaagtgtcaagaaacccaaaagcttgaagaagctcaagagtgtcaacaagctcaagaatgtcagcaagctcgagaatgtcgataagcccaagagtgtcaaaaagcccaagactgctggtaagcccaaggctgtcaacaaggccaagggtgtcgatgagcccaagagtgtcgctcagccacgcagaagtgccagaatcgcccagctctatggtgttactgagcctgagagcaatgctaagagtaatgtcaagcccgtggagcctgtcaagagagttcgcaggaccaatatcgagccgcgcagaatcgaccccctgtattctgacaggcctgatgtgctccccacgaatgacattcgtgacttcaagtggctgcttgaggccgggcacatcccagcttgcttcaagaacgctacctatcagaccaaacgcattatcttgagacaatgcaggatgtcaaggaagagtgttcgtcttctcagaaagcgtcgggcacaagacgtgcgacgaaccgtacgacgttccatgagacaattcatgcgagccacccctaagcgagctgtccctaccatgcgcctcctccgcccggtccgtcaggtcgctcgaggacctgagatcgatgccatgctaccgcctgtcgtccgtcatgaagcccctgtccagggctggactgccacttctgctcatgcagtcgtccaagcccaccagaggcccgttgcttaccagaacgcaatggccagtagtcttcacccggttcaggtcgcagcttggagacaagagcgccccctgccgatgttctttgaggatcaatacgccatgattgagcagacaaactggtgggacaccatgtttggagacaacggagatggagagtga

SEQ ID NO: 33474 - protein, 318 aa, Muscodor strobelii
  misc_feature: SGI Peptide ID NO. 571548
  misc_feature (1)..(120): NCBI GI: 170068356 Blast Desc: conserved [Culex quinquefasciatus] gi|167864402|gb|EDS27785.1| conserved [Culex quinquefasciatus]
  misc_feature (1)..(87): NCBI GI: 220925481 Blast Desc: Mnod_5640 [Methylobacterium nodulans ORS 2060] gi|219950088|gb|ACL60480.1| Mnod_5640 [Methylobacterium nodulans ORS 2060]
INKPEAINKAKSVKKLQGANKPKTAGEPKSVKKPKSLKKLKSVNKLKNVSKLENVDKPKSVKKPKTAGKPKAVNKAKGVDEPKSVAQPRRSARIAQLYGVTEPESNAKSNVKPVEPVKRVRRTNIEPRRIDPLYSDRPDVLPTNDIRDFKWLLEAGHIPACFKNATYQTKRIILRQCRMSRKSVRLLRKRRAQDVRRTVRRSMRQFMRATPKRAVPTMRLLRPVRQVARGPEIDAMLPPVVRHEAPVQGWTATSAHAVVQAHQRPVAYQNAMASSLHPVQVAAWRQERPLPMFFEDQYAMIEQTNWWDTMFGDNGDGE

SEQ ID NO: 33475 - DNA, 1167 bp, Muscodor strobelii
  misc_feature: SGI cDNA ID NO. 571549
  misc_feature: Elevated expression when VOC is produced
  misc_feature: Encodes the peptide sequence at SEQ ID NO 33476
atgtctactgatttaaggtttacatcccaaggtaccttgccgcaattacaacaggcggtggtgcaggatgcagcggggcaacccatcctcattaatcattcgcctctcccggatctatatccggggactgttctagtacggacgcgggcgcttgcactgaatccatgcgactacaagatgggcaagttccatccttgccctggctcaatcattggcaacgacttcgcggggatagttgttcgggttgggccgccgagcgcgccaggttcaaacgtatcgctgtctgttggcgattccgtttttgggaccgtgcatggctcaaacccaacagacaagctcaccggagcattcgccgagtacgttagggcagaatcggatttgttattacgcataccctcgggccttgatttcatcgacgtggtaactcttgggcttagccttactacgagtttttgcgccctatctaaaggtggtctggacctggacttgactggaattggcgaggaattgaatggttatgtgaagagcgaccgggtagctgagtcgaaggggcagaagaccccagtactcgtctacggcgcaagcacagcgacgggggctactgccacacagctattgcgacttgcaggatttacaccgctggccacatgctccccacataacttcgacatggcaagggcatgcggcgctactgcagtctttgactactccgcaactggagcggcgctcgaagtcaacaaaatgacagggggccaactgtattatgcactcgactgtatcgtggattcactatcgattgccttttgtaatgcagccattgctcgcgttggtggtcgctgtgcatacctagagctttggccttcagggacgcagcgcccgcgtcgtgccgtaaaggaatgctttatcatggcacttgaggttttcggcaaagaagtctcgctgccgggcgattattatcgtcctgcgaatgcagagaagaaagcgtcggtgactcaatttcttaccatatgccaaaagttgttggacaatggaaggctaaacccgcatccgacgagagtcattccggggggtttttctgggattattgatgggctccgtttgttggaatccggttgtatatcaggaaccaagcttgtagtctcgattccgattcctgacgtagtttga

SEQ ID NO: 33476 - protein, 388 aa, Muscodor strobelii
  misc_feature: SGI Peptide ID NO. 571549
  misc_feature (41)..(131): Pfam Id: PF08240 Pfam Desc: Alcohol dehydrogenase GroES-like domain
  misc_feature (185)..(260): Pfam Id: PF00107 Pfam Desc: Zinc-binding dehydrogenase
  misc_feature (1)..(382): NCBI GI: 156056785 Blast Desc: SS1G_04123 [Sclerotinia sclerotiorum 1980] gi|154701909|gb|EDO01648.1| SS1G_04123 [Sclerotinia sclerotiorum 1980]
  misc_feature (13)..(382): NCBI GI: 145239689 Blast Desc: An08g03740 [Aspergillus niger] gi|134077002|emb|CAK45411.1| protein product [Aspergillus niger]
  misc_feature (13)..(383): NCBI GI: 238840353 Blast Desc: conserved [Microsporum canis CBS 113480]
  misc_feature (13)..(382): NCBI GI: 121704567 Blast Desc: zinc-binding dehydrogenase family oxidoreductase, [Aspergillus clavatus NRRL 1] gi|119398692|gb|EAW09121.1| zinc-binding dehydrogenase family oxidoreductase, [Aspergillus 1]
  misc_feature (13)..(382): NCBI GI: 39946264 Blast Desc: MGG_08380 [Magnaporthe grisea 70-15] gi|145019961|gb|EDK04189.1| MGG_08380 [Magnaporthe grisea 70-15]
  misc_feature (18)..(382): NCBI GI: 169635734 Blast Desc: oxidoreductase [Botryotinia fuckeliana]
  misc_feature (13)..(379): NCBI GI: 240109585 Blast Desc: CPC735_030900 [Coccidioides posadasii C735 delta SOWgp]
  misc_feature (13)..(379): NCBI GI: 119183378 Blast Desc: CIMG_06631 [Coccidioides immitis RS]
  misc_feature (17)..(382): NCBI GI: 169766250 Blast Desc: [Aspergillus oryzae RIB40] gi|238482955|ref|XP_002372716.1| zinc-binding oxidoreductase ToxD, [Aspergillus flavus NRRL3357] gi|83765451|dbj|BAE55594.1|
  misc_feature (7)..(382): NCBI GI: 255938468 Blast Desc: Pc14g00090 [Penicillium chrysogenum Wisconsin 54-1255] gi|211584625|emb|CAP74150.1| Pc14g00090 [Penicillium chrysogenum Wisconsin 54-1255]
  misc_feature: Useful for introducing or modulating the production of volatile compounds
MSTDLRFTSQGTLPQLQQAVVQDAAGQPILINHSPLPDLYPGTVLVRTRALALNPCDYKMGKFHPCPGSIIGNDFAGIVVRVGPPSAPGSNVSLSVGDSVFGTVHGSNPTDKLTGAFAEYVRAESDLLLRIPSGLDFIDVVTLGLSLTTSFCALSKGGLDLDLTGIGEELNGYVKSDRVAESKGQKTPVLVYGASTATGATATQLLRLAGFTPLATCSPHNFDMARACGATAVFDYSATGAALEVNKMTGGQLYYALDCIVDSLSIAFCNAAIARVGGRCAYLELWPSGTQRPRRAVKECFIMALEVFGKEVSLPGDYYRPANAEKKASVTQFLTICQKLLDNGRLNPHPTRVIPGGFSGIIDGLRLLESGCISGTKLVVSIPIPDVV

SEQ ID NO: 33477 - DNA, 1559 bp, Muscodor strobelii
  misc_feature: SGI EST ID NO. CUFF.79102.0
  misc_feature: Variant of the nucleotide sequence at SEQ ID NO 33475
catacataaggtcctacgtaggtatctcaaggaagaatgcattaagtggcactggagagtagggacagtacatgtatcagtttacctgtagcttgtttgttttaacagtttttcaatacgaacctggtgtcattcgcgcattatttattctgacagcatctctgcctaacatatgttagtcaaccaacccgcattccatattatcttcttcttccagcgttccgccttctcacaaacggtgtctcgtcccaacagctatgtctactgatttaaggtttacatcccaaggtaccttgccgcaattacaacaggcggtggtgcaggatgcagcggggcaacccatcctcattaatcattcgcctctcccggatctatatccggggactgttctagtacggacgcgggcgcttgcactgaatccatgcgactacaagatgggcaagttccatccttgccctggctcaatcattggcaacgacttcgcggggatagttgttcgggttgggccgccgagcgcgccaggttcaaacgtatcgctgtctgttggcgattccgtttttgggaccgtgcatggctcaaacccaacagacaagctcaccggagcattcgccgagtacgttagggcagaatcggatttgttattacgcataccctcgggccttgatttcatcgacgtggtaactcttgggcttagccttactacgagtttttgcgccctatctaaaggtggtctggacctggacttgactggaattggcgaggaattgaatggttatgtgaagagcgaccgggtagctgagtcgaaggggcagaagaccccagtactcgtctacggcgcaagcacagcgacgggggctactgccacacagctattgcgacttgcaggatttacaccgctggccacatgctccccacataacttcgacatggcaagggcatgcggcgctactgcagtctttgactactccgcaactggagcggcgctcgaagtcaacaaaatgacagggggccaactgtattatgcactcgactgtatcgtggattcactatcgattgccttttgtaatgcagccattgctcgcgttggtggtcgctgtgcatacctagagctttggccttcagggacgcagcgcccgcgtcgtgccgtaaaggaatgctttatcatggcacttgaggttttcggcaaagaagtctcgctgccgggcgattattatcgtcctgcgaatgcagagaagaaagcgtcggtgactcaatttcttaccatatgccaaaagttgttggacaatggaaggctaaacccgcatccgacgagagtcattccggggggtttttctgggattattgatgggctccgtttgttggaatccggttgtatatcaggaaccaagcttgtagtctcgattccgattcctgacgtagtttgacgctatggaagcaagatgttgtcccagttgactgacttattagtttttaccggccagcgaaccccttctattcgctattgaattaaacatgagacacgctcgctaacctgacatatacgaaatgcgacgtaaatg

SEQ ID NO: 33478 - DNA, 1689 bp, Muscodor strobelii
  misc_feature: SGI cDNA ID NO. 571550
  misc_feature: Elevated expression when VOC is produced
  misc_feature: Encodes the peptide sequence at SEQ ID NO 33479
atggccgagggagaggtccaagaattcttgcgcggtctccgcttctggttcataattgccgggctgtcgattacttcattgctcgctgccttggaacacacagtagtgacgacatctgccccaaagatattgactgagctacatctcgggccggatttcatttggatcacaaacgcattttttatctctagtgcgatttcgcagcctctttacggccagctgtgtaacatttttggtcgtcgatgggtctatctcaccatcgttgccctcttcacgttaggaagtggaatttgtggaggtgctcggagcggaaggatgctgattgctggccgcactgttcaaggacttggatcggggggcattattctgatgaacaatatcatcgtatcagacttggtgccactgcgccagcgcggctattacgttgctatcctactttcagtcttcggtgtgggaatagccttgggtccatttattggtggcgcgatcattgattccaccacctggcgctgggtcttctacattaatcttcccattggtggattatcaatagctgtcatgtttctgtttcttcacgtgaaatatgacaaagagacatcctttctggaaaaagccaaaaggatcgactatcttggcaatgtcatattagtaggaagtagcgttgctattctatacgctctcacctatgcagggacagtcgaatcgtggcattcgtcgcgaacgctcgttcctctgatacttggattattcggattccttctgttcacaggcttcgaagcgagcggaatcccggctgaaccagttacccccatcagacttttcgcacatcgtacatccataatcgtcctcattaacacctttttgaactctatcttatatttctggtttttgttctttctcccggtatattatcagtcggttgcactatactcgccgtccagaactggttattctctacttccgcaggccgttgccggaatccctggtgctgcaatagctgctattgctattagtaaatggggtaaattcgtgcctgtgcattttttcgggttcgcaatacaaactttgggattcggtctactatctctactctctgagtcgacttcaatagccgaatgggctgttttccaaattatcgcagcgctaggaatcggtatcatcatcgacactcttcttccggcttttcaagcaccggtagaggagaaagatcaagctgcagccacttcagcatggagtttcgtgcgctccttcgggagcatttggggtgtcgccatccccacggctatcttcaacaatcgcattgaccagcttttgattaacgtctcggatcctcgggcacgtgacctgatcgcaggaggcagcgggtaccaagatgcctcggccgcatttgtgaagcaatttgcaccgcaaattcaagcagaaatacgcgaagtttatagagaagcactgaaacttgttttccttgtgggtctagcattctcagggttggctacattgctaacactcttggaacgagaagtcgcgctaagagagcaattagagagcaattatggccttgaggaaagggacaagacgaacagcaaagtacagccggaggccgtatttgcgaagcaaggcgatgataccgaagacggatggggaaatataaatatcgatgggaagtcgtcctcggcaaagagcgagatgtga

SEQ ID NO: 33479 - protein, 562 aa, Muscodor strobelii
  misc_feature: SGI Peptide ID NO. 571550
  misc_feature (22)..(423): Pfam Id: PF07690 Pfam Desc: Major Facilitator Superfamily
  misc_feature (11)..(524): NCBI GI: 238837530 Blast Desc: multidrug resistance protein fnx1 [Microsporum canis CBS 113480]
  misc_feature (9)..(528): NCBI GI: 256730552 Blast Desc: NECHADRAFT_74179 [Nectria haematococca mpVI 77-13-4]
  misc_feature (11)..(544): NCBI GI: 238840350 Blast Desc: multidrug resistance protein fnx1 [Microsporum canis CBS 113480]
  misc_feature (5)..(526): NCBI GI: 46109404 Blast Desc: FG01584.1 [Gibberella zeae PH-1]
  misc_feature (2)..(519): NCBI GI: 171679193 Blast Desc: protein product [Podospora anserina] gi|170937668|emb|CAP62326.1| protein product [Podospora anserina]
  misc_feature (6)..(513): NCBI GI: 242823409 Blast Desc: efflux pump antibiotic resistance protein, [Talaromyces stipitatus ATCC 10500] gi|218712987|gb|EED12412.1| efflux pump antibiotic resistance protein, [Talaromyces ATCC
  misc_feature (11)..(524): NCBI GI: 255941836 Blast Desc: Pc16g13890 [Penicillium chrysogenum Wisconsin 54-1255] gi|211586310|emb|CAP94059.1| Pc16g13890 [Penicillium chrysogenum Wisconsin 54-1255]
  misc_feature (9)..(523): NCBI GI: 154322713 Blast Desc: BC1G_00699 [Botryotinia fuckeliana B05.10] gi|150848033|gb|EDN23226.1| BC1G_00699 [Botryotinia fuckeliana B05.10]
  misc_feature (11)..(532): NCBI GI: 212538541 Blast Desc: conserved [Penicillium marneffei ATCC 18224] gi|210069168|gb|EEA23259.1| conserved [Penicillium marneffei ATCC 18224]
  misc_feature (2)..(556): NCBI GI: 240109581 Blast Desc: Major Facilitator Superfamily protein [Coccidioides posadasii C735 delta SOWgp]
  misc_feature: Useful for introducing or modulating the production of volatile compounds
MAEGEVQEFLRGLRFWFIIAGLSITSLLAALEHTVVTTSAPKILTELHLGPDFIWITNAFFISSAISQPLYGQLCNIFGRRWVYLTIVALFTLGSGICGGARSGRMLIAGRTVQGLGSGGIILMNNIIVSDLVPLRQRGYYVAILLSVFGVGIALGPFIGGAIIDSTTWRWVFYINLPIGGLSIAVMFLFLHVKYDKETSFLEKAKRIDYLGNVILVGSSVAILYALTYAGTVESWHSSRTLVPLILGLFGFLLFTGFEASGIPAEPVTPIRLFAHRTSIIVLINTFLNSILYFWFLFFLPVYYQSVALYSPSRTGYSLLPQAVAGIPGAAIAAIAISKWGKFVPVHFFGFAIQTLGFGLLSLLSESTSIAEWAVFQIIAALGIGIIIDTLLPAFQAPVEEKDQAAATSAWSFVRSFGSIWGVAIPTAIFNNRIDQLLINVSDPRARDLIAGGSGYQDASAAFVKQFAPQIQAEIREVYREALKLVFLVGLAFSGLATLLTLLEREVALREQLESNYGLEERDKTNSKVQPEAVFAKQGDDTEDGWGNINIDGKSSSAKSEM

SEQ ID NO: 33480 - DNA, 2330 bp, Muscodor strobelii
  misc_feature: SGI EST ID NO. CUFF.79288.0
  misc_feature: Variant of the nucleotide sequence at SEQ ID NO 33478
cagcactcattagatgcaatggtacctaaaaggggcgtgatggagaaagcttcaagtccggcttttctttcatagtcagcttctcctgtttcagccgctggtactcagcagtaggtaccaatgtaatcaagacttgttttcacagtgaattacgataccggactacttgttcaccgagtcttaatttcaaatgatcagctaaagtatatgaggcagcccaaggtcaatccaaagcctatcctaagacagcgcatgcttagctagatttcagtacttctcattcactatcctgacataatggccgagggagaggtccaagaattcttgcgcggtctccgcttctggttcataattgccgggctgtcgattacttcattgctcgctgccttggaacacacagtagtgacgacatctgccccaaagatattgactgagctacatctcgggccggatttcatttggatcacaaacgcattttttatctctagtgcgatttcgcagcctctttacggccagctgtgtaacatttttggtcgtcgatgggtctatctcaccatcgttgccctcttcacgttaggaagtggaatttgtggaggtgctcggagcggaaggatgctgattgctggccgcactgttcaaggacttggatcggggggcattattctgatgaacagtaagtccctcagccctagacctagtcttgcggctctggccgatccctgatttcacaatagatatcatcgtatcagacttggtgccactgcgccagcgcggctattacgttgctatcctactttcagtcttcggtgtgggaatagccttgggtccatttattggtggcgcgatcattgattccaccacctggcgctgggtcttctacattaatcttcccattggtggattatcaatagctgtcatgtttctgtttcttcacgtgaaatatgacaaagagacatcctttctggaaaaagccaaaaggatcgactatcttggcaatgtcatattagtaggaagtagcgttgctattctatacgctctcacctatgcagggacagtcgaatcgtggcattcgtcgcgaacgctcgttcctctgatacttggattattcggattccttctgttcacaggcttcgaagcgagcggaatcccggctgaaccagttacccccatcagacttttcgcacatcgtacatccataatcgtcctcattaacacctttttgaactctatcttatatttctggtttttgttctttctcccggtatattatcagtcggttgcactatactcgccgtccagaactggttattctctacttccgcaggccgttgccggaatccctggtgctgcaatagctgctattgctattagtaaatggggtaaattcgtgcctgtgcattttttcgggttcgcaatacaaactttgggattcggtctactatctctactctctgagtcgacttcaatagccgaatgggctgttttccaaattatcgcagcgctaggaatcggtatcatcatcgacactcttcttccggcttttcaagcaccggtagaggagaaagatcaagctgcagccacttcagcatggagtttcgtgcgctccttcgggagcatttggggtgtcgccatccccacggctatcttcaacaatcgcattgaccagcttttgattaacgtctcggatcctcgggcacgtgacctgatcgcaggaggcagcgggtaccaagatgcctcggccgcatttgtgaagcaatttgcaccgcaaattcaagcagaaatacgcgaagtttatagagaagcactgaaacttgttttccttgtgggtctagcattctcagggttggctacattgctaacactcttggaacgagaagtcgcgctaagagagcaattagagagcaattatggccttgaggaaagggacaagacgaacagcaaagtacagccggaggccgtatttgcgaagcaaggcgatgataccgaagacggatggggaaatataaatatcgatgggaagtcgtcctcggcaaagagcgagatgtgatatgctggcattagattatcgtaaagctacgtcaattccagcctgcagaagggacttagtccataactctcatccgtgcctgttcgtagtttctgaggtactgactagttcattaagacatagcgaacttgcacataatgtttacaagcacacttcgttagatattcaatatcgatacacacactccttgtcgtggttctgtccgggaacaagatcactaagggtttcctttcgggtgacatcacttagaatactagctatattaccgacctaatgtgagcaa

SEQ ID NO: 33481 - DNA, 1539 bp, Muscodor strobelii
  misc_feature: SGI cDNA ID NO. 571551
  misc_feature: Elevated expression when VOC is produced
  misc_feature: Encodes the peptide sequence at SEQ ID NO 33482
atgcaagacctttcttggatagcaagattgccatccatggcatggcctggaatgccctggtgggccacatccttattcactctgacatgcgcgtatatgttaacacaatgtgcttatcgaatgtacttccacccagcagcgagatttccgggtccaaagcttgcggctatctctaatataccctatgcttatcactggctgagcggaagatggccatgggccatagaggatatgataaaaaaatatggcaacgttgtgcggattgctccaaacgagcttgttttcgcaacaccacaagccgcagaagatatttattctccctctgtaaagcatcatgagacttggctgaagacagatataatggacttcggatcaggcgacggcggatttatctgggagcaagaccccatcaagcgtagagacgtagcaaagaagatcctccctgcttttagctctaaagcgatcagggcgaaagagcccaccgttcaccaacacatagatctcttcgtcgacaaaatgaaaatgataggtgatgaccaggagggcgttgacttgaacacgtggctattttggcttgcaatggacatgtcggcggatctggcttacggccgcgagttacatcaaatgagagatgaaaaaagctccgattttatggaaactctgttgggaacaaatctcttcggcacagttatgcaagtctcaaagaagatcccacttctcagacctcttgcatacttcttcatcccttgggccgtgattaaaaaagtgtctaggaccttccaaatcaacagcgatgaggttcagcgaagaattgacaatcacggaaagatgaagcatcccgatttccttgagtatatgcttcctgctgactcgactgggcctatttccaaaaagctcaagattcatatcgagcaagttgcactgcaaatgttcattgcgggctttgacccgatccagctggtattctattccagtctgttctttttactgaaagaacccgaagccttcaaaacactagtgcatgagatacgctccacctttaccagctacgaccatattacgacagacgccctatcatctcttccttatctaaatgcttgtatacacgagacactgcgtgtacatgtgacaaatgccacaggcatgccacgaagaagcccgggcgcaacagtagatgggatatacattccgaaaggcgttgtctgtcagaccagtttgttttatattgctcgaagtcctcgcaacttccacgaccctctgtccttttgcccagcccgatggcttccgtccgagcacccccaatatgacactaggttttctgaagataaattaaagagctattttccatttggaattggcccaagagcctgcacggggcgtgagattgcgtggagtcagtgcaggctatttctggcgaaggtcttatggactttcaacctaagtctaatcatcgggaatgaagcaacatttgataaagactacagcacacacatcatgtggtacaagccgaaactgagagttagattcatgcagaaatga

SEQ ID NO: 33482 - protein, 512 aa, Muscodor strobelii
  misc_feature: SGI Peptide ID NO. 571551
  misc_feature (60)..(509): Pfam Id: PF00067 Pfam Desc: Cytochrome P450
  misc_feature (140)..(483): Pfam Id: PF00067 Pfam Desc: Cytochrome P450
  misc_feature (108)..(504): NCBI GI: 145606883 Blast Desc: MGG_03819 [Magnaporthe grisea 70-15] gi|145014505|gb|EDJ99073.1| MGG_03819 [Magnaporthe grisea 70-15]
  misc_feature (68)..(509): NCBI GI: 156054726 Blast Desc: SS1G_06211 [Sclerotinia sclerotiorum 1980] gi|154703991|gb|EDO03730.1| SS1G_06211 [Sclerotinia sclerotiorum 1980]
  misc_feature (32)..(507): NCBI GI: 119500518 Blast Desc: toxin biosynthesis cytochrome P450 monooxygenase, [Neosartorya fischeri NRRL 181] gi|119415181|gb|EAW25119.1| toxin biosynthesis cytochrome P450 monooxygenase, [Neosartorya fischeri
  misc_feature (7)..(509): NCBI GI: 154289577 Blast Desc: BC1G_16084 [Botryotinia fuckeliana B05.10] gi|150849019|gb|EDN24212.1| BC1G_16084 [Botryotinia fuckeliana B05.10] gi|169635728|emb|CAP58782.1| cytochrome P40 monooxygenase
  misc_feature (29)..(511): NCBI GI: 259485752 Blast Desc: TPA: cytochrome P450, (Eurofung) [Aspergillus nidulans FGSC A4]
  misc_feature (68)..(509): NCBI GI: 154296440 Blast Desc: BC1G_13046 [Botryotinia fuckeliana B05.10] gi|150843407|gb|EDN18600.1| BC1G_13046 [Botryotinia fuckeliana B05.10]
  misc_feature (44)..(512): NCBI GI: 259485758 Blast Desc: TPA: cytochrome P450, (Eurofung) [Aspergillus nidulans FGSC A4]
  misc_feature (44)..(505): NCBI GI: 121712467 Blast Desc: benzoate 4-monooxygenase cytochrome P450 [Aspergillus clavatus NRRL 1] gi|119401997|gb|EAW12419.1| benzoate 4-monooxygenase cytochrome P450 [Aspergillus clavatus NRRL 1]
  misc_feature (29)..(507): NCBI GI: 121716300 Blast Desc: benzoate 4-monooxygenase cytochrome P450 [Aspergillus clavatus NRRL 1] gi|119403916|gb|EAW14333.1| benzoate 4-monooxygenase cytochrome P450 [Aspergillus clavatus NRRL 1]
  misc_feature (25)..(509): NCBI GI: 119481647 Blast Desc: benzoate 4-monooxygenase cytochrome P450 [Neosartorya fischeri NRRL 181] gi|119409006|gb|EAW18955.1| benzoate 4-monooxygenase cytochrome P450 [Neosartorya fischeri NRRL 181]
  misc_feature (49)..(482): SWISSPROT Homolog: EC 1.14.13.12 Benzoate 4-monooxygenase
  misc_feature: Useful for introducing or modulating the production of volatile compounds
MQDLSWIARLPSMAWPGMPWWATSLFTLTCAYMLTQCAYRMYFHPAARFPGPKLAAISNIPYAYHWLSGRWPWAIEDMIKKYGNVVRIAPNELVFATPQAAEDIYSPSVKHHETWLKTDIMDFGSGDGGFIWEQDPIKRRDVAKKILPAFSSKAIRAKEPTVHQHIDLFVDKMKMIGDDQEGVDLNTWLFWLAMDMSADLAYGRELHQMRDEKSSDFMETLLGTNLFGTVMQVSKKIPLLRPLAYFFIPWAVIKKVSRTFQINSDEVQRRIDNHGKMKHPDFLEYMLPADSTGPISKKLKIHIEQVALQMFIAGFDPIQLVFYSSLFFLLKEPEAFKTLVHEIRSTFTSYDHITTDALSSLPYLNACIHETLRVHVTNATGMPRRSPGATVDGIYIPKGVVCQTSLFYIARSPRNFHDPLSFCPARWLPSEHPQYDTRFSEDKLKSYFPFGIGPRACTGREIAWSQCRLFLAKVLWTFNLSLIIGNEATFDKDYSTHIMWYKPKLRVRFMQK

SEQ ID NO: 33483 - DNA, 2079 bp, Muscodor strobelii
  misc_feature: SGI EST ID NO. CUFF.79780.7
  misc_feature: Variant of the nucleotide sequence at SEQ ID NO 33481
gtatcgaattctcccttctcccagctactttttcctatttgccaccacatctcttccccagacagtctatccagcatcagtgccatgcaagacctttcttggatagcaagattgccatccatggcatggcctggaatgccctggtgggccacatccttattcactctgacatgcgcgtatatgttaacacaatgtgcttatcgaatgtacttccacccagcagcgagatttccgggtccaaagcttgcggctatctctaatataccctatgcttatcactggctgagcggaagatggccatgggccatagaggatatgataaaaaaatatggcaacgttgtgcggattgctccaaacgagcttgttttcgcaacaccacaagccgcagaagatatttattctccctctgtaaagcatcatgagacttggctgaagacagatataatggacttcggatcaggcgacggcggatttatctgggagcaagaccccatcaagcgtagagacgtagcaaagaagatcctccctgcttttagctctaaagcgatcagggcgaaagagcccaccgttcaccaacacatagatctcttcgtcgacaaaatgaaaatgataggtgatgaccaggagggcgttgacttgaacacgtggctattttggcttgcaatggacatgtcggcggatctggcttacggccgcgagttacatcaaatgagagatgaaaaaagctccgattttatggaaactctgttgggaacaaatctcttcggcacagttatgcaagtctcaaagaagatcccacttctcagacctcttgcatacttcttcatcccttgggccgtgattaaaaaagtgtctaggaccttccaaatcaacagcgatgaggttcagcgaagaattgacaatcacggaaagatgaagcatcccgatttccttgagtatatgcttcctgctgactcgactgggcctatttccaaaaagctcaagattcatatcgagcaagttgcactgcaaatgttcattgcgggctttgacccgatccagctggtattctattccagtctgttctttttactgaaagaacccgaagccttcaaaacactagtgcatgagatacgctccacctttaccagctacgaccatattacgacagacgccctatcatctcttccttatctaaatgcttgtatacacgagacactgcgtgtacatgtgacaaatgccacaggcatgccacgaagaagcccgggcgcaacagtagatgggatatacattccgaaaggcgttgtctgtcagaccagtttgttttatattgctcgaagtcctcgcaacttccacgaccctctgtccttttgcccagcccgatggcttccgtccgagcacccccaatatgacactaggttttctgaagataaattaaagagctattttccatttggaattggcccaagagcctgcacggggcgtgagattgcgtggagtcagtgcaggctatttctggcgaaggtcttatggactttcaacctaagtctaatcatcgggaatgaagcaacatttgataaagactacagcacacacatcatgtggtacaagccgaaactgagagttagattcatgcagaaatgactgtatgactaagtatttactatcaagcctgatgatattaaatcgttcagaaggagggtctattattacgcgcagctataatctgagatgccgagcgtaaattagttcgctccgctccttgatagcgaggacatgtccattagctccaatcgtgactacaagatagcttcattgatgattacctctaggagtgacatcaacgccattttacaccttgtgtgtcctattaatgattccatcagttctgatcatgcgatctaattgccattgtacgcatatagttcccccagacggttgagtgctcaacatgacacacattctacttttgtttttgtatctactggcgtatctgtacaacaataaagatacacttacttcaacggttcctgctgcaaaccgtggatggtatgtcattggaaggaggacactgtcctttactagcattttggctcgaga

SEQ ID NO: 33484 - DNA, 945 bp, Muscodor strobelii
  misc_feature: SGI cDNA ID NO. 571552
  misc_feature: Elevated expression when VOC is produced
  misc_feature: Encodes the peptide sequence at SEQ ID NO 33485
atgaccaccgtctataccgcaattctcatcatatgcgtcgtcactataccactttgctcgctggtgacagctttccggtttggagcattgtggcgatctggtaggaaagccggcgaggaagattggttttcattaggtgcattgattgttcacttgacgtactgcgcactctctcttgaaacattgagtattctccattatcggccaattgcgctgcttccgttgggtgagatcctccgcgttagcaagatctcctatggcacttcgcctctcttcgtcgtcaatcaatttttcgccaagtttagcatactatttctttaccgccgtctcttcgccaccgttgcgggagccgagtcgataaattcggctatcgacttcgggttggtgctgatagcctggtttatggttcggcctcttgaaatgacggcatcaatcaaatggaagttggccgccatatttgctctcggagcgttcgctggaataattgggttcatcaagattgctgaagcatacaaaaataaccaagacggcaattttctaattggtgcctggaccattgggcaaatggcagccagtattatttgttgctgcgcccctgtgctaaaaccaatcattcccactcacggattctttatacgtcttgcgtcgcgcattacgaaatattccagtcgtagccgcgactcggaaactggaattgcgtctagtcggtcaagccagcagcccggctcgcgtacttctgacgatcgcaaaatatgggatactcaacggacacttactggctggcatcaacttaatgtgtcaggccaagagccagctacatggtcgcaaattgatgcaagccagggcagtggagacgcaatggagccggggtttcaattgaaaacaatacaattacagcagaacatcgacagtacacagagcaggagcggagaagcatttgcatga

SEQ ID NO: 33485 - protein, 314 aa, Muscodor strobelii
  misc_feature: SGI Peptide ID NO. 571552
  misc_feature (9)..(211): NCBI GI: 242821836 Blast Desc: conserved [Talaromyces stipitatus ATCC 10500] gi|218712683|gb|EED12108.1| conserved [Talaromyces stipitatus ATCC 10500]
  misc_feature (9)..(278): NCBI GI: 145228731 Blast Desc: An01g02360 [Aspergillus niger] gi|134054766|emb|CAK43606.1| protein product [Aspergillus niger]
  misc_feature (7)..(308): NCBI GI: 119479083 Blast Desc: NFIA_076030 [Neosartorya fischeri NRRL 181] gi|119407724|gb|EAW17673.1| conserved [Neosartorya fischeri NRRL 181]
  misc_feature (120)..(257): NCBI GI: 189191268 Blast Desc: conserved [Pyrenophora tritici-repentis Pt-1C-BFP] gi|187973579|gb|EDU41078.1| conserved [Pyrenophora tritici-repentis Pt-1C-BFP]
  misc_feature (119)..(308): NCBI GI: 146324159 Blast Desc: PTH11-like integral membrane protein [Aspergillus fumigatus Af293] gi|129558039|gb|EBA27437.1| PTH11-like integral membrane protein [Aspergillus fumigatus Af293]
  misc_feature (119)..(308): NCBI GI: 159126744 Blast Desc: PTH11-like integral membrane protein [Aspergillus fumigatus A1163]
  misc_feature (122)..(307): NCBI GI: 119470605 Blast Desc: NFIA_055050 [Neosartorya fischeri NRRL 181] gi|119406205|gb|EAW16156.1| conserved [Neosartorya fischeri NRRL 181]
  misc_feature (86)..(303): NCBI GI: 189195358 Blast Desc: [Pyrenophora tritici-repentis Pt-1C-BFP] gi|187979896|gb|EDU46522.1| [Pyrenophora tritici-repentis Pt-1C-BFP]
  misc_feature (95)..(256): NCBI GI: 261356266 Blast Desc: conserved [Verticillium albo-atrum VaMs.102]
  misc_feature (94)..(238): NCBI GI: 145608048 Blast Desc: MGG_13656 [Magnaporthe grisea 70-15] gi|145015516|gb|EDK00053.1| MGG_13656 [Magnaporthe grisea 70-15]
  misc_feature: Useful for introducing or modulating the production of volatile compounds
MTTVYTAILIICVVTIPLCSLVTAFRFGALWRSGRKAGEEDWFSLGALIVHLTYCALSLETLSILHYRPIALLPLGEILRVSKISYGTSPLFVVNQFFAKFSILFLYRRLFATVAGAESINSAIDFGLVLIAWFMVRPLEMTASIKWKLAAIFALGAFAGIIGFIKIAEAYKNNQDGNFLIGAWTIGQMAASIICCCAPVLKPIIPTHGFFIRLASRITKYSSRSRDSETGIASSRSSQQPGSRTSDDRKIWDTQRTLTGWHQLNVSGQEPATWSQIDASQGSGDAMEPGFQLKTIQLQQNIDSTQSRSGEAFA

SEQ ID NO: 33486 - DNA, 1752 bp, Muscodor strobelii
  misc_feature: SGI EST ID NO. CUFF.79373.1
  misc_feature: Variant of the nucleotide sequence at SEQ ID NO 33484
cggaagaagtagaggctgatgaaaaaaaaggtactgtcttcatcggagcaatccgttttgatcttttggctgctgtgccagacatcgccgctcggggtatgcggcagacatacccgcactttctatcgtactccgcaacagattacaagatgccaacttttgtgaactacaaatatttacactctgtgtagctcgtaattcaagttttagattcttattatgccatgctctggcctcattattatattccggcatattaaactcaaccccgaaaatcgtgtaaacttcccaccgatcagcaccatgaccaccgtctataccgcaattctcatcatatgcgtcgtcactataccactttgctcgctggtgacagctttccggtttggagcattgtggcgatctggtaggaaagccggcgaggaagattggttttcattaggtgcattgattgttcacttgacgtactgcgcactctctcttgaaacattgagtattctccattatcggccaattgcgctgcttccgttgggtgagatcctccgcgttagcaaggtatgcgacggagccggtaaagatgcataccattgcactataatgatttgtgattagatctcctatggcacttcgcctctcttcgtcgtcaatcaatttttcgccaagtttagcatactatttctttaccgccgtctcttcggtatcgacaaattatatagacgatggatatacctattcgcttttgtccatctaggatggtgcattgcaaccttatcgctgtatctgttcagttgtcgccccattagtaagtcctggaacaagcttgaaccagggacatgcctcgactatttagccaccgttgcgggagccgagtcgataaattcggctatcgacttcgggttggtgctgatagcctggtttatggttcggcctcttgaaatgacggcatcaatcaaatggaagttggccgccatatttgctctcggagcgttcgctggaataattgggttcatcaagattgctgaagcatacaaaaataaccaagacggcaattttctaattggtgcctggaccattgggcaaatggcagccagtattatttgttgctgcgcccctgtgctaaaaccaatcattcccactcacggattctttatacgtcttgcgtcgcgcattacgaaatattccagtcgtagccgcgactcggaaactggaattgcgtctagtcggtcaagccagcagcccggctcgcgtacttctgacgatcgcaaaatatgggatactcaacggacacttactggctggcatcaacttaatgtgtcaggccaagagccagctacatggtcgcaaattgatgcaagccagggcagtggagacgcaatggagccggggtttcaattgaaaacaatacaattacagcagaacatcgacagtacacagagcaggagcggagaagcatttgcatgagtggatgggaatacggagcgatctcaaactggagctgaatctggatctggtgtaccagggtatctctagggacaaggaatatttgggatgtttcgcttcaagatcatcaatagttgtttcggcaaattgtggcaacggaggcggcggctgagactaatgaaaccttttctgaccaccgacatgcatgtactcaggctcggatttggtacagtaccagctacaaattaatgtgaaggctagaactgaacgcagtactactatattgcatttaattacaatcagcccgcgttaccc

SEQ ID NO: 33487 - DNA, 2427 bp, Muscodor strobelii
  misc_feature: SGI cDNA ID NO. 571553
  misc_feature: Encodes the peptide sequence at SEQ ID NO 33488
atgaaggtagatagcagcggaagaatcatgatcccacgtctgataatggactcggatatgaacaacagatataattcctgtcgtcgcgttataagagctcgcgtatcgactcggaataacgcagtcataactacaacagccgagctcgagtaccgattgcatttacaacctcgtattcaggacgacatacagaatctaagtcatcttcaagtgagatactctatgatttcagcaatccaaatatctgcagttagtagcatgttccttgcgataggaattgacagtgtttctggcgcgcagtggattggtctatctgatacacacacatccttggtttcacctaagactaatattttgcctgtcactatctgcgtacctcctgggcacgagccggatgttctctcactggttgcgcatcgactcatcgcatccgcagttttaaacaagtttggatgtagcgatctagtactcgtctacgagccaacgactgcattcgctgctgcattagccgaagaagtagcatccactgccgccagcctcatattcatcacatcgcatagttccagtgacaatcgctacgatgaaaacgtggccattcaatacttgactcgcggtggcatatcgaacattcctttcgaggacatctccatgtttataacatatactgagggtggtggttttgattctgaccttcagtatattctcatgcgtttgtctcctcattgccgacatttgagcaaagaaatgctgttcactcagtcttcacggtctccacgtagtcaccacgtcaaagcaattcaaacacaattgcaaaatgccgccagtctcgacgaaggattgatttatagactcagcaatcacggacattctgtgagccacacaatcgatgctgctaatctctcagatcacgatgggcctgtgagattggacacaatcgtgaactggagatctggttcacatttcatggttcagctccggcctgtggatgctggattgtcattcagtcgggacaagacctactggctcgctggtctcggtcgagaacttggagtgtcgctgtgtgattggatgatccaacatggtgcaagacacgtggtgctctcaagcagacggccgtgcgttaatcagcggtggcttgacaggacacttgctaatggtgcggtgatcaaaattctctcttgtgatctcaccgattattcttccgtcgcccaaacattttccgagatatcttcgactctaccagccctgggtggcgttgtccaaggcgcaatggttctccaagatgtcccaatcagagacatggcattggacgatatttacaacactatccggccaaaagtcgacggtagcctagtcctcgatgcagttttgaaagagagcctacttgactttttcgttttcatgtcatcggtatctgccgttgtcggaaatcctggtcaggccaactattctgcggcaaatttatttatggccggtctggcagagcaacgacgaagaaatggaaaagcagcatctgtcattaacatcggacccattctaggtgtcggtcacatagcccaggaagggatcaatattagaacacaaatgcaagctggctcacataattatatatccgagcgcgactttcatcagctttttgcagaggctgttctttctggtgccccagatcagtcagggccattggagattaccaccggtcttacaactattagttatcttaacgcagagcaagtctcatgggcgactaaccctgtgtttagtcatctagttcggcgggatccagagactgcaaatcaaccgctctctatgaagccacaaacctcgatcaaggatcgactagcccatgcggatactggcgatgaagtatcagatatcattcgacatgcaatggcccagaaattcggagccctttatcagactgaccttgaaggccttgatactcaagacttgatgaaactacacctgggtgccatgggtaccgactctctgctcgcaaacgacatcagaggatggatcatgcgcaattttcaggtcattgtgccccaactcacgattctaggaggcgtgacgatcggtggactcgttcagattattcagaacggcatgccttcgtcacttgcgccaggtcttgtactacagaatgatacaaccagctattctccttctcacttgtccgatcccgaaaataaattgaacgacccacaggaagcgtccgaaactggaggtgggactagtctgacttcccagtctggggaaaacagctacacgacggacaagtcgacctcgcctcttgtcgacatttcaagcgatggatttcgcgaggaccaacaacgcactttgaatatccaacagattgaagctgagttgtcatttagccagcgcatgttctggtgcctacaaactgaccggaccgataaatatcgatag

SEQ ID NO: 33488 - protein, 808 aa, Muscodor strobelii
  misc_feature: SGI Peptide ID NO. 571553
  misc_feature (338)..(502): Pfam Id: PF00106 Pfam Desc: short chain dehydrogenase
  misc_feature (339)..(515): Pfam Id: PF08659 Pfam Desc: KR domain
  misc_feature (6)..(806): NCBI GI: 255938466 Blast Desc: Pc14g00080 [Penicillium chrysogenum Wisconsin 54-1255] gi|211584624|emb|CAP74149.1| Pc14g00080 [Penicillium chrysogenum Wisconsin 54-1255]
  misc_feature (5)..(740): NCBI GI: 121704559 Blast Desc: hybrid NRPS/PKS enzyme, [Aspergillus clavatus NRRL 1] gi|119398688|gb|EAW09117.1| hybrid NRPS/PKS enzyme, [Aspergillus clavatus NRRL 1]
  misc_feature (68)..(599): NCBI GI: 156056793 Blast Desc: SS1G_04127 [Sclerotinia sclerotiorum 1980] gi|154701913|gb|EDO01652.1| SS1G_04127 [Sclerotinia sclerotiorum 1980]
  misc_feature (8)..(751): NCBI GI: 225678468 Blast Desc: lovastatin nonaketide synthase [Paracoccidioides brasiliensis Pb03]
  misc_feature (8)..(751): NCBI GI: 226294825 Blast Desc: lovastatin nonaketide synthase [Paracoccidioides brasiliensis Pb18]
  misc_feature (7)..(710): NCBI GI: 169595148 Blast Desc: SNOG_00308 [Phaeosphaeria nodorum SN15] gi|160701027|gb|EAT91803.2| SNOG_00308 [Phaeosphaeria nodorum SN15]
  misc_feature (8)..(751): NCBI GI: 226285648 Blast Desc: lovastatin nonaketide synthase [Paracoccidioides brasiliensis Pb01]
  misc_feature (3)..(789): NCBI GI: 242801931 Blast Desc: polyketide synthase, [Talaromyces stipitatus ATCC 10500] gi|218717216|gb|EED16637.1| polyketide synthase, [Talaromyces stipitatus ATCC 10500]
  misc_feature (3)..(708): NCBI GI: 169609548 Blast Desc: SNOG_07866 [Phaeosphaeria nodorum SN15] gi|160701869|gb|EAT85332.2| SNOG_07866 [Phaeosphaeria nodorum SN15]
  misc_feature (9)..(710): NCBI GI: 47109414 Blast Desc: polyketide synthase/peptide synthetase [Magnaporthe grisea]
  misc_feature (7)..(681): SWISSPROT Homolog: EC 2.3.1.161 Lovastatin nonaketide synthase
  misc_feature: Useful for fungicidal and/or biocontrol applications
MKVDSSGRIMIPRLIMDSDMNNRYNSCRRVIRARVSTRNNAVITTTAELEYRLHLQPRIQDDIQNLSHLQVRYSMISAIQISAVSSMFLAIGIDSVSGAQWIGLSDTHTSLVSPKTNILPVTICVPPGHEPDVLSLVAHRLIASAVLNKFGCSDLVLVYEPTTAFAAALAEEVASTAASLIFITSHSSSDNRYDENVAIQYLTRGGISNIPFEDISMFITYTEGGGFDSDLQYILMRLSPHCRHLSKEMLFTQSSRSPRSHHVKAIQTQLQNAASLDEGLIYRLSNHGHSVSHTIDAANLSDHDGPVRLDTIVNWRSGSHFMVQLRPVDAGLSFSRDKTYWLAGLGRELGVSLCDWMIQHGARHVVLSSRRPCVNQRWLDRTLANGAVIKILSCDLTDYSSVAQTFSEISSTLPALGGVVQGAMVLQDVPIRDMALDDIYNTIRPKVDGSLVLDAVLKESLLDFFVFMSSVSAVVGNPGQANYSAANLFMAGLAEQRRRNGKAASVINIGPILGVGHIAQEGINIRTQMQAGSHNYISERDFHQLFAEAVLSGAPDQSGPLEITTGLTTISYLNAEQVSWATNPVFSHLVRRDPETANQPLSMKPQTSIKDRLAHADTGDEVSDIIRHAMAQKFGALYQTDLEGLDTQDLMKLHLGAMGTDSLLANDIRGWIMRNFQVIVPQLTILGGVTIGGLVQIIQNGMPSSLAPGLVLQNDTTSYSPSHLSDPENKLNDPQEASETGGGTSLTSQSGENSYTTDKSTSPLVDISSDGFREDQQRTLNIQQIEAELSFSQRMFWCLQTDRTDKYR

SEQ ID NO: 33489 - DNA, 641 bp, Muscodor strobelii
  misc_feature: SGI EST ID NO. CUFF.79131.0
  misc_feature: Variant of the nucleotide sequence at SEQ ID NO 33487
attcagtcgggacaagacctactggctcgctggtctcggtcgagaacttggagtgtcgctgtgtgattggatgatccaacatggtgcaagacacgtggtgctctcaagcagacggccgtgcgttaatcagcggtggcttgacaggacacttgctaatggtgcggtgatcaaaattctctcttgtgatctcaccgattattcttccgtcgcccaaacattttccgagatatcttcgactctaccagccctgggtggcgttgtccaaggcgcaatggttctccaagatgtcccaatcagagacatggcattggacgatatttacaacactatccggccaaaagtcgacggtagcctagtcctcgatgcagttttgaaagagagcctacttgactttttcgttttcatgtcatcggtatctgccgttgtcggaaatcctggtcaggccaactattctgcggcaaatttatttatggccggtctggcagagcaacgacgaagaaatggaaaagcagcatctgtcattaacatcggacccattctaggtgtcggtcacatagcccaggaagggatcaatattagaacacaaatgcaagctggctcacataattatatatccgagcgcgactttcatcagctttttg

SEQ ID NO: 33490 - DNA, 762 bp, Muscodor strobelii
  misc_feature: SGI cDNA ID NO. 571554
  misc_feature: Encodes the peptide sequence at SEQ ID NO 33491
atggagtccttccatcagttccagcgtttccccgccgaaatccagctgatgatctgggaagcattcctcgaagcagagctctctaggcgcccgatgatcattatcgactctgcgtttcgcgcgcttgccacccacaaactccaagaatctcccttgtttcgcgtcagtactcagagtcgtacgataaccaagaaaacgtatccattggtccttcctgtattgcactacaatggaaacgtgtgcggcaatttgagactcaatccgagacgcgacattttttgtttcgactttgacaaagtatggatggggttgaggcctcaaggcatgtatctaagcgtgccattcgatgagcgcgcgaaactttccgtccagattgtattagagacgtggttggcctgggtaaatcttgtgcagggcctaggcgcagttgcttacaatgattctacgatactcggcagtcgactcacccgtggttccaaagatcttcgtctgtctttctggtttcgtgaagacgccagcgaggaatggatggggtttgtcactcgtcgtaggatccaggatgtggttcaactgagtgcgacagattacttacgcaagtataaaggcaatatcgctgtaatggaaagatcgcaggatataaagcccggcaatcctgggacggaagagctgggggaggtgaagggaaaatggaaagacgtggtacagtatggtaatctcactgaggagaagatcactgagttcctttcaaagggcctggtctga

SEQ ID NO: 33491 - protein, 253 aa, Muscodor strobelii
  misc_feature: SGI Peptide ID NO. 571554
MESFHQFQRFPAEIQLMIWEAFLEAELSRRPMIIIDSAFRALATHKLQESPLFRVSTQSRTITKKTYPLVLPVLHYNGNVCGNLRLNPRRDIFCFDFDKVWMGLRPQGMYLSVPFDERAKLSVQIVLETWLAWVNLVQGLGAVAYNDSTILGSRLTRGSKDLRLSFWFREDASEEWMGFVTRRRIQDVVQLSATDYLRKYKGNIAVMERSQDIKPGNPGTEELGEVKGKWKDVVQYGNLTEEKITEFLSKGLV

SEQ ID NO: 33492 - DNA, 2538 bp, Muscodor strobelii
  misc_feature: SGI EST ID NO. CUFF.79143.0
  misc_feature: Variant of the nucleotide sequence at SEQ ID NO 33490
ggaaaatggaaagacgtggtacagtatggtaatctcactgaggagaagatcactgagttcctttcaaagggcctggtctgaggggcttagtcttaagaacttctgagtaagattagcgttgagcaaatactgttcgatttgcggaagtctcttggctagaaaaaaggaattcaggggcaactagttacaccacacttcacaggctggatgccgtttgggcgcctatctaaaaaacctcgaaaaatatgacatcaatttcattggactctgtgtatagtgacagacatgttcaatcatactctgagagttcagactattagatgaggctattattgttgaaatttgtacacccgaaaaccttattgttgatggggcatctgcgtacgcagatacaggcgaccaccacacaccaccaccaccacatctcggttacttataaaacgaatggatgagaaagctattctgtccccgggagtctattcactttccgtatacggctctaattttttggggaaatgcgaatacaagcaccataatgagtcagtcctcagtcagtatgttcttcaataactagaacaaaaactcaacgagcaaaaaccaattttgacacaatgatgatgctggcgctgattatatccgaggtggtgaatttccgaggagttggggaaatgacatattggcttgcgcatctagatctccaatgaatgccacaagcactgggtgcatgccaagagctcctgcacgcgtagaccattcagcaaatgatagctcttctatgttggattctgcttgacgattattcatctggtgtgcgtgggtgttatccgcgtctatttcacacaccagccacatgcgcagatcatgcattggaagacattcttcaccgacatgatgaatgaattctacacctgtgttatgctggctattatcatgtcgatcaatagcagtgtgcacaataccgcgtacggtgtctgctcgactgattgggttgatggtccaggtattaccgtgtggaatgagcgggacagctcgtaaacggcgtgaatagtgtttcaaattatggataaggtcgaagttgctttcctcaaatgacctaagtcgcgtgatattcgatggtcggtggatatacacaggccaatctgcatgatgcttatgcaatcgctcgaggaacacctcgcttgcccatttactggcggcgtagccgggaattcggcctgctgttggcggcggatagcaagaaactgattctggaggtatgctggagcggcctgcagcgaaactacatgcgctgccgctggatatatagtgaaatggaactaaacgaggcaagcacatttgcgcgagctccttcgttgcttctagattcgacactctcagcgatgcccatgtcttgccgtacgacacatctgccccgttgtggataactaaatcagcaatgctaaatatgtcctgcgcctcgtccggtgatagcccaaggcccttcaacagaagattgccctcgtgaagaatgagtttgtcgctaagtttgtgtaagtctttgcgttcctctacacggcgcactgcgatacagtggatcttcttgacgctcggattagcgagtaatgcatcaagaatgccccggccgagataccctgtggctcccgtaaggacgacagtctcgacagtggccatactcttcgatgtgaatggtcttgtacctaacaaggtagagtctggactagtttcgacgttccagtgaactggtgccatgagcgttgactgtcgggttgcagcgccgtggattacagcggccatcctcttcagggtagagaattgaaatagcgttatcaattgcacgtaaacagccagctgctcctcaatgcgcttttggagctcgagaaggagcaatgaggttccgccgacgtggaaaaagtctgtatctgcagtaataatgcctgttttgctcacagcttcagaaatgacagcctcccagatgtccttcaagcgagtttcgctgtctgtaaaaactggttcagtcgttggcggaaggagctcaataagcgacaagttagaacatgctcttcgatcaagttttccatttttggtccgtgggagttgggacgcgggtgcaaccattgcgggacacatatatctgggaatatttagaagggaaggcagcaatctagcgaattcagagttctcttcgggcgaatagttttgctcgaagactccgtgagcaacaaggaagtctggacctgttgctgacttcctgcgcgtggtcaccacaacctcgcttagtcgaccttgggatgcgtgcatcaaagcatgttcaacttcccgaacgtcaattcgtaaaccgcggatcttgatctgggtatcttctgatacacgaccatatatgaacagtgcaccatcctcagcccaccatcctatgtcgcccgtgcggtgaatcatacccggttccgcaccttgctctcgttgtatactcagttgactactagggagaaagtggtgcacattcaattgttcccggttaagataacctttgcaaacgccgag

SEQ ID NO: 33493 - DNA, 654 bp, Muscodor strobelii
  misc_feature: SGI cDNA ID NO. 571555
  misc_feature: Encodes the peptide sequence at SEQ ID NO 33494
atgccgggcttgacacgacgccagcaagcggctcgccgccgagccaaagcacatggcaaaactactaccactcaagccaacactccgtctgcactttcaaaaaacgacaaaggacgagagcagccggaagccaagagtccagatgtcaacgagcatgcgagtaagggtcaagagatgggagacgaggatagcgcgttacttttcggattctctatccatgaactacgcttcggtgttggcaagcaggagatcgaattcgacctaaagggccgctggatcctcgtcatcattgaaactcaggtcgatacactccaaatcatacacgtgcgtaactacaacgttggcacaatgagaatcacacgagccgctattcaggcgtttttcgacaagttgagttcaagcaacaccacccgtccttggcgacgtcctgtgtttggatcctcaaaagagccgaagtggcgcattcagtcctggcagggtctgcccaattatcttagcagagagctgtgcgcgtacatcagtgactatgccaatggcgaggatttttggttggacatgcccgatgaggtcgagtcacaggcagatggcgttgtgggcttctaccccgatagaaccccgtatcagaagttctctgatgcctgcataggaaaatag

SEQ ID NO: 33494 - protein, 217 aa, Muscodor strobelii
  misc_feature: SGI Peptide ID NO. 571555
MPGLTRRQQAARRRAKAHGKTTTTQANTPSALSKNDKGREQPEAKSPDVNEHASKGQEMGDEDSALLFGFSIHELRFGVGKQEIEFDLKGRWILVIIETQVDTLQIIHVRNYNVGTMRITRAAIQAFFDKLSSSNTTRPWRRPVFGSSKEPKWRIQSWQGLPNYLSRELCAYISDYANGEDFWLDMPDEVESQADGVVGFYPDRTPYQKFSDACIGK

SEQ ID NO: 33495 - DNA, 570 bp, Muscodor strobelii
  misc_feature: SGI cDNA ID NO. 571556
  misc_feature: Elevated expression when VOC is produced
  misc_feature: Encodes the peptide sequence at SEQ ID NO 33496
atggcatacactcgtgtttcttcctctgaagatgaacgccttaccaatgacatggagtcccagcctttgactgataaggatgatgcttacagtcctccgacatatcggaattggctcgcgagagtttgcacttggactcgagcgtatgttctagcgcttcatattgtcactattgttgcaatagggctcctatggagccacgatcatcggtatgagaaggccgggtcgatgacaggattcactttttcacccgctgcagagcatattgagtacgaggttagagaattgcgcgttggtggccaaggctatgagaaagtctatggaggcccgcctaccgaggagcaagagaaggcgtgggatgacctgataaggcctggctacttcaacgcatcgcgtgaagaactggagatggctggcgagtcgtttgagaatattaccgagctcgccaacggcggctatcttgcaaccatatacgcctatcacagcatgcattgcgtgtacgggcatatgcaagcccacctaggtattgacttccccttccttcctcttatgctgtctggacgtctctaa

SEQ ID NO: 33496 - protein, 189 aa, Muscodor strobelii
  misc_feature: SGI Peptide ID NO. 571556
  misc_feature (80)..(178): NCBI GI: 169602899 Blast Desc: SNOG_04454 [Phaeosphaeria nodorum SN15] gi|160706284|gb|EAT88214.2| SNOG_04454 [Phaeosphaeria nodorum SN15]
  misc_feature (1)..(166): NCBI GI: 189204938 Blast Desc: conserved [Pyrenophora tritici-repentis Pt-1C-BFP] gi|187985903|gb|EDU51391.1| conserved [Pyrenophora tritici-repentis Pt-1C-BFP]
  misc_feature (82)..(166): NCBI GI: 242804865 Blast Desc: conserved [Talaromyces stipitatus ATCC 10500] gi|218717807|gb|EED17228.1| conserved [Talaromyces stipitatus ATCC 10500]
  misc_feature (80)..(167): NCBI GI: 116204067 Blast Desc: CHGG_09917 [Chaetomium globosum CBS 148.51] gi|88176045|gb|EAQ83513.1| CHGG_09917 [Chaetomium globosum CBS 148.51]
  misc_feature (53)..(177): NCBI GI: 238501772 Blast Desc: conserved [Aspergillus flavus NRRL3357] gi|220692357|gb|EED48704.1| conserved [Aspergillus flavus NRRL3357]
  misc_feature (29)..(166): NCBI GI: 154279258 Blast Desc: [Ajellomyces capsulatus NAm1] gi|150412385|gb|EDN07772.1| [Ajellomyces capsulatus NAm1]
  misc_feature (33)..(166): NCBI GI: 240281141 Blast Desc: conserved [Ajellomyces capsulatus H143]
  misc_feature (107)..(166): NCBI GI: 156039267 Blast Desc: SS1G_11770 [Sclerotinia sclerotiorum 1980] gi|154697507|gb|EDN97245.1| SS1G_11770 [Sclerotinia sclerotiorum 1980]
  misc_feature: Useful for introducing or modulating the production of volatile compounds
MAYTRVSSSEDERLTNDMESQPLTDKDDAYSPPTYRNWLARVCTWTRAYVLALHIVTIVAIGLLWSHDHRYEKAGSMTGFTFSPAAEHIEYEVRELRVGGQGYEKVYGGPPTEEQEKAWDDLIRPGYFNASREELEMAGESFENITELANGGYLATIYAYHSMHCVYGHMQAHLGIDFPFLPLMLSGRL

SEQ ID NO: 33497 - DNA, 1795 bp, Muscodor strobelii
  misc_feature: SGI EST ID NO. CUFF.79189.1
  misc_feature: Variant of the nucleotide sequence at SEQ ID NO 33495
gatcttccgaaaaagcaaagctgtgtgctattgagcgttatcgaacgagaatctggatcatctcacccttgctatcgctcatgcaggcttacaccaccggcgatatcatgaataccaacgcggccgcgtttggaaggtcattgctccatcgaaggttgtgcaagcgactacggagatctctccgataatgttctacgccttgtgtcggtgtaacgaattgatcgtcgttctaacccttgaccaacccccaccgcgtgcttgagtctaatatggcgaggcagcctgaaattggacttttgacggtggatgaccgcattcgttgttttaacagccctgttcccattatcgtcaacaactgcccgcatttgcagcgtgtactagagttctggcctaaggcttgatttcaaatggtctatgagtgagaaatgcgattatgtgctgtgaagggtatggtgccaagtgcatggatgtgatggcagcgactggtattatgcaggtgagatccttgcgacctattgaatcataattaccgctcagcactctcactcttgtatagtaatgtaccgatacccccgttagacgatgtagacgttatgatataaaagcatgatcaacattcaaggccttgttcttactacaatatcaattcttactttttaaaacgggagctggagtactgtttctcgacgaggacgatagcgcttgtaaaaccttcagcttggtagacacaatggcatacactcgtgtttcttcctctgaagatgaacgccttaccaatgacatggagtcccagcctttgactgataaggatgatgcttacagtcctccgacatatcggaattggctcgcgagagtttgcacttggactcgagcgtatgttctagcgcttcatattgtcactattgttgcaatagggctcctatggagccacgatcatcggtatgagaaggccgggtcgatgacaggattcactttttcacccgctgcagagcatattgagtacgaggttagagaattgcgcgttggtggccaaggctatgagaaagtctatggaggcccgcctaccgaggagcaagagaaggcgtgggatgacctgataaggcctggctacttcaacgcatcgcgtgaagaactggagatggctggcgagtcgtttgagaatattaccgagctcgccaacggcggctatcttgcaaccatatacgcctatcacagcatgcattgcgtgcgcaatctacgtctttttctctatcgcgagcgatactaccctaatatgactgaaatccagtacgggcatatgcaagcccacctagaccactgcctcgaagcccttcgttcgactgtcatgtgcgctggcaacattggcgtgtatacatttaaatggactcacccagacgatcaaattccaacaggccaaactaatgggcgtgagaaatgtgccagctggtcctcaattcacgactgggccacgtcgcgaatgatacctatggcccctgccgatgaacagcgtgagagatggcctgtcaatgatgaagacatcgaaggtggcctgccaaaatatatcaaagtcctgcctgacaaggcgatggtggtgggcggattaaggcccccgcagtaagaacacttactatgaacgctcgtaaagggtcatggaggttctttaaaagtcgatattagcatacttaccactgtttaatcgacatttaaaacacgagggctaagtccaaggtcttctttttattgactaaacgtttaagtctttagagcattagtctataaatacacactctctcca

SEQ ID NO: 33498 - DNA, 1929 bp, Muscodor strobelii
  misc_feature: SGI cDNA ID NO. 571557
  misc_feature: Encodes the peptide sequence at SEQ ID NO 33499
atggctcgacaagtacttaacgagaccaactccactctcatgccaggtctcaaggacatttggatcgagcctgatgatcaggatattgtatgctgcatttgtctggagaagataggcaccgaagtgctggttagaacactctgcaagcatgatcctgacccggctcataccattagcaagccttcgaggactttagacactcccttagggaccatggccacgtatgatagacatatggagtgtatcaaaaccaagaacgttagctacgtgaccatatcccatgtatgggatccggagatcgctaaggtccagtatgaaggtccaggcggtgcaaccccaagggataacatcatggagcgtattatcaagtcagctctatatattttccaagcgctcgaacgcatcggacataggaatccagaaatatggtacgattatctcagcgtaccgcagtgggaagaaatgctgaagaacgcgattctcaacgcaatccccgacttctacaagaactcttccttcactttatgcatcatgcatgatgttaatcaagaaacgatcttaaaattgaaatacggggaaaactcgcaagatcgaattgacagcgtgacaggattttgcaatgctaaatacctccagcgcgtttggactgtaatggagtacgcgaaaagctccaagacgaaggtcatgttggaagaaaacgagatcaccgaagacgattgtgatctacttatccagcaaactgaagctgtctggtacggcgaggttgaacagcacggcggggatatctttgcagtagcggaaaaatctcgcgttggtgagaacatcattccttggcaactgggttcaattcggcagcgtcgaacttcaactatcgtggacttcggtattgcattctctgccttgacattccgaggctgtcaatcaaacaaagattttctttacgcacttcgaggtataactcaggccaacaagtctaggaaactcgacggagaccacgacaaagagcttataaaaattgctgaagactgtctcgaacaaggcgactacagcccattgatgattactcctcgggtctccggtttcgattatcgattagatatgaaggaaaggaggcgtatgggatataatgatgtgatctctttcgggctcgatttgcgacaagataatgatacacacgatgcttttcacagaaactgcatatatcagtccggttttcccattctgaacttagaaaggattggaactgtagagtttgctcgcaatactgcacgaggactccagcatgacccgcttgggaggtttgaagtgttcacacacttgattcttactgtttgtgggccagacgtcagtgagttcattcgaaccacggcgggaagattatataatcagcctgatgatgatatcgaagcgattctatctaaccagactcgtcgtcgcatcatcgaagaggaaatcagggctcgttatgactggtttgggactcactggtctaacgaacagcggccatgtttcgattcgatgtggcatgacgcctgcgttccaaacaccgagcggctggctagggccttgggtctcctgagaccgagagcagatggtgggaaaaatcaacttagccatccacacggtgatacgatccactttcgtgagtacgacggtcttgtcgctgctacttgctcgacatgtttaagaaaatacatgtatcgggcagctctcttcaagccgtcgacagagctactcggagctgtcgcatatcgtatacccggtctccaatacagattcactcgcgcaaatggcgcagctattcttcttaaagatagaagaattgttggtcgaatggtctatgcttctccagcatgcccatgccggcaaagagaaatggtcgaagtgaggattgataacttgcccgtaataacagtggaaagaatgtga

SEQ ID NO: 33499 - protein, 642 aa, Muscodor strobelii
  misc_feature: SGI Peptide ID NO. 571557
  misc_feature (141)..(635): NCBI GI: 261361243 Blast Desc: conserved [Verticillium albo-atrum VaMs.102]
  misc_feature (17)..(618): NCBI GI: 256721498 Blast Desc: NECHADRAFT_79783 [Nectria haematococca mpVI 77-13-4]
  misc_feature (6)..(453): NCBI GI: 46138299 Blast Desc: FG10664.1 [Gibberella zeae PH-1]
MARQVLNETNSTLMPGLKDIWIEPDDQDIVCCICLEKIGTEVLVRTLCKHDPDPAHTISKPSRTLDTPLGTMATYDRHMECIKTKNVSYVTISHVWDPEIAKVQYEGPGGATPRDNIMERIIKSALYIFQALERIGHRNPEIWYDYLSVPQWEEMLKNAILNAIPDFYKNSSFTLCIMHDVNQETILKLKYGENSQDRIDSVTGFCNAKYLQRVWTVMEYAKSSKTKVMLEENEITEDDCDLLIQQTEAVWYGEVEQHGGDIFAVAEKSRVGENIIPWQLGSIRQRRTSTIVDFGIAFSALTFRGCQSNKDFLYALRGITQANKSRKLDGDHDKELIKIAEDCLEQGDYSPLMITPRVSGFDYRLDMKERRRMGYNDVISFGLDLRQDNDTHDAFHRNCIYQSGFPILNLERIGTVEFARNTARGLQHDPLGRFEVFTHLILTVCGPDVSEFIRTTAGRLYNQPDDDIEAILSNQTRRRIIEEEIRARYDWFGTHWSNEQRPCFDSMWHDACVPNTERLARALGLLRPRADGGKNQLSHPHGDTIHFREYDGLVAATCSTCLRKYMYRAALFKPSTELLGAVAYRIPGLQYRFTRANGAAILLKDRRIVGRMVYASPACPCRQREMVEVRIDNLPVITVERM

SEQ ID NO: 33500 - DNA, 183 bp, Muscodor strobelii
  misc_feature: SGI EST ID NO. CUFF.79179.0
  misc_feature: Variant of the nucleotide sequence at SEQ ID NO 33498
tctacttatccagcaaactgaagctgtctggtacggcgaggttgaacagcacggcggggatatctttgcagtagcggaaaaatctcgcgttggtgagaacatcattccttggcaactgggttcaattcggcagcgtcgaacttcaactatcgtggacttcggtattgcattctctgccttgac

SEQ ID NO: 33501 - DNA, 1101 bp, Muscodor strobelii
  misc_feature: SGI cDNA ID NO. 571558
  misc_feature: Encodes the peptide sequence at SEQ ID NO 33502
atgagcgatttcacggaacagctcgccggggcgcttcgccaattctacagctccattgttcgcctgccttacattaacgccgacgctgttctgctgcctcccccagacggctggtctgatgtcggggccgaggagctccgcaaaaggggcaaagcggatcaagtcatcgagttgttacgctttctgccatatcttcgcaatccgacccagggcaggggatggatgctgtcgccagataccgcttgcattacctactgcaacggagaactatatcctgcccgcatggatgagttgcagccgacgccacctcattgcatctggctcactgtacacgattctcgcgatggcaccgatctcctcctggacgctcaggtcggatctatcacggaatggtcaattatgggaagcaggggtcccggcggctgctttgatgactatgaggtgatggctctggccgaccgatggatgtgtttccctaccatgccagcggtcgagttctttcaattatggcaggctagatgggagaagcttttgtggatacctgtctacaatccccgtggcaactgggctaatgcgaagtggtggcggcgggcaatacccttttctgacgaagaggagtacattcttcacgacggggagtacgtcccagcggtggccgatggtggcgacaagcagatcgagcattcaggtactgccgctacacaggacgtcgatgacgacgacgatgatgatgtcaatgatgctcacaacaatgacgacagcgagagtgacgagtcagaatcacagatggcgctatctgaccaagagctcgatgacattcttagcgatgcttttgatgacgcgagcgaaactatgcgcaaacagttcactgcagacgtggatcagtccgaagccgacttgcaagagatcggagcagaacaagctgaattagctcctacttctgaagctatgtcggatctccggaacacccaagaacgaaaatacctcgaagggggcaaaattctgtactcgatatttcaacgcaacggctggcccttccactttaatcgagaacaatgtaaagctgagctagacgagtttcgccaaggtgagtattggtga

SEQ ID NO: 33502 - protein, 366 aa, Muscodor strobelii
  misc_feature: SGI Peptide ID NO. 571558
  misc_feature (1)..(360): NCBI GI: 242774023 Blast Desc: TSTA_086270 [Talaromyces stipitatus ATCC 10500] gi|218721978|gb|EED21396.1| TSTA_086270 [Talaromyces stipitatus ATCC 10500]
  misc_feature (6)..(208): NCBI GI: 212541372 Blast Desc: PMAA_060110 [Penicillium marneffei ATCC 18224] gi|210068140|gb|EEA22232.1| PMAA_060110 [Penicillium marneffei ATCC 18224]
  misc_feature (6)..(189): NCBI GI: 242798927 Blast Desc: TSTA_011450 [Talaromyces stipitatus ATCC 10500] gi|218716614|gb|EED16035.1| TSTA_011450 [Talaromyces stipitatus ATCC 10500]
  misc_feature (75)..(187): NCBI GI: 212531817 Blast Desc: PMAA_066230 [Penicillium marneffei ATCC 18224] gi|210071429|gb|EEA25518.1| PMAA_066230 [Penicillium marneffei ATCC 18224]
  misc_feature (6)..(186): NCBI GI: 238841748 Blast Desc: conserved [Microsporum canis CBS 113480]
  misc_feature (3)..(66): NCBI GI: 169622607 Blast Desc: SNOG_14528 [Phaeosphaeria nodorum SN15] gi|111056948|gb|EAT78068.1| SNOG_14528 [Phaeosphaeria nodorum SN15]
  misc_feature (10)..(128): NCBI GI: 238838708 Blast Desc: conserved [Microsporum canis CBS 113480]
  misc_feature (6)..(66): NCBI GI: 116193283 Blast Desc: [Chaetomium globosum CBS 148.51] gi|88182272|gb|EAQ89740.1| [Chaetomium globosum CBS 148.51]
  misc_feature (6)..(128): NCBI GI: 115491061 Blast Desc: [Aspergillus terreus NIH2624] gi|114197018|gb|EAU38718.1| [Aspergillus terreus NIH2624]
  misc_feature (10)..(125): NCBI GI: 238839760 Blast Desc: conserved [Microsporum canis CBS 113480]
MSDFTEQLAGALRQFYSSIVRLPYINADAVLLPPPDGWSDVGAEELRKRGKADQVIELLRFLPYLRNPTQGRGWMLSPDTACITYCNGELYPARMDELQPTPPHCIWLTVHDSRDGTDLLLDAQVGSITEWSIMGSRGPGGCFDDYEVMALADRWMCFPTMPAVEFFQLWQARWEKLLWIPVYNPRGNWANAKWWRRAIPFSDEEEYILHDGEYVPAVADGGDKQIEHSGTAATQDVDDDDDDDVNDAHNNDDSESDESESQMALSDQELDDILSDAFDDASETMRKQFTADVDQSEADLQEIGAEQAELAPTSEAMSDLRNTQERKYLEGGKILYSIFQRNGWPFHFNREQCKAELDEFRQGEYW

SEQ ID NO: 33503 - DNA, 2932 bp, Muscodor strobelii
  misc_feature: SGI EST ID NO. CUFF.79240.0
  misc_feature: Variant of the nucleotide sequence at SEQ ID NO 33501
acaccggctggccggagctggcctatgctgttagtactcgctatcgttcaatggagctaggtatacgctaatgcgctgtaattatagtgagcttacggcctgaagaattttatgctatggttttaaggtctgcgatactgacgctgagtacctaaacgttttaaacgcaagctttccggaaaagtacgacttacttcaacctaggcgcccggtagtgtaggcacaactctcaaaagccgggcgcttgttgcttcgtcgggtcttactcgcagcataaacccgcccaaggactgtcgctttctatttcttcgcttcttgtcaatttttccaattgctttttcttccatccccctctccatcgtctcgcatcaaatttctcgtcagactcgcagtacagtacggtatatgtcgccatcatgagcgatttcacggaacagctcgccggggcgcttcgccaattctacagctccattgttcgcctgccttacattaacgccgacgctgttctgctgcctcccccagacggctggtctgatgtcggggccgaggagctccgcaaaaggggcaaagcggatcaagtcatcgagttgttacgctttctgccatatcttcgcaatccgacccagggcaggggatggatgctgtcgccagataccgcttgcattacctactgcaacggagaactatatcctgcccgcatggatgagttgcagccgacgccacctcattgcatctggctcactgtacacgattctcgcgatggcaccgatctcctcctggacgctcaggtcggatctatcacggaatggtcaattatgggaagcaggggtcccggcggctgctttgatgactatgaggtgatggctctggccgaccgatggatgtgtttccctaccatgccagcggtcgagttctttcaattatggcaggctagatgggagaagcttttgtggatacctgtctacaatccccgtggcaactgggctaatgcgaagtggtggcggcgggcaatacccttttctgacgaagaggagtacattcttcacgacggggagtacgtcccagcggtggccgatggtggcgacaagcagatcgagcattcaggtactgccgctacacaggacgtcgatgacgacgacgatgatgatgtcaatgatgctcacaacaatgacgacagcgagagtgacgagtcagaatcacagatggcgctatctgaccaagagctcgatgacattcttagcgatgcttttgatgacgcgagcgaaactatgcgcaaacagttcactgcagacgtggatcagtccgaagccgacttgcaagagatcggagcagaacaagctgaattagctcctacttctgaagctatgtcggatctccggaacacccaagaacgaaaatacctcgaagggggcaaaattctgtactcgatatttcaacgcaacggctggcccttccactttaatcgagaacaatgtaaagctgagctagacgagtttcgccaaggtgagtattggtgacgcgggcgcactgccgcataagctagagcatgaaccctgtttcctttgcgggcttctgcgaaaacgaatctgctctactgcccaccgaagctggcattgtcgcctctatcacaccgctagcgaccaaaggggtcggatttgcgtcaacagccatgtcttcgggagtcctaacaggcctaaccacgttgattccatctttggcgagatccgccacttcatctcgacagttcggcgtgccgcacttgtgaattccgcggtcgctaagctcttcatccgttagccgccgtgtgttatttccatcatcagctaacatgtcttccacccgcggatacagaacccctctccgctggtaaccaggcatcggtggcttgttcatggtgatggcaagcggtggattgtgggcatataatcccacagtctggtgacgctgagcgttgccgatataccaaggatcatcggtgagaagagcaaagcctgggtcgtccacgagccttgacggccagcaggggttggcggtcaagccatcgtccgcgtcattcggcatgttgatgaaggcaatgcggaccgtgctttgagtggtagttacatcaccggtgtatacgtcgtacactcttccccctatattcctcgtggtgtgcgagcggtggttgtttgttacttcagggacccggccgataccgtcaccgttatatctccagccacaaaagcttaagccaaacagtgcagctcctgctggctcattctcgtcctgtgctaccattctgatgtattgttcgtgcagattttgatcctgccagaatccgatcggtgggtattcgtcacgctcgcagttaagcccagactcctgcatgtacccgtgccaccacgagtccacatgctgatcactccacacgtcgactatctggaccccgtcacgataattgggacgagaggtcgttgggcacgtaagagggttataggctcgctgccccggatcccgaaggattgcgtggtagttgatgacggactcataatgctggcatgcctgtggccacttcgctccgtcacatcgtcggtcctgaattccaggatctgccaagtgtgtaagttcaaggatacagtgagcagagccttcacacttacgcagtgtcgttatgggatgatttgcagaaaaggtactcaggtgtcgtaggcaaggggcacgtttacttccacattcagagctcgtcgactccttggggtgggacgaggatggaggtcgctcctgtgcaattgttttcggcttatctgcataaaaccatcgagttcagtcgtctatctccgaaacataggttgaatttcttaccgaacgacagtgtatgcttcttcccaaatactttgaactcggccttgccttctttctcaacccccttgacacacaggtcgataagtgccgg

SEQ ID NO: 33504 - DNA, 3225 bp, Muscodor strobelii
  misc_feature: SGI cDNA ID NO. 571559
  misc_feature: Encodes the peptide sequence at SEQ ID NO 33505
atgacgcataagatttggcttctcttggctttagttgcgtctgttgttgcgcttccgcgagacgatagactcctttcaaacaacctcgcgagaagagatctgcccattggaacttgtaatcccgacactccttgccccaacggcgcttgctgtggcgacaacggattatgcggctattctcaactagagtgtggtgatggctgccactccaactgtgatgccaaagccgcatgtggagtggacggcaagccaggctcccagaattgtcctctcaatgtgtgctgttccaagtttgggttctgtggaagcacctcggacttctgcgatgtagcttcaggctgtcaggaaggatacggaacttgcggcgatgcacctcgtccgtcctgtgctggctcccaggtcgccattgagccggaagacctcaacctgtctggatttacgcatattaactttgcgttcgccttttttgaccctgatagcttcgagatcagtcctatggacccaaactctggcaagctcttcagccgattcaccgcactcaaggacaagtatcacgggttgcagacgtggatctctgttggtggctggtccttcacagatcctggaccaacacaagaagcctttagcgtcatgacttcgacatctgcgaaccgtgccaaattcatccaggccttggttaggttcatgaaccaatatggatttgatgggattgatcttgattgggagtatccccaagctgatgatcgaggtggccagcccaatgacatggtcaattacgtctccttggcaaaggagttaaaggccggtattggcagcaaaggcttatctatgacactgccgacaagcttctggtacctgcaacattttgacgtgaacgctctccagaactctgtcgactggttcaacttcatgtcttatgatcttcatggaacatgggacgctgattccaaattcatcggccccctactcgctccccataccaatctgactgagatcgatatgggccttgatttgctttggagagctggtgtcaagccagagaaggtagtactgggtttggcttggtatgggaggtctttcaccctcaaggaccctagctgcaacactcccaatggcgtctgccagttcaatgggggtgccaaagcaggcccttgcaccgacaccatcggcatcctggattatcaagagatctcggacgtggtgatcaacaacaacctcaacccggtatgggataaagatgctggtgttaaatggatcacatgggacagcgaccagtggatatcctacgacgaccaggacaccttccagcagaagaaggacttcgcatcgaaacgttgtctcggaggtctgatgatctgggcaatggaccaaatgaaccaagcgcagtcaaacggcctgggtcaagcgcccggtgtcacggtagatcagcaggccgatgctgcgcagatgtcggccgatcaggcggcgaagctcagctgttacgccacagattgcaatgagcagtgcaagagcgggacgaatgaggtggccgaggtgtttgggcaaccaggtcaggtgtccacccgagatcgatgttcagagggccagtatcggaccgtctgctgcaatgatggaacgaccatgggaacgtgttcttggcgcggctaccgaggtatgggtatgtcatgcattcaagggtgtgcctctggtgaaacagaagtcatcaccgatacgagtgtcaagaatgacggcaaggagcagacgtgcaatggtggtctacagtcggtgggtgatgccgccaaagacgcagccgaggcggccgcagaacagttggcactcgatgttgccgcgaaggcattctgtcgagtagccgtgcccgccttactcgcgccactggaactagcagaagatctgatcccaattatcggtgagatcttagatattgccgagatagccgcgacgccggcacttatcgacctgtgtgtcaagggggttgagaaagaaggcaaggccgagttcaaagtatttgggaagaagcatacactgtcgttcgataagccgaaaacaattgcacaggagcgacctccatcctcgtcccaccccaaggagtcgacgagctctgaatgtggaagtaaacgtgccccttgcctacgacacctgagtaccttttctgcaaatcatcccataacgacactgcatcctggaattcaggaccgacgatgtgacggagcgaagtggccacaggcatgccagcattatgagtccgtcatcaactaccacgcaatccttcgggatccggggcagcgagcctataaccctcttacgtgcccaacgacctctcgtcccaattatcgtgacggggtccagatagtcgacgtgtggagtgatcagcatgtggactcgtggtggcacgggtacatgcaggagtctgggcttaactgcgagcgtgacgaatacccaccgatcggattctggcaggatcaaaatctgcacgaacaatacatcagaatggtagcacaggacgagaatgagccagcaggagctgcactgtttggcttaagcttttgtggctggagatataacggtgacggtatcggccgggtccctgaagtaacaaacaaccaccgctcgcacaccacgaggaatatagggggaagagtgtacgacgtatacaccggtgatgtaactaccactcaaagcacggtccgcattgccttcatcaacatgccgaatgacgcggacgatggcttgaccgccaacccctgctggccgtcaaggctcgtggacgacccaggctttgctcttctcaccgatgatccttggtatatcggcaacgctcagcgtcaccagactgtgggattatatgcccacaatccaccgcttgccatcaccatgaacaagccaccgatgcctggttaccagcggagaggggttctgtatccgcgggtggaagacatgttagctgatgatggaaataacacacggcggctaacggatgaagagcttagcgaccgcggaattcacaagtgcggcacgccgaactgtcgagatgaagtggcggatctcgccaaagatggaatcaacgtggttaggcctgttaggactcccgaagacatggctgttgacgcaaatccgacccctttggtcgctagcggtgtgatagaggcgacaatgccagcttcggtgggcagtagagcagattcgttttcgcagaagcccgcaaaggaaacagggttcatgctctag

SEQ ID NO: 33505 - protein, 1074 aa, Muscodor strobelii
  misc_feature: SGI Peptide ID NO. 571559
  misc_feature (75)..(121): Pfam Id: PF00187 Pfam Desc: Chitin recognition protein
  misc_feature (118)..(459): Pfam Id: PF00704 Pfam Desc: Glycosyl hydrolases family 18
  misc_feature (76)..(121): Pfam Id: PF00187 Pfam Desc: Chitin recognition protein
  misc_feature (138)..(459): Pfam Id: PF00704 Pfam Desc: Glycosyl hydrolases family 18
  misc_feature (100)..(679): NCBI GI: 169622605 Blast Desc: SNOG_14527 [Phaeosphaeria nodorum SN15] gi|160704807|gb|EAT78067.2| SNOG_14527 [Phaeosphaeria nodorum SN15]
  misc_feature (28)..(588): NCBI GI: 212530418 Blast Desc: class V chitinase, [Penicillium marneffei ATCC 18224] gi|210074764|gb|EEA28851.1| class V chitinase, [Penicillium marneffei ATCC 18224]
  misc_feature (33)..(535): NCBI GI: 238844198 Blast Desc: chitinase [Microsporum canis CBS 113480]
  misc_feature (38)..(582): NCBI GI: 121701495 Blast Desc: class V chitinase, [Aspergillus clavatus NRRL 1] gi|119397155|gb|EAW07586.1| class V chitinase, [Aspergillus clavatus NRRL 1]
  misc_feature (38)..(625): NCBI GI: 67904806 Blast Desc: AN9390.2 [Aspergillus nidulans FGSC A4] gi|40747301|gb|EAA66457.1| AN9390.2 [Aspergillus nidulans FGSC A4] gi|259488232|tpe|CBF87524.1| TPA: Chitinase [Aspergillus FGSC
  misc_feature (38)..(625): NCBI GI: 11321444 Blast Desc: AF314225_1 chitinase [Emericella nidulans]
  misc_feature (39)..(575): NCBI GI: 116208386 Blast Desc: CHGG_03486 [Chaetomium globosum CBS 148.51] gi|88184083|gb|EAQ91551.1| CHGG_03486 [Chaetomium globosum CBS 148.51]
  misc_feature (38)..(548): NCBI GI: 116201405 Blast Desc: CHGG_08587 [Chaetomium globosum CBS 148.51] gi|88177105|gb|EAQ84573.1| CHGG_08587 [Chaetomium globosum CBS 148.51]
  misc_feature (38)..(559): NCBI GI: 240111238 Blast Desc: Glycosyl hydrolases family 18 protein [Coccidioides posadasii C735 delta SOWgp]
  misc_feature (35)..(593): NCBI GI: 67516471 Blast Desc: AN0517.2 [Aspergillus nidulans FGSC A4] gi|40747460|gb|EAA66616.1| AN0517.2 [Aspergillus nidulans FGSC A4] gi|259489226|tpe|CBF89323.1| TPA: conserved [Aspergillus FGSC
MTHKIWLLLALVASVVALPRDDRLLSNNLARRDLPIGTCNPDTPCPNGACCGDNGLCGYSQLECGDGCHSNCDAKAACGVDGKPGSQNCPLNVCCSKFGFCGSTSDFCDVASGCQEGYGTCGDAPRPSCAGSQVAIEPEDLNLSGFTHINFAFAFFDPDSFEISPMDPNSGKLFSRFTALKDKYHGLQTWISVGGWSFTDPGPTQEAFSVMTSTSANRAKFIQALVRFMNQYGFDGIDLDWEYPQADDRGGQPNDMVNYVSLAKELKAGIGSKGLSMTLPTSFWYLQHFDVNALQNSVDWFNFMSYDLHGTWDADSKFIGPLLAPHTNLTEIDMGLDLLWRAGVKPEKVVLGLAWYGRSFTLKDPSCNTPNGVCQFNGGAKAGPCTDTIGILDYQEISDVVINNNLNPVWDKDAGVKWITWDSDQWISYDDQDTFQQKKDFASKRCLGGLMIWAMDQMNQAQSNGLGQAPGVTVDQQADAAQMSADQAAKLSCYATDCNEQCKSGTNEVAEVFGQPGQVSTRDRCSEGQYRTVCCNDGTTMGTCSWRGYRGMGMSCIQGCASGETEVITDTSVKNDGKEQTCNGGLQSVGDAAKDAAEAAAEQLALDVAAKAFCRVAVPALLAPLELAEDLIPIIGEILDIAEIAATPALIDLCVKGVEKEGKAEFKVFGKKHTLSFDKPKTIAQERPPSSSHPKESTSSECGSKRAPCLRHLSTFSANHPITTLHPGIQDRRCDGAKWPQACQHYESVINYHAILRDPGQRAYNPLTCPTTSRPNYRDGVQIVDVWSDQHVDSWWHGYMQESGLNCERDEYPPIGFWQDQNLHEQYIRMVAQDENEPAGAALFGLSFCGWRYNGDGIGRVPEVTNNHRSHTTRNIGGRVYDVYTGDVTTTQSTVRIAFINMPNDADDGLTANPCWPSRLVDDPGFALLTDDPWYIGNAQRHQTVGLYAHNPPLAITMNKPPMPGYQRRGVLYPRVEDMLADDGNNTRRLTDEELSDRGIHKCGTPNCRDEVADLAKDGINVVRPVRTPEDMAVDANPTPLVASGVIEATMPASVGSRADSFSQKPAKETGFML

SEQ ID NO: 33506 - DNA, 2838 bp, Muscodor strobelii
  misc_feature: SGI EST ID NO. CUFF.79241.1
  misc_feature: Variant of the nucleotide sequence at SEQ ID NO 33504
ccgagttcaaagtatttgggaagaagcatacactgtcgttcgataagccgaaaacaattgcacaggagcgacctccatcctcgtcccaccccaaggagtcgacgagctctgaatgtggaagtaaacgtgccccttgcctacgacacctgagtaccttttctgcaaatcatcccataacgacactgcatcctggaattcaggaccgacgatgtgacggagcgaagtggccacaggcatgccagcattatgagtccgtcatcaactaccacgcaatccttcgggatccggggcagcgagcctataaccctcttacgtgcccaacgacctctcgtcccaattatcgtgacggggtccagatagtcgacgtgtggagtgatcagcatgtggactcgtggtggcacgggtacatgcaggagtctgggcttaactgcgagcgtgacgaatacccaccgatcggattctggcaggatcaaaatctgcacgaacaatacatcagaatggtagcacaggacgagaatgagccagcaggagctgcactgtttggcttaagcttttgtggctggagatataacggtgacggtatcggccgggtccctgaagtaacaaacaaccaccgctcgcacaccacgaggaatatagggggaagagtgtacgacgtatacaccggtgatgtaactaccactcaaagcacggtccgcattgccttcatcaacatgccgaatgacgcggacgatggcttgaccgccaacccctgctggccgtcaaggctcgtggacgacccaggctttgctcttctcaccgatgatccttggtatatcggcaacgctcagcgtcaccagactgtgggattatatgcccacaatccaccgcttgccatcaccatgaacaagccaccgatgcctggttaccagcggagaggggttctgtatccgcgggtggaagacatgttagctgatgatggaaataacacacggcggctaacggatgaagagcttagcgaccgcggaattcacaagtgcggcacgccgaactgtcgagatgaagtggcggatctcgccaaagatggaatcaacgtggttaggcctgttaggactcccgaagacatggctgttgacgcaaatccgacccctttggtcgctagcggtgtgatagaggcgacaatgccagcttcggtgggcagtagagcagattcgttttcgcagaagcccgcaaaggaaacagggttcatgctctagcttatgcggcagtgcgcccgcgtcaccaatactcaccttggcgaaactcgtctagctcagctttacattgttctcgattaaagtggaagggccagccgttgcgttgaaatatcgagtacagaatctaggcagaatataagaattagcagtcattattagcacaaattagaccctgtcgtcaatcttactttgcccccttcgaggtattttcgttcttgggtgttccggagatccgacatagcttcagaagtaggagctaattcagcttgttctgctccgatctcttgcaagtcggcttcggactgatccacgtctgcagtgaactgtttgcgcatagtttcgctcgcgtcatcaaaagcatcgctaagaatgtcatcgagctcttggtcagatagcgccatctgtgattctgactcgtcactctcgctgtcgtcattgttgtgagcatcattgacatcatcatcgtcgtcgtcatcgacgtcctgtgtagcggcagtacctgaatgctcgatctgcttgtcgccaccatcggccaccgctgggacgtactccccgtcgtgaagaatgtactcctcttcgtcagaaaagggtattgcccgccgccaccacttcgcattagcccagttgccacggggattgtagacaggtatccacaaaagcttctcccatctagcctgccataattgaaagaactcgaccgctggcatggtagggaaacacatccatcggtcggccagagccatcacctcatagtcatcaaagcagccgccgggacccctgcttcccataattgaccattccgtgatagatccgacctgagcgtccaggaggagatcggtgccatcgcgagaatcgtgtacagtgagccagatgcaatgaggtggcgtcggctgcaactcatccatgcgggcaggatatagttctccgttgcagtaggtaatgcaagcggtatctggcgacagcatccatcccctgccctgggtcggattgcgaagatatggcagaaagcgtaacaactcgatgacttgatccgctttgccccttttgcggagctcctcggccccgacatcagaccagccgtctgggggaggcagcagaacagcgtcggcgttaatgtaaggcaggcgaacaatggagctgtagaattggcgaagcgccccggcgagctgttccgtgaaatcgctcatgatggcgacatataccgtactgtactgcgagtctgacgagaaatttgatgcgagacgatggagagggggatggaagaaaaagcaattggaaaaattgacaagaagcgaagaaatagaaagcgacagtccttgggcgggtttatgctgcgagtaagacccgacgaagcaacaagcgcccggcttttgagagttgtgcctacactaccgggcgcctaggttgaagtaagtcgtacttttccggaaagcttgcgtttaaaacgtttaggtactcagcgtcagtatcgcagaccttaaaaccatagcataaaattcttcaggccgtaagctcactataattacagcgcattagcgtatacctagctccattgaacgatagcgagtactaacagcataggccagctccggccagccggtgt

SEQ ID NO: 33507 - DNA, 2010 bp, Muscodor strobelii
  misc_feature: SGI cDNA ID NO. 571560
  misc_feature: Encodes the peptide sequence at SEQ ID NO 33508
atgtacccagatgtcaatccaacagctttggcttcagccctgggcttctcggcaacatgcctagcggcactcaatatcacagtcaactgcgaccctgatctctttcggatggttgggcaggtcgatatgttctattggagcactgaaaatatcacgagtctctgcaatgatgcgtgtattcagtcgagcagcgagtggatggatgccatttacgccgactgcaacccttcagatactattgccgtcgacaagaagcttgtgccagctgatacgattgccatccgctactcggatggtctcggtctggcatgcatgaccgatttcgaccttgatattcaaacctacgctattgctccaggatcgcctacatcgtcaggatcagctacattatcgagtacatcgactctcccttcggatactcccacggatataccgagtccaaacatcaccatgacattgagcaatggcacgggcaactttagttactgctggctcgggtcgcagaattggattggtcaggatccggacccggactgtgcagctgatccaacaaatgtgttctgctcagatccagattcgcagaagagaatggcgaacctatataacgacactatcctttgcagcaattgctttctcagcgtgctatggtggcggattaactcccccttcctaccagactcagactactccgactacctgatcgagcaataccaggacatcaaagacgtttgcaaagtgacaatgcctgaagcgctgatccgtgccttacccagctatgaggccgctccggcacctattatcctgccccccggcacggatcccaatgagaatgggaccattccgtcgggggacgggtgtagcggacaggaaatttcttcgcctgccactagaagggagtatacttcacctcaaacacctgagaaggtgtttattttgcccagtgattttagcgggaaagctagggttaagagggcttcgagtggtgcttgtgatggactttcgactgcttatggtgtgcctactggtggtatacaggttgctactggaagcgacgactgctccttcacatcatcccctatctgtgcacctcttgcgtgtaaaactgcacaggtcagtgaagggcagacatgtgcttcgattgcgagctctctatccatcagcgatatgaacatcacagtctctctattcctccaatggaatcccaacataatcggtctctgcgatactctagttcccggccaatatatatgcacaggaccacccggaggaggctactccctcccaccccccataaacggcaccgacacaacatcatccgaccaatcccggggcggccaaggtccccaaggcgtgactccctcgcccaacacaactctctctgcgccgtcacaggacggcatcgcctccaattgtatcgcgtttgcgtacgccgctgcgggagatacgtgctacgacatgtctacacggtttgggatctccctggcgcagatcacgacctggaatccggtactcaggtatccggacggacataattgtacgacacaattttggagtgggtatgattattgtgttggcgtacctgggagtagtaccactactactagcaaaactacaacaacgacgacgtcggtgttaccgttcccgacccaaagtgggattgatccgaattgcaacaaatatgccgaggccatgtctggcgattactgctaccagtttgcaagtgatcacaatatcacaacggaccagctttatgactggaacaagattttggggaccaatggtgcggattgtgcgaccatgtttcagtctgggtacgattattgtattggtgtcgcgacgaaaacgatctcaacaacccccacatcaacgacatcaacgccaataccgactcagacgggcctatcggctaattgtaacaagattgttgtggccaaagctggggactactgctatatgtttgcgcaggataatggtaaatacaccatccaactctctcttgtgttccgctag

SEQ ID NO: 33508 - protein, 669 aa, Muscodor strobelii
  misc_feature: SGI Peptide ID NO. 571560
  misc_feature (369)..(419): Pfam Id: PF01476 Pfam Desc: LysM domain
  misc_feature (1)..(664): NCBI GI: 169622603 Blast Desc: SNOG_14526 [Phaeosphaeria nodorum SN15] gi|111056946|gb|EAT78066.1| SNOG_14526 [Phaeosphaeria nodorum SN15]
  misc_feature (371)..(668): NCBI GI: 258570607 Blast Desc: [Uncinocarpus reesii 1704] gi|237904377|gb|EEP78778.1| [Uncinocarpus reesii 1704]
  misc_feature (375)..(655): NCBI GI: 238841622 Blast Desc: LysM domain-containing protein [Microsporum canis CBS 113480]
  misc_feature (391)..(669): NCBI GI: 238841745 Blast Desc: LysM domain-containing protein [Microsporum canis CBS 113480]
  misc_feature (371)..(662): NCBI GI: 238845302 Blast Desc: LysM domain-containing protein [Microsporum canis CBS 113480]
  misc_feature (460)..(658): NCBI GI: 145250217 Blast Desc: An15g00820 [Aspergillus niger] gi|134082138|emb|CAK42252.1| protein product [Aspergillus niger]
  misc_feature (371)..(663): NCBI GI: 238842262 Blast Desc: LysM domain-containing protein [Microsporum canis CBS 113480]
  misc_feature (357)..(655): NCBI GI: 238841622 Blast Desc: LysM domain-containing protein [Microsporum canis CBS 113480]
  misc_feature (371)..(658): NCBI GI: 67516523 Blast Desc: AN0543.2 [Aspergillus nidulans FGSC A4] gi|40747486|gb|EAA66642.1| AN0543.2 [Aspergillus nidulans FGSC A4] gi|259489198|tpe|CBF89272.1| TPA: [Aspergillus nidulans FGSC
  misc_feature (461)..(609): NCBI GI: 169622603 Blast Desc: SNOG_14526 [Phaeosphaeria nodorum SN15] gi|111056946|gb|EAT78066.1| SNOG_14526 [Phaeosphaeria nodorum SN15]
MYPDVNPTALASALGFSATCLAALNITVNCDPDLFRMVGQVDMFYWSTENITSLCNDACIQSSSEWMDAIYADCNPSDTIAVDKKLVPADTIAIRYSDGLGLACMTDFDLDIQTYAIAPGSPTSSGSATLSSTSTLPSDTPTDIPSPNITMTLSNGTGNFSYCWLGSQNWIGQDPDPDCAADPTNVFCSDPDSQKRMANLYNDTILCSNCFLSVLWWRINSPFLPDSDYSDYLIEQYQDIKDVCKVTMPEALIRALPSYEAAPAPIILPPGTDPNENGTIPSGDGCSGQEISSPATRREYTSPQTPEKVFILPSDFSGKARVKRASSGACDGLSTAYGVPTGGIQVATGSDDCSFTSSPICAPLACKTAQVSEGQTCASIASSLSISDMNITVSLFLQWNPNIIGLCDTLVPGQYICTGPPGGGYSLPPPINGTDTTSSDQSRGGQGPQGVTPSPNTTLSAPSQDGIASNCIAFAYAAAGDTCYDMSTRFGISLAQITTWNPVLRYPDGHNCTTQFWSGYDYCVGVPGSSTTTTSKTTTTTTSVLPFPTQSGIDPNCNKYAEAMSGDYCYQFASDHNITTDQLYDWNKILGTNGADCATMFQSGYDYCIGVATKTISTTPTSTTSTPIPTQTGLSANCNKIVVAKAGDYCYMFAQDNGKYTIQLSLVFR

SEQ ID NO: 33509 - DNA, 4904 bp, Muscodor strobelii
  misc_feature: SGI EST ID NO. CUFF.79198.0
  misc_feature: Variant of the nucleotide sequence at SEQ ID NO 33507
tgggagtgttgcagctagggtccttgagggtgaaagacctcccatactaaaaatacgccagtcagaatctcatcgaaacagcttaccgtctcggccgactcacccaagccaaacccagtactaccttctctggcttgacaccagctctccaaagcaaatcaaggcccatatcgatctcagtcagattggtatggggagcgagtagggggccgatgaatttggaatcagcgtcccatgttccatgaagatcctacttagtgtcagactgtaattactcaggatcacactctacttgtggcaattcatgcggttgactcacataagacatgaagttgaaccagtcgacagagttctggagagcgttcacgtcaaaatgttgcaggtaccagaagcttgtcggcagtgtcatagataagcctttgctgccaataccggcctttaactcctttgccaaggagacgtaattgaccatgtcattgggctggccacctcgatcatcagcttggggatactcccaatcaagatcaatccctagacatcgttcagtgaatactccctgtctcttggacttgggactgtctgaccatcaaatccatattggttcatgaacctaaccaaggcctggatgaatttggcacggttcgcagatgtcgaagtcatgacgctaaaggcttcttgtgttggtccaggatctgtgaaggaccagccaccaacagagatccacgtctgcaacccgtgatacttgtccttgagtgcggtgaatcggctgaagagcttgccagagtttgggtccataggactgatctcgaagctatcagggtcaaaaaaggcgaacgcaaagttaatatgcgtaaatccagacaggttgaggtcttccggctcaatggctgagcatttgcgtgttgcggaccacgattcatagtatccgatggtacgcttaccgacctgggagccagcacaggacggacgaggtgcatcgccgcaagttccgtatccttcctgacagcctgaagctacatcgcagaagtccgaggtgcttccacagaacctgaccggtctgttaggtactgttcgatccgtggaagccgtagcctagaaatcgagacttacccaaacttggaacagcacacattgagaggacaattctgggagcctggcttgccgtccactccacatgcggctttggcatcacagttggagtggcagccatcaccacactctagttgagaatagccgcataatccgttgtcgccacagcaagcgccgttggggcaaggagtgtcgggattacaagttccaatgggcagatctcttctcgcgaggttgtttgaaaggagtctatcgtctcgcggaagcgcaacaacagacgcaactaaagccaagagaagccaaatcttatgcgtcatcttaaatgctgaacgcatatgtgtggcggatgtcgacaagatcgatcaacttgaagcacaggtttttgatcaagcttcagccaagacaaggcttatgagggcggctgcgaggtataataaccacccctgagatttcacaaggtcagctttggtctgcgaaccagacatacttctggtacgcatgttgcctcgccgatgtactgacccccaggcgtgctccaagactcagtctaccatcgcttagccttgcactcctgaagcgttattttcaaagtgccgtctcatttccgtagtcgcctaatgctgacaatcctcacgggaccgaactttcccatcggatatgtcagccgcagttcttcattacactcaacttgtattgatgctgtccgcaagatgataccaatcatgaacagtcgcgcaaccctaaacatacgacgtatgtaagccttatgtagactaaccggaatggcgattgttgcgctgcacgtcagacttctagaccaggagcgttggatcaagctttccctgtcttggcgcttgaaccgaccagtggctgatgtatctagatgatactaccttacccctgatctaatgccttcgacccgtcgctcattcgctgagggccacacacccgcatgcttctgctgaccaggaaatacaccaatatcgcctcatatgttgcatcggagggtaatcaatatcacagaagcccgctgacgatgatgcaccggtgagatttttggatagagcatgtgcgaaattctgcggtatgatacgactctcatggagctcatggcattaaatgccgaagaacgccaagacaatacagggagtcagtcagcacgaggctggctttatcgtctatcaattcagatacatcctctgagctctgtgttggaaatataccatttgatatatgtctctcgaagccaagtacacgtccgcggcctctacctgtgaccatcggatgccctcaatgcatctttcccccgccttgttgactcgccttatacagccttcgactaatgtcatcaaaaatgttgcattctcagatcgtcttagccaagatggcgttgatactatcggcggcgtccgtcggggcgcagacattcaatatgtacccagatgtcaatccaacagctttggcttcagccctgggcttctcggcaacatgcctagcggcactgtgagtaaagcgcatcagttaagaacaggctggtcgggttaatatttcccgcagcaatatcacagtcaactgcgaccctgatctctttcggatggttgggcaggtcgatatgttctattggagcactgaaaatatcacgagtctctgcaatgatgcgtgtattcagtcgagcagcgagtggatggatgccatttacgccgactgcaacccttcagatactattgccgtcgacaagaagcttgtgccagctgatacgattgccatccgctactcggatggtctcggtctggcatgcatgaccgatttcgaccttgatattcaaacctacgctattgctccaggatcgcctacatcgtcaggatcagctacattatcgagtacatcgactctcccttcggatactcccacggatataccgagtccaaacatcaccatgacattgagcaatggcacgggcaactttagttactgctggctcgggtcgcagaattggattggtcaggatccggacccggactgtgcagctgatccaacaaatgtgttctgctcagatccagattcgcagaagagaatggcgaacctatataacgacactatcctttgcagcaattgctttctcagcgtgctatggtggcggattaactcccccttcctaccagactcagactactccgactacctgatcgagcaataccaggacatcaaagacgtttgcaaagtgacaatgcctgaagcgctgatccgtgccttacccagctatgaggccgctccggcacctattatcctgccccccggcacggatcccaatgagaatgggaccattccgtcgggggacgggtgtagcggacaggaaatttcttcgcctgccactagaagggagtatacttcacctcaaacacctgagaaggtgtttattttgcccagtgattttagcgggaaagctagggttaagagggcttcgagtggtgcttgtgatggactttcgactgcttatggtgtgcctactggtggtatacaggttgctactggaagcgacgactgctccttcacatcatcccctatctgtgcacctcttgcgtgtaaaactgcacaggtcagtgaagggcagacatgtgcttcgattgcgagctctctatccatcagcgatatgaacatcacagtctctctattcctccaatggaatcccaacataatcggtctctgcgatactctagttcccggccaatatatatgcacaggaccacccggaggaggctactccctcccaccccccataaacggcaccgacacaacatcatccgaccaatcccggggcggccaaggtccccaaggcgtgactccctcgcccaacacaactctctctgcgccgtcacaggacggcatcgcctccaattgtatcgcgtttgcgtacgccgctgcgggagatacgtgctacgacatgtctacacggtttgggatctccctggcgcagatcacgacctggaatccggtactcaggtatccggacggacataattgtacgacacaattttggagtgggtatgattattgtgttggcgtacctgggagtagtaccactactactagcaaaactacaacaacgacgacgtcggtgttaccgttcccgacccaaagtgggattgatccgaattgcaacaaatatgccgaggccatgtctggcgattactgctaccagtttgcaagtgatcacaatatcacaacggaccagctttatgactggaacaagattttggggaccaatggtgcggattgtgcgaccatgtttcagtctgggtacgattattgtattggtgtcgcgacgaaaacgatctcaacaacccccacatcaacgacatcaacgccaataccgactcagacgggcctatcggctaattgtaacaagattgttgtggccaaagctggggactactgctatatgtttgcgcaggataatgatatcagcacgacgcagctatatacttggaaccctattctcggtccgaatggcgagaattgctctacgcagttccaggctgggtatgggtattgcgttagtgtgaggagttaggtgtgcgctctttgcattgagcccgagcctaatggcacctgggcagcctgagatgtagaatgtcgccatttaaagtcaggcggacaatgatgatcctggcacatatgacgcgggagtctctaagccagtatacaaacaccctgcagagagccacagtagagagcacaatacgataacgatagataatattctagataggctcaggaaagcccaccccgataattggtaccttacttacataaac

SEQ ID NO: 33510 - DNA, 411 bp, Muscodor strobelii
  misc_feature: SGI cDNA ID NO. 571561
  misc_feature: Encodes the peptide sequence at SEQ ID NO 33511
actaagatcttctccggtcaagccgacggtttgcaatgccgcagcttggagatcttcgacagtctcggctttgcagacagggtctggaaagaggcgaatcacatgatcgagatatgcatgtggaatcccgacgccaacggtactattcatcgatcggacaggattccagacacagtcgtcgggctgtcgcggtttcaacaggtcactttgagtcagggtcggatcgagcgcttttttctcaataacatcaggaagtattccaagggcgccatccatgtcgagcgcgccgtcttgcccgagtcccttgaaatcgacgactcaaaacccggagacaactgtgcttatcccgttacagtgaagctacggcatttgtctgaagaggaagccacgccgcagcaacaagtcagcggc

SEQ ID NO: 33511 - protein, 137 aa, Muscodor strobelii
  misc_feature: SGI Peptide ID NO. 571561
  misc_feature (1)..(137): NCBI GI: 171683651 Blast Desc: protein product [Podospora anserina] gi|170941785|emb|CAP67439.1| protein product [Podospora anserina]
  misc_feature (1)..(134): NCBI GI: 256724396 Blast Desc: [Nectria haematococca mpVI 77-13-4]
  misc_feature (1)..(133): NCBI GI: 46133941 Blast Desc: FG09110.1 [Gibberella zeae PH-1]
  misc_feature (1)..(133): NCBI GI: 85104998 Blast Desc: NCU11294 [Neurospora crassa OR74A] gi|28923431|gb|EAA32615.1| NCU11294 [Neurospora crassa OR74A] gi|40882278|emb|CAF06102.1| phenol 2-monooxygenase [Neurospora
  misc_feature (1)..(134): NCBI GI: 70988883 Blast Desc: FAD monooxygenase [Aspergillus fumigatus Af293] gi|66846924|gb|EAL87255.1| FAD monooxygenase, [Aspergillus fumigatus Af293]
  misc_feature (1)..(137): NCBI GI: 46114714 Blast Desc: FG03199.1 [Gibberella zeae PH-1]
  misc_feature (1)..(136): NCBI GI: 256724174 Blast Desc: [Nectria haematococca mpVI 77-13-4]
  misc_feature (1)..(134): NCBI GI: 159128707 Blast Desc: FAD monooxygenase, [Aspergillus fumigatus A1163]
  misc_feature (1)..(133): NCBI GI: 189194177 Blast Desc: phenol 2-monooxygenase [Pyrenophora tritici-repentis Pt-1C-BFP] gi|187978991|gb|EDU45617.1| phenol 2-monooxygenase [Pyrenophora tritici-repentis Pt-1C-BFP]
  misc_feature (1)..(134): NCBI GI: 119497919 Blast Desc: FAD binding domain protein [Neosartorya fischeri NRRL 181] gi|119413881|gb|EAW23820.1| FAD binding domain protein [Neosartorya fischeri NRRL 181]
  misc_feature (1)..(133): SWISSPROT Homolog: EC 1.14.13.7 Phenol 2-monooxygenase
TKIFSGQADGLQCRSLEIFDSLGFADRVWKEANHMIEICMWNPDANGTIHRSDRIPDTVVGLSRFQQVTLSQGRIERFFLNNIRKYSKGAIHVERAVLPESLEIDDSKPGDNCAYPVTVKLRHLSEEEATPQQQVSG

SEQ ID NO: 33512 - DNA, 239 bp, Muscodor strobelii
  misc_feature: SGI EST ID NO. CUFF.79208.0
  misc_feature: Variant of the nucleotide sequence at SEQ ID NO 33510
tcggacaggattccagacacagtcgtcgggctgtcgcggtttcaacaggtcactttgagtcagggtcggatcgagcgcttttttctcaataacatcaggaagtattccaagggcgccatccatgtcgagcgcgccgtcttgcccgagtcccttgaaatcgacgactcaaaacccggagacaactgtgcttatcccgttacagtgaagctacggcatttgtctgaagaggaagccacgcc

SEQ ID NO: 33513 - DNA, 933 bp, Muscodor strobelii
  misc_feature: SGI cDNA ID NO. 571562
  misc_feature: Encodes the peptide sequence at SEQ ID NO 33514
atggcaatcagttcaatatacaggcgcctcgattcgttctctactatcgcctccctacctcccgagtcagatgttacggcgactattcattacaacaaggcattgagacaggtcgctgtgacgaaagatctcgacatcgacacggtattgttgttgtcgatcctattcacatgcatcgagttcctccgaggcaatatctccgctgccattgcacactgccgccatggtatacacatcattcaatctgccgggttgacaacgtcacccaatacggcggcaatctaccgtcaccttggcatcttcccttatttcttcggtgccacgccggatgagttcccagacgtagagtctgcgctgggccgtcccagtctgttgttcagtaacatgcagggagccgctgaggctctagatgagcttatgacacgtggcatgagactgattcgcgagtttgaatcgtggcagcatctttgtaggcccagcgatgagaagaaagcatcatcgccgccatcatccctcttttccgcgcagcaagatctttttcaagacatggagaaatggtatagtcgattttcggtcgttacaaagcaaccacaggcaacaagcaacgagagccgatcagcataccggattctagaggcgagatggctcatcgctaaagtattcacagggatagcaacataccgggacgaaacgatgcgcgataaatacctccctgcgttcgagcggattgttgagctggcgaaggaagaaaaagaggactcctgcagaggagagaaaccgaagaaaaacagcagtgtacaagaaaaaccccgcatcttcaggttcagcatgggcatgtcgcctttgctctccttcgtggcaagcagatgccgcgtcttgcgcgtgaggctagaagcactgcaactgctcagcgaactggcatatattagggag

SEQ ID NO: 33514 - protein, 311 aa, Muscodor strobelii
  misc_feature: SGI Peptide ID NO. 571562
  misc_feature (1)..(311): NCBI GI: 261358238 Blast Desc: conserved [Verticillium albo-atrum VaMs.102]
  misc_feature (27)..(311): NCBI GI: 39941334 Blast Desc: MGG_05578 [Magnaporthe grisea 70-15] gi|145022250|gb|EDK06270.1| MGG_05578 [Magnaporthe grisea 70-15]
  misc_feature (1)..(311): NCBI GI: 256726744 Blast Desc: NECHADRAFT_103320 [Nectria haematococca mpVI 77-13-4]
  misc_feature (21)..(311): NCBI GI: 46122695 Blast Desc: FG05725.1 [Gibberella zeae PH-1]
  misc_feature (1)..(311): NCBI GI: 256735679 Blast Desc: NECHADRAFT_75777 [Nectria haematococca mpVI 77-13-4]
  misc_feature (27)..(311): NCBI GI: 85112958 Blast Desc: NCU09739 [Neurospora crassa OR74A] gi|28926223|gb|EAA35205.1| [Neurospora crassa OR74A]
  misc_feature (1)..(311): NCBI GI: 46127085 Blast Desc: FG07920.1 [Gibberella zeae PH-1]
  misc_feature (1)..(311): NCBI GI: 261353736 Blast Desc: [Verticillium albo-atrum VaMs.102]
  misc_feature (14)..(311): NCBI GI: 39969373 Blast Desc: MGG_10297 [Magnaporthe grisea 70-15] gi|149211209|ref|XP_001522979.1| MGCH7_ch7g1065 [Magnaporthe grisea 70-15] gi|86197020|gb|EAQ71658.1| MGCH7_ch7g1065 grisea
  misc_feature (1)..(311): NCBI GI: 256728059 Blast Desc: NECHADRAFT_46033 [Nectria haematococca mpVI 77-13-4]
MAISSIYRRLDSFSTIASLPPESDVTATIHYNKALRQVAVTKDLDIDTVLLLSILFTCIEFLRGNISAAIAHCRHGIHIIQSAGLTTSPNTAAIYRHLGIFPYFFGATPDEFPDVESALGRPSLLFSNMQGAAEALDELMTRGMRLIREFESWQHLCRPSDEKKASSPPSSLFSAQQDLFQDMEKWYSRFSVVTKQPQATSNESRSAYRILEARWLIAKVFTGIATYRDETMRDKYLPAFERIVELAKEEKEDSCRGEKPKKNSSVQEKPRIFRFSMGMSPLLSFVASRCRVLRVRLEALQLLSELAYIRE

SEQ ID NO: 33515 - DNA, 543 bp, Muscodor strobelii
  misc_feature: SGI EST ID NO. CUFF.79210.0
  misc_feature: Variant of the nucleotide sequence at SEQ ID NO 33513
cgccggatgagttcccagacgtagagtctgcgctgggccgtcccagtctgttgttcagtaacatgcagggagccgctgaggctctagatgagcttatgacacgtggcatgagactgattcgcgagtttgaatcgtggcagcatctttgtaggcccagcgatgagaagaaagcatcatcgccgccatcatccctcttttccgcgcagcaagatctttttcaagacatggagaaatggtatagtcgattttcggtcgttacaaagcaaccacaggcaacaagcaacgagagccgatcagcataccggattctagaggcgagatggctcatcgctaaagtattcacagggatagcaacataccgggacgaaacgatgcgcgataaatacctccctgcgttcgagcggattgttgagctggcgaaggaagaaaaagaggactcctgcagaggagagaaaccgaagaaaaacagcagtgtacaagaaaaaccccgcatcttcaggttcagcatgggcatgtcgcctttgctctccttcgtggcaagca

SEQ ID NO: 33516 - DNA, 384 bp, Muscodor strobelii
  misc_feature: SGI cDNA ID NO. 571563
  misc_feature: Encodes the peptide sequence at SEQ ID NO 33517
atgacctggtctctttggacactccctgccgaactctcccctccactcatggatgatcgcgtgattgacgggatggaagagatcaatgccaatgtctacgagccgacttctaggattgatactacccgcttcgtcaccaacctgcgcattcacatcgaggggaatgggactgaagcaaaggtgtcggcctcgactctcgctcaacattatcgccagggcacaggacgccaacctggcgcaccatggctattggccggtgtgccttgcgttatctaccttgtcaaagacgccgagggtggcctatggaggattaagaggtttcaaatgagtcctaaatgggtcgaaggagatatgacagttatcactagacgaggaagcacctga

SEQ ID NO: 33517 - protein, 127 aa, Muscodor strobelii
  misc_feature: SGI Peptide ID NO. 571563
  misc_feature (17)..(122): NCBI GI: 212541783 Blast Desc: conserved [Penicillium marneffei ATCC 18224] gi|210065953|gb|EEA20046.1| conserved [Penicillium marneffei ATCC 18224]
  misc_feature (17)..(124): NCBI GI: 121709286 Blast Desc: conserved [Aspergillus clavatus NRRL 1] gi|119400521|gb|EAW10946.1| conserved [Aspergillus clavatus NRRL 1]
  misc_feature (17)..(121): NCBI GI: 169766252 Blast Desc: [Aspergillus oryzae RIB40] gi|238482957|ref|XP_002372717.1| conserved [Aspergillus flavus NRRL3357] gi|83765452|dbj|BAE55595.1| protein product oryzae]
  misc_feature (20)..(117): NCBI GI: 254577921 Blast Desc: ZYRO0A13552p [Zygosaccharomyces rouxii] gi|238937836|emb|CAR26014.1| ZYRO0A13552p [Zygosaccharomyces rouxii]
  misc_feature (17)..(121): NCBI GI: 119474083 Blast Desc: NFIA_003760 [Neosartorya fischeri NRRL 181] gi|119407070|gb|EAW17020.1| conserved [Neosartorya fischeri NRRL 181]
  misc_feature (21)..(122): NCBI GI: 121704369 Blast Desc: conserved [Aspergillus clavatus NRRL 1] gi|119398593|gb|EAW09022.1| conserved [Aspergillus clavatus NRRL 1]
  misc_feature (22)..(122): NCBI GI: 254586779 Blast Desc: ZYRO0G22572p [Zygosaccharomyces rouxii] gi|238941851|emb|CAR30024.1| ZYRO0G22572p [Zygosaccharomyces rouxii]
  misc_feature (39)..(121): NCBI GI: 256733786 Blast Desc: NECHADRAFT_77282 [Nectria haematococca mpVI 77-13-4]
  misc_feature (20)..(125): NCBI GI: 145236134 Blast Desc: protein product [Aspergillus niger] gi|134075166|emb|CAK96479.1| protein product [Aspergillus niger]
  misc_feature (17)..(117): NCBI GI: 242820111 Blast Desc: conserved [Talaromyces stipitatus ATCC 10500] gi|218713914|gb|EED13338.1| conserved [Talaromyces stipitatus ATCC 10500]
MTWSLWTLPAELSPPLMDDRVIDGMEEINANVYEPTSRIDTTRFVTNLRIHIEGNGTEAKVSASTLAQHYRQGTGRQPGAPWLLAGVPCVIYLVKDAEGGLWRIKRFQMSPKWVEGDMTVITRRGST

SEQ ID NO: 33518 - DNA, 5406 bp, Muscodor strobelii
  misc_feature: SGI cDNA ID NO. 571564
  misc_feature: Encodes the peptide sequence at SEQ ID NO 33519
atgcacactagtacacactctctgctatgtgtagcagttctcctcagccatgtctttgccctgcctagctctcattttccggcagtggctgacgtagagctcagggacaacggagaaatatgtgtgccaatttctccagacatcgactccttcaagagcttagttgcgaagccaaaaccttcaccaggaacgtgtccaagtccaaattactatctatcctcaacaccattgctgttcaaaagacaagctggtggaaccatagaagactactcgtgcgacgagaacagaccatgttccaacggtgcatgctgcgcaaaatccggcttctgtggctatggcccggatagctgtggcgatggtactacgcctaacgataagtgctggagcaattgtgatgcgaaagctgaatgtggccgttatgcgaaagagcctggcacggagtgtcccttgaaagtatgctgtagtcaatatggcttttgtggcacaacggaagacttttgcgccaagactggcaattcgaacacgacatgccagtcaaattgcgatcagccaggatctggctcctccggcggcgatgtccaatctcgtatcgtaggatactacgaggcgtggaactggaagaagaactgcattggaatgcagctgaaagatattccagtgtcaagtatcacacatctgcactactcatttgcctacattgcacctgacagctatgagatcaccaccatggatggcacagtgccaacagagcttttctcgcagttcacagctttgaggaagcagaacccagatctaaaagttattgtctcgatcggaggatggacatttaatgacaacaagactacgacgcagccagtctttggcgacattgccggaagctctggaaatcgagctaagttcatcgacaatttgcttgactttatgcagaactatggttttgatggtgttgacttcgattgggaatatcctggggctggcgatcgtggaggtcatgatgatgatggagtcaactacacaaagctgctcagtgacttgcgtgacaagttcagcggagtgatcagtttcactgctcctacatcatattggtatttacggcatttcgacctcctcgctatgacaaaacatgttgattggatcaacgtcatggcttacgatcttcatgggacttgggatagctcagatccgatagggaatcacgtcttggcccataccaatttgacggaaatcaagctcgcattggacttgtactggcgtaattcaatacctcccgagaagcttaacctgggtcttggcttctatggtcgttcgtttcaactttccgatcctggatgttaccagccaggatgtcttttcaaaggtggtgcatcaccgggaccttgcactgataactctggtactctgtcatatcgggagatcatggatgtaatcgcggacaatcaactcacgccccattatgataaagagaatcaggtgaagtacataacgtggaaatcggatcaatgggtcagctacgatgaccaagagacgttccaagccaagatcaagttcgcaaacaaattgggcttgggcggccttttgatctggtcccttgaccaggacaccgcgcagttggatgctctggcaggtgtgatttatccgaaggcgttgggttccatcggagctgaggccgaaggagccgacaactgggaagatgcaggagggggtgactgccgtgtgacggaatgtggcactactggctgcaagactggagaagtactcatggataccgtccagtgtgatggcaagggaaaagagaactccatttgctgcccctttgcctcggcccctgacgcgaagacatgcacctggcgcggaggtgcaccgctatgtaatggccgatgtcactctggagaagtagccttagcttcaagtctgtggggcagtggcgatcactgcaacgacggcaggaaattctattgctgtccagctacgcgcgacgtcccagattgtcgatggaccgactgcggcgagagctgcaattcagacgagaataagctcacgtgggcggaagaagcgtgttggtccggcgagcaaagcttctgctgtagcaaggatcaagactggaagaactgtgagtggtacggcaaaggcggaagttgtttcgatgaccattgcccaacaggacattccgtttctctcaccacgagttacgaaggcgaaggtacagattgcggttggcatttcgaaagagagcgctccttctgctgcgacccgccggatggcgattcacccttcttgcctgtgcctttggactatctgtttcccaatcctccacaaggtgatgatgtcgacaccaagttcgatcttaagctcgatcctatatatggaggctcagctcccctttcctttggcgacgaccccaacgatgcggagtttgggttcattgtgcttgcatccccggaagagatccaaacttcgctggatgcccgagatggctcgcactgggaggtcttcgattgttttgatgataagagcgaagaagcgcagaccgttaggatgatgtgtaccgatcattcagaaaatagtacctgtaacaaaatccatctcggctacggtccacctggaaccattgtcgaaatgccgaaggggtgtggtccgggtcgctatgctgtcgtgaaagagatggccgaatcacgcaatcaggggttgccaaaacatcttgtcaagcgagcagtgccgcattccacgatatatgatttgacattcgactatgacttctctcgagtccctcgtgacttaggcgatactcaaatgcgcatcgactattcgaacgagccaggatactgggacaaagtagtcgataaagctgcaagcaaacgcaaacgctcactagataccttcgatggcaatcatagacggtggctcgaagacgcttggcgggaggatcaggccaatgttcatgccagttacctctctcacgatgaacttcacaagcgatggttcggtagtgatattgttgattggctgaagggcatcatcaatggagtcaccgatgtgccaattgtctcgaatagttattccgacgattatacaatcattctattgaacgaagtcgtccagggatgcccgattggccctgccggtaccacggtctccgggaaactggacgttcgggcatcgacgcatgttgaactgagtaccaatttcggcttcacgctgatcacaacactgagcactggaagtgttagtttcaagaattcctatctttacttcaacaacaagggcaaagtcagtgccaagtttaccgcagacgcggtagcgaccgctcagttcgatagtggcgacaagaagcttctatcggcggaccagttcggggcggcatttgctgtgccgggtatcgttaccatcggacccaacttccagctcttcggtcaagtcaaaggtcaagttaccttgggtgcctacttcgaggcaaatgtgaacctcgcagagtggaacgttcgtcagacgtatcccgaccagggtgcggactgggaccccgaaagtgaggcgaaccctgaccgcgacggcacacaggaactgctctcgcctgaatggatgtacggagtctcggcatcaggttttgtagaactccatgtaaagccaacaatcacttttggtgttgacttcaataagaacttcatcaagactgatggtgtcaacgtcaatcttgtggctgatggatggattcgcttccatgctgatgcaagccatgacggagactcgagcggtgggcaatcgagctcgttctgttatggcatcgatgctggagcagatctatacgcaactatcaaggcaccaagcttcaacggatggactttggcaaagtctccgtttcccattgcttcgagtgatccaattcagatcgtaccgaaaacatgtccgatatcaacgcgcgacctcggtggcattgatgattccatccttcttgatggctctgacactttacctctgccgcgatggaacgatagcagtcatcagcgctttgcaagaacccagatggagacgaggaatcatctagctttaagagatgatgttgggactcttcgtgagttcaagaagcgcagtcagccatatggtcctgtgatccggctcggtattcaatgtccgacgggaaataatgggggtggcacatcacccggaccttgcccgctatgcgatactgaaccgataagccgcagagatgatggcgattcgtgtattgtcgtaagtgggcgctcagatgagagcagttgccaggctgatattctggacacgcgcgacatcgacatcctgtcagatgcatggggttccgaaaatatcagtgatatccgcgcatcagctggattgaaggccggcataggggcgcgtagcttgtggaagcgtggatcaaagtccaatgactggaacctcgatcccggcggcacaaaccaggttgtcagcatcagtttcaatacctatcccgaatgtaacaaacaaaacacaaacggcataactaaatggtatggcttcgatgagcagggacaatcaacaccaaattgcccaacggacattaccaagttcgcctctaatcaagtcgctacaaatatgtatcaaacggatcatatcttggaaacccagacaatcatccaattctttgatttcctacgtgggggaggtcaattcgccaacaaagtcttcatccaaatgccaaacgggtatacgccagcgagcagcgcatgggtgaatgatgtgttgctgaattggcaaggtggaaattttccagtccagaatataaacggccacagtgtattggagctcatcacgaacaatgctataggcgactcgtcatcggctggtcgaggccgcatggcactgctctataaaggtgtcaacaatgacaagggccagtttttcaggttcggcacacttggaacattggacgctacgggcagagtacgagcatcgaaaatcatccagcgaaataccgccggagtctttggctacatgcgtcatgccatgatcgcacccaagttccaagcctctggtcaagcagtcgaggctgctcttgcagcttttgatgccgcatacaactggggaagtgcaccgggagacgagccaggcaggccagcgggaggaaaccggggtctgcgcgacttgtgggcatactggattgatgtgtatctcgcaacgatagaagcaaatgctgcgacatgggcaggtcaagcagcgacagctatgcagggcctctctacttctccgaacgatgaagccgctaactgggtggctgcgttcttcggaaatggaggggccggaaatgtgctccaattctcccaaccaaatccagggagtcaggtcggccgaagcggtgtgaacgtgccgaggagtcgatacgcgatgtggacgacagcaagtggcccatggacataa

SEQ ID NO: 33519 - protein, 1801 aa, Muscodor strobelii
  misc_feature: SGI Peptide ID NO. 571564
  misc_feature (134)..(181): Pfam Id: PF00187 Pfam Desc: Chitin recognition protein
  misc_feature (195)..(533): Pfam Id: PF00704 Pfam Desc: Glycosyl hydrolases family 18
  misc_feature (135)..(181): Pfam Id: PF00187 Pfam Desc: Chitin recognition protein
  misc_feature (28)..(1751): NCBI GI: 156056204 Blast Desc: SS1G_05454 [Sclerotinia sclerotiorum 1980] gi|154703238|gb|EDO02977.1| SS1G_05454 [Sclerotinia sclerotiorum 1980]
  misc_feature (7)..(1293): NCBI GI: 116201405 Blast Desc: CHGG_08587 [Chaetomium globosum CBS 148.51] gi|88177105|gb|EAQ84573.1| CHGG_08587 [Chaetomium globosum CBS 148.51]
  misc_feature (88)..(1381): NCBI GI: 119189427 Blast Desc: CIMG_04761 [Coccidioides immitis RS]
  misc_feature (88)..(1381): NCBI GI: 240111238 Blast Desc: Glycosyl hydrolases family 18 protein [Coccidioides posadasii C735 delta SOWgp]
  misc_feature (78)..(1125): NCBI GI: 261361013 Blast Desc: chitotriosidase-1 [Verticillium albo-atrum VaMs.102]
  misc_feature (90)..(674): NCBI GI: 256728462 Blast Desc: NECHADRAFT_53983 [Nectria haematococca mpVI 77-13-4]
  misc_feature (568)..(1314): NCBI GI: 212533997 Blast Desc: PMAA_076690 [Penicillium marneffei ATCC 18224] gi|210072519|gb|EEA26608.1| PMAA_076690 [Penicillium marneffei ATCC 18224]
  misc_feature (88)..(680): NCBI GI: 38349543 Blast Desc: chitinase 5 [Coccidioides posadasii]
  misc_feature (74)..(749): NCBI GI: 115386434 Blast Desc: [Aspergillus terreus NIH2624] gi|114190756|gb|EAU32456.1| [Aspergillus terreus NIH2624]
  misc_feature (89)..(552): NCBI GI: 67537814 Blast Desc: AN5077.2 [Aspergillus nidulans FGSC A4] gi|40740982|gb|EAA60172.1| AN5077.2 [Aspergillus nidulans FGSC A4] gi|259482041|tpe|CBF76139.1| TPA: conserved [Aspergillus FGSC
MHTSTHSLLCVAVLLSHVFALPSSHFPAVADVELRDNGEICVPISPDIDSFKSLVAKPKPSPGTCPSPNYYLSSTPLLFKRQAGGTIEDYSCDENRPCSNGACCAKSGFCGYGPDSCGDGTTPNDKCWSNCDAKAECGRYAKEPGTECPLKVCCSQYGFCGTTEDFCAKTGNSNTTCQSNCDQPGSGSSGGDVQSRIVGYYEAWNWKKNCIGMQLKDIPVSSITHLHYSFAYIAPDSYEITTMDGTVPTELFSQFTALRKQNPDLKVIVSIGGWTFNDNKTTTQPVFGDIAGSSGNRAKFIDNLLDFMQNYGFDGVDFDWEYPGAGDRGGHDDDGVNYTKLLSDLRDKFSGVISFTAPTSYWYLRHFDLLAMTKHVDWINVMAYDLHGTWDSSDPIGNHVLAHTNLTEIKLALDLYWRNSIPPEKLNLGLGFYGRSFQLSDPGCYQPGCLFKGGASPGPCTDNSGTLSYREIMDVIADNQLTPHYDKENQVKYITWKSDQWVSYDDQETFQAKIKFANKLGLGGLLIWSLDQDTAQLDALAGVIYPKALGSIGAEAEGADNWEDAGGGDCRVTECGTTGCKTGEVLMDTVQCDGKGKENSICCPFASAPDAKTCTWRGGAPLCNGRCHSGEVALASSLWGSGDHCNDGRKFYCCPATRDVPDCRWTDCGESCNSDENKLTWAEEACWSGEQSFCCSKDQDWKNCEWYGKGGSCFDDHCPTGHSVSLTTSYEGEGTDCGWHFERERSFCCDPPDGDSPFLPVPLDYLFPNPPQGDDVDTKFDLKLDPIYGGSAPLSFGDDPNDAEFGFIVLASPEEIQTSLDARDGSHWEVFDCFDDKSEEAQTVRMMCTDHSENSTCNKIHLGYGPPGTIVEMPKGCGPGRYAVVKEMAESRNQGLPKHLVKRAVPHSTIYDLTFDYDFSRVPRDLGDTQMRIDYSNEPGYWDKVVDKAASKRKRSLDTFDGNHRRWLEDAWREDQANVHASYLSHDELHKRWFGSDIVDWLKGIINGVTDVPIVSNSYSDDYTIILLNEVVQGCPIGPAGTTVSGKLDVRASTHVELSTNFGFTLITTLSTGSVSFKNSYLYFNNKGKVSAKFTADAVATAQFDSGDKKLLSADQFGAAFAVPGIVTIGPNFQLFGQVKGQVTLGAYFEANVNLAEWNVRQTYPDQGADWDPESEANPDRDGTQELLSPEWMYGVSASGFVELHVKPTITFGVDFNKNFIKTDGVNVNLVADGWIRFHADASHDGDSSGGQSSSFCYGIDAGADLYATIKAPSFNGWTLAKSPFPIASSDPIQIVPKTCPISTRDLGGIDDSILLDGSDTLPLPRWNDSSHQRFARTQMETRNHLALRDDVGTLREFKKRSQPYGPVIRLGIQCPTGNNGGGTSPGPCPLCDTEPISRRDDGDSCIVVSGRSDESSCQADILDTRDIDILSDAWGSENISDIRASAGLKAGIGARSLWKRGSKSNDWNLDPGGTNQVVSISFNTYPECNKQNTNGITKWYGFDEQGQSTPNCPTDITKFASNQVATNMYQTDHILETQTIIQFFDFLRGGGQFANKVFIQMPNGYTPASSAWVNDVLLNWQGGNFPVQNINGHSVLELITNNAIGDSSSAGRGRMALLYKGVNNDKGQFFRFGTLGTLDATGRVRASKIIQRNTAGVFGYMRHAMIAPKFQASGQAVEAALAAFDAAYNWGSAPGDEPGRPAGGNRGLRDLWAYWIDVYLATIEANAATWAGQAATAMQGLSTSPNDEAANWVAAFFGNGGAGNVLQFSQPNPGSQVGRSGVNVPRSRYAMWTTASGPWT

SEQ ID NO: 33520 - DNA, 2151 bp, Muscodor strobelii
  misc_feature: SGI cDNA ID NO. 571565
  misc_feature: Encodes the peptide sequence at SEQ ID NO 33521
atgcattcaccacactcgttcgcgtctttcatttgcgccttgacctatattggtctactacgctttactacggcgcaatcgttccaatatgtgttcaacgactctctacccgctgttgaccttacagaggactgcagtacggccctcacgagcgacatcgcatgcaatccatgggtcgctcatttccggtccagcgggtattatgatcccaacgggttgaaaagcgtgtgcacttcagactgccagcaagctatcaaagactaccaatctagtctcaggagtagttgtaagggattgacttataactacaccgataccacgtatcttcccattgaggccatcggggctagactggatcacacctactcgctcgtctgtttgcaggatagcggtcggttttgtaattatgtggcgtatgaagcttcattgcaagcggatcccgatgcgccggctatccttggacagccaaacagcaccgatgtcatatcaagttgtgatagttgtcttgtaaaacaactacaactagaagcaggatccgcattcgacggtggtgatgacctagcagatgcttacagttcacttacgagcagctgctctgtgactggtatgccaatcactacaacaacgttttcttcaagtactgtgtcaaccgccccgtcagcaactccaacttgttctgatagtacatatcaagtcgcgtcaactgatacctgccgctcaatcgcagagagtcaggggatcagtgtgggatggcttgtaattgacaatagtttgagtgcatattgtgccggtttcaatgcaactggatcgctctgtatccaggacacatgcacgacatataccgtcaaggccaatgatacttgttcctcaatcgctaaagacaaaaatgtgactatgtctcaaatcatcagctggaatccgatatttgactcatcatgtagcaatattggactctcattaaacgacagtatttgcgtcagcaagccagggaaaccttacgctagcccgacagtgacaatacccgttgtgacaagcttcacgacggctgcaccagcaccaagtgatattgcgacaaacaccactgagaattgtggagaattttacgaagtgcaaaagggtgactactgcaatctagtctgtctcaagttcaacatcaatctagttgatttcctcttcctcaacccagctgtcaatgaaaactgcactaatctgtttgctgaggagagttactgtgtcgcgccagttggcagtcttaccgactaccctggatatcctggatatgtagcacccgtcaatgcgacactcacatctgcgtgggaagatgcgccgaaagcgacttatattccgccggacttgaacattacagatagcactcctcttgctaccgggacgcgcacggactgttgggcgtttacgaacggtaatatcctacagatacctattaatggaacgttttacgattcgacttgccagctcgtagcttcaacatacggcatatcgctagatctgttgcaaaattgctcaagttgcgcattcgatccagctttgcgttactgtcttattgcatacgacccatcacaggctaccgggtcccagccgacgacgtccgcaactcctgatgacattcgatctggaacatggacgaactgtactgcctatctcgatgtcaacttcggcatgtcgtgtcaaactatcctcgataactatggtttgacaatcgagcagttcagcacgtggaacccagaggtaggcgcacagtgtgagaacttgtgggaagactatcgatactgcgtgtctttgacaaagagtcttgatgaagctggtggtggtggcaatgggggtgatgactccggtaccacgactatcactgcaactcctaccaccgggccaacaacctcgtcgacaatcagtacgactactactagcagcacggcggccgcgccttcgcctacgcaggataatagtatcatcagtagctgcaacaagtatgcgaaagcggccgatggcgattactgttatattttcgcgcagaataatggtatcacagttgatcagctcgcgcagtggaatgctgttctcggcgccgcgggagcgaactgtgatacggagttttggttggggtattattattgtgttggtatctcgtcgtag

SEQ ID NO: 33521 - protein, 716 aa, Muscodor strobelii
  misc_feature: SGI Peptide ID NO. 571565
  misc_feature (280)..(327): Pfam Id: PF01476 Pfam Desc: LysM domain
  misc_feature (280)..(307): Pfam Id: PF01476 Pfam Desc: LysM domain
  misc_feature (1)..(715): NCBI GI: 119189425 Blast Desc: CIMG_04760 [Coccidioides immitis RS]
  misc_feature (1)..(715): NCBI GI: 240111239 Blast Desc: LysM domain containing protein [Coccidioides posadasii C735 delta SOWgp]
  misc_feature (27)..(602): NCBI GI: 256728284 Blast Desc: NECHADRAFT_87919 [Nectria haematococca mpVI 77-13-4]
  misc_feature (31)..(716): NCBI GI: 261361012 Blast Desc: LysM domain-containing protein [Verticillium albo-atrum VaMs.102]
  misc_feature (191)..(714): NCBI GI: 116201407 Blast Desc: CHGG_08588 [Chaetomium globosum CBS 148.51] gi|88177106|gb|EAQ84574.1| CHGG_08588 [Chaetomium globosum CBS 148.51]
  misc_feature (25)..(715): NCBI GI: 238504336 Blast Desc: muramidase, [Aspergillus flavus NRRL3357] gi|220690870|gb|EED47219.1| muramidase, [Aspergillus flavus NRRL3357]
  misc_feature (51)..(417): NCBI GI: 156056202 Blast Desc: SS1G_05453 [Sclerotinia sclerotiorum 1980] gi|154703237|gb|EDO02976.1| SS1G_05453 [Sclerotinia sclerotiorum 1980]
  misc_feature (14)..(712): NCBI GI: 115386436 Blast Desc: [Aspergillus terreus NIH2624] gi|114190757|gb|EAU32457.1| [Aspergillus terreus NIH2624]
  misc_feature (25)..(599): NCBI GI: 169764417 Blast Desc: [Aspergillus oryzae RIB40] gi|83764534|dbj|BAE54678.1| protein product [Aspergillus oryzae]
  misc_feature (230)..(712): NCBI GI: 121719560 Blast Desc: LysM domain protein [Aspergillus clavatus NRRL 1] gi|119404677|gb|EAW15053.1| LysM domain protein [Aspergillus clavatus NRRL 1]
MHSPHSFASFICALTYIGLLRFTTAQSFQYVFNDSLPAVDLTEDCSTALTSDIACNPWVAHFRSSGYYDPNGLKSVCTSDCQQAIKDYQSSLRSSCKGLTYNYTDTTYLPIEAIGARLDHTYSLVCLQDSGRFCNYVAYEASLQADPDAPAILGQPNSTDVISSCDSCLVKQLQLEAGSAFDGGDDLADAYSSLTSSCSVTGMPITTTTFSSSTVSTAPSATPTCSDSTYQVASTDTCRSIAESQGISVGWLVIDNSLSAYCAGFNATGSLCIQDTCTTYTVKANDTCSSIAKDKNVTMSQIISWNPIFDSSCSNIGLSLNDSICVSKPGKPYASPTVTIPVVTSFTTAAPAPSDIATNTTENCGEFYEVQKGDYCNLVCLKFNINLVDFLFLNPAVNENCTNLFAEESYCVAPVGSLTDYPGYPGYVAPVNATLTSAWEDAPKATYIPPDLNITDSTPLATGTRTDCWAFTNGNILQIPINGTFYDSTCQLVASTYGISLDLLQNCSSCAFDPALRYCLIAYDPSQATGSQPTTSATPDDIRSGTWTNCTAYLDVNFGMSCQTILDNYGLTIEQFSTWNPEVGAQCENLWEDYRYCVSLTKSLDEAGGGGNGGDDSGTTTITATPTTGPTTSSTISTTTTSSTAAAPSPTQDNSIISSCNKYAKAADGDYCYIFAQNNGITVDQLAQWNAVLGAAGANCDTEFWLGYYYCVGISS

SEQ ID NO: 33522 - DNA, 512 bp, Muscodor strobelii
  misc_feature: SGI EST ID NO. CUFF.79247.0
  misc_feature: Variant of the nucleotide sequence at SEQ ID NO 33520
aaaaatgtgactatgtctcaaatcatcagctggaatccgatatttgactcatcatgtagcaatattggactctcattaaacgacagtatttgcgtcagcaagccagggaaaccttacgctagcccgacagtgacaatacccgttgtgacaagcttcacgacggctgcaccagcaccaagtgatattgcgacaaacaccactgagaattgtggagaattttacgaagtgcaaaagggtgactactgcaatctagtctgtctcaagttcaacatcaatctagttgatttcctcttcctcaacccagctgtcaatgaaaactgcactaatctgtttgctgaggagagttactgtgtcgcgccagttggcagtcttaccgactaccctggatatcctggatatgtagcacccgtcaatgcgacactcacatctgcgtgggaagatgcgccgaaagcgacttatattccgccggacttgaacattacagatagcactcctcttgctaccgggacgcg

SEQ ID NO: 33523 - DNA, 2070 bp, Muscodor strobelii
  misc_feature: SGI cDNA ID NO. 571566
  misc_feature: Encodes the peptide sequence at SEQ ID NO 33524
atgcattcaccacactcgttcgcgtctttcatttgcgccttgacctatattggtctactacgctttactacggcgcaatcgttccaatatgtgttcaacgactctctacccgctgttgaccttacagaggactgcagtacggccctcacgagcgacatcgcatgcaatccatgggtcgctcatttccggtccagcgggtattatgatcccaacgggttgaaaagcgtgtgcacttcagactgccagcaagctatcaaagactaccaatctagtctcaggagtagttgtaagggattgacttataactacaccgataccacgtatcttcccattgaggccatcggggctagactggatcacacctactcgctcgtctgtttgcaggatagcggtcggttttgtaattatgtggcgtatgaagcttcattgcaagcggatcccgatgcgccggctatccttggacagccaaacagcaccgatgtcatatcaagttgtgatagttgtcttgtaaaacaactacaactagaagcaggatccgcattcgacggtggtgatgacctagcagatgcttacagttcacttacgagcagctgctctgtgactgacaatagtttgagtgcatattgtgccggtttcaatgcaactggatcgctctgtatccaggacacatgcacgacatataccgtcaaggccaatgatacttgttcctcaatcgctaaagacaaaaatgtgactatgtctcaaatcatcagctgtatgtgtcttatcttactcgttcccaatgatactacgcccgtaaacagtcttagagctaacgataggactacgaaagggaatccgatatttgactcatcatgtagcaatattggactctcattaaacgacagtatttgcgtcagcaagccagggaaaccttacgctagcccgacagtgacaatacccgttgtgacaagcttcacgacggctgcaccagcaccaagtgatattgcgacaaacaccactgagaattgtggagaattttacgaagtgcaaaagggtgactactgcaatctagtctgtctcaagttcaacatcaatctagttgatttcctcttcctcaacccagctgtcaatgaaaactgcactaatctgtttgctgaggagagttactgtgtcgcgccagttggcagtcttaccgactaccctggatatcctggatatgtagcacccgtcaatgcgacactcacatctgcgtgggaagatgcgccgaaagcgacttatattccgccggacttgaacattacagatagcactcctcttgctaccgggacgcgcacggactgttgggcgtttacgaacggtaatatcctacagatacctattaatggaacgttttacgattcgacttgccagctcgtagcttcaacatacggcatatcgctagatctgttgcaaaattgctcaagttgcgcattcgatccagctttgcgttactgtcttattgcatacgacccatcacaggctaccgggtcccagccgacgacgtccgcaactcctgatgacattcgatctggaacatggacgaactgtactgcctatctcgatgtcaacttcggcatgtcgtgtcaaactatcctcgataactatggtttgacaatcgagcagttcagcacgtggaacccagaggtaggcgcacagtgtgagaacttgtgggaagactatcgatactgcgtgtctttgacaaagagtcttgatgaagctggtggtggtggcaatgggggtgatgactccggtaccacgactatcactgcaactcctaccaccgggccaacaacctcgtcgacaatcagtacgactactactagcagcacggcggccgcgccttcgcctacgcaggataatagtatcatcagtagctgcaacaagtatgcgaaagcggccgatggcgattactgttatattttcgcgcagaataatggtatcacagttgatcagctcgcgcagtggaatgctgttctcggcgccgcgggagcgaactgtgatacggagttttggttggggtattattattgtgttggtatctcgtcgtag

SEQ ID NO: 33524 - protein, 689 aa, Muscodor strobelii
  misc_feature: SGI Peptide ID NO. 571566
  misc_feature (227)..(251): Pfam Id: PF01476 Pfam Desc: LysM domain
  misc_feature (1)..(688): NCBI GI: 119189425 Blast Desc: CIMG_04760 [Coccidioides immitis RS]
  misc_feature (1)..(688): NCBI GI: 240111239 Blast Desc: LysM domain containing protein [Coccidioides posadasii C735 delta SOWgp]
  misc_feature (27)..(575): NCBI GI: 256728284 Blast Desc: NECHADRAFT_87919 [Nectria haematococca mpVI 77-13-4]
  misc_feature (31)..(689): NCBI GI: 261361012 Blast Desc: LysM domain-containing protein [Verticillium albo-atrum VaMs.102]
  misc_feature (200)..(687): NCBI GI: 116201407 Blast Desc: CHGG_08588 [Chaetomium globosum CBS 148.51] gi|88177106|gb|EAQ84574.1| CHGG_08588 [Chaetomium globosum CBS 148.51]
  misc_feature (25)..(688): NCBI GI: 238504336 Blast Desc: muramidase, [Aspergillus flavus NRRL3357] gi|220690870|gb|EED47219.1| muramidase, [Aspergillus flavus NRRL3357]
  misc_feature (51)..(390): NCBI GI: 156056202 Blast Desc: SS1G_05453 [Sclerotinia sclerotiorum 1980] gi|154703237|gb|EDO02976.1| SS1G_05453 [Sclerotinia sclerotiorum 1980]
  misc_feature (14)..(685): NCBI GI: 115386436 Blast Desc: [Aspergillus terreus NIH2624] gi|114190757|gb|EAU32457.1| [Aspergillus terreus NIH2624]
  misc_feature (224)..(689): NCBI GI: 67537812 Blast Desc: AN5076.2 [Aspergillus nidulans FGSC A4] gi|40740981|gb|EAA60171.1| AN5076.2 [Aspergillus nidulans FGSC A4] gi|259482042|tpe|CBF76141.1| TPA: LysM domain protein, FGSC
  misc_feature (203)..(685): NCBI GI: 121719560 Blast Desc: LysM domain protein [Aspergillus clavatus NRRL 1] gi|119404677|gb|EAW15053.1| LysM domain protein [Aspergillus clavatus NRRL 1]
MHSPHSFASFICALTYIGLLRFTTAQSFQYVFNDSLPAVDLTEDCSTALTSDIACNPWVAHFRSSGYYDPNGLKSVCTSDCQQAIKDYQSSLRSSCKGLTYNYTDTTYLPIEAIGARLDHTYSLVCLQDSGRFCNYVAYEASLQADPDAPAILGQPNSTDVISSCDSCLVKQLQLEAGSAFDGGDDLADAYSSLTSSCSVTDNSLSAYCAGFNATGSLCIQDTCTTYTVKANDTCSSIAKDKNVTMSQIISCMCLILLVPNDTTPVNSLRANDRTTKGNPIFDSSCSNIGLSLNDSICVSKPGKPYASPTVTIPVVTSFTTAAPAPSDIATNTTENCGEFYEVQKGDYCNLVCLKFNINLVDFLFLNPAVNENCTNLFAEESYCVAPVGSLTDYPGYPGYVAPVNATLTSAWEDAPKATYIPPDLNITDSTPLATGTRTDCWAFTNGNILQIPINGTFYDSTCQLVASTYGISLDLLQNCSSCAFDPALRYCLIAYDPSQATGSQPTTSATPDDIRSGTWTNCTAYLDVNFGMSCQTILDNYGLTIEQFSTWNPEVGAQCENLWEDYRYCVSLTKSLDEAGGGGNGGDDSGTTTITATPTTGPTTSSTISTTTTSSTAAAPSPTQDNSIISSCNKYAKAADGDYCYIFAQNNGITVDQLAQWNAVLGAAGANCDTEFWLGYYYCVGISS

SEQ ID NO: 33525 - DNA, 456 bp, Muscodor strobelii
  misc_feature: SGI EST ID NO. CUFF.79250.0
  misc_feature: Variant of the nucleotide sequence at SEQ ID NO 33523
gcaaaattggtgagtttgcaatattgatctcgtgttgtagctagaaacttgtctcactagattaggaatccatctttggatacaaatagctcaagttgcgcattcgatccagctttgcgttactgtcttattgcatacgacccatcacaggctaccgggtcccagccgacgacgtccgcaactcctgatgacattcgatctggaacatggacgaactgtactgcctatctcgatgtcaacttcggcatgtcgtgtcaaactatcctcgataactatggtttgacaatcgagcagttcagcacgtggaacccagaggtaggcgcacagtgtgagaacttgtgggaagactatcgatactgcgtgtctttgacaaagagtcttgatgaagctggtggtggtggcaatgggggtgatgactccggtaccacgactatcactgcaactcctaccaccggg

SEQ ID NO: 33526 - DNA, 555 bp, Muscodor strobelii
  misc_feature: SGI cDNA ID NO. 571567
  misc_feature: Encodes the peptide sequence at SEQ ID NO 33527
atggtttgccttcaggcaatcacacgtttcaagattgcaagtatggtgcctgagagtggccatatctcatatagcgacattgtaggcaagacttgcatgtcagagcccgttcttagacgtcttcagtacgcgatgacattgcatgtatttcgcgagtctgaacctggaatggttagccacaccaaattcgccaggtttttggtaaacaaccagatgaacgactgggtgagtgccggtgccgaagaagcatggccatcagttacaagaatggttgatgccctggagaaatggccagagtcccaggagcccaacgaaactggattcgctctcgcaaataatacgaccgacaccatctacgacgtgatggcagccaatccagcccgggcccagagattcgccaatagcatggtggcaaataccgcaaaccctagctacgatactattcatgccgcgaaccactacgactgggccaatttgggcaaagctacaatcattgacgttggcgtcgggatggtcatattgccattgaactactcaggcattttgatgatctaa

SEQ ID NO: 33527 - protein, 184 aa, Muscodor strobelii
  misc_feature: SGI Peptide ID NO. 571567
  misc_feature (3)..(168): NCBI GI: 116206014 Blast Desc: CHGG_02300 [Chaetomium globosum CBS 148.51] gi|88182897|gb|EAQ90365.1| CHGG_02300 [Chaetomium globosum CBS 148.51]
  misc_feature (1)..(168): NCBI GI: 171677656 Blast Desc: protein product [Podospora anserina] gi|170936896|emb|CAP61555.1| protein product [Podospora anserina]
  misc_feature (2)..(168): NCBI GI: 156030706 Blast Desc: SS1G_14292 [Sclerotinia sclerotiorum 1980] gi|154700683|gb|EDO00422.1| SS1G_14292 [Sclerotinia sclerotiorum 1980]
  misc_feature (3)..(168): NCBI GI: 238841485 Blast Desc: sterigmatocystin 8-O-methyltransferase [Microsporum canis CBS 113480]
  misc_feature (4)..(168): NCBI GI: 238507580 Blast Desc: O-methyltransferase, [Aspergillus flavus NRRL3357] gi|220688510|gb|EED44862.1| O-methyltransferase, [Aspergillus flavus NRRL3357]
  misc_feature (1)..(168): NCBI GI: 242800307 Blast Desc: O-methyltransferase, [Talaromyces stipitatus ATCC 10500] gi|218716905|gb|EED16326.1| O-methyltransferase, [Talaromyces stipitatus ATCC 10500]
  misc_feature (1)..(172): NCBI GI: 67538490 Blast Desc: AN5415.2 [Aspergillus nidulans FGSC A4] gi|40743385|gb|EAA62575.1| AN5415.2 [Aspergillus nidulans FGSC A4] gi|259485140|tpe|CBF81948.1| TPA: O-methyltransferase, FGSC
  misc_feature (2)..(168): NCBI GI: 189208266 Blast Desc: sterigmatocystin 8-O-methyltransferase precursor [Pyrenophora tritici-repentis Pt-1C-BFP] gi|187976559|gb|EDU43185.1| sterigmatocystin precursor Pt-1C-BFP]
  misc_feature (1)..(168): NCBI GI: 212536596 Blast Desc: O-methyltransferase, [Penicillium marneffei ATCC 18224] gi|210070853|gb|EEA24943.1| O-methyltransferase, [Penicillium marneffei ATCC 18224]
  misc_feature (4)..(168): NCBI GI: 149209215 Blast Desc: MGCH7_ch7g100 [Magnaporthe grisea 70-15] gi|86196055|gb|EAQ70693.1| MGCH7_ch7g100 [Magnaporthe grisea 70-15]
MVCLQAITRFKIASMVPESGHISYSDIVGKTCMSEPVLRRLQYAMTLHVFRESEPGMVSHTKFARFLVNNQMNDWVSAGAEEAWPSVTRMVDALEKWPESQEPNETGFALANNTTDTIYDVMAANPARAQRFANSMVANTANPSYDTIHAANHYDWANLGKATIIDVGVGMVILPLNYSGILMI

SEQ ID NO: 33528 - DNA, 987 bp, Muscodor strobelii
  misc_feature: SGI cDNA ID NO. 571568
  misc_feature: Encodes the peptide sequence at SEQ ID NO 33529
atggacggtctgctcgcgaaggcgctgtgcaaggccttcgaggaccttgagtcatgggtgtcgccaaccatgcacaagggcttgaagcagatcgagagcatcatggcgtcgatagccctatcccaacatcagaccacccgcagccgtcgcgcctcggtcgccaaccccgcactcgagcctgagccgtcgcgcaacatcaaggacatcacgactgtcaccaccgatcctgcctttgaggagttctttcgctcgcaggagtcgtttgagctcaactgcgccggccccgtaattagggctctcgatcacctcattgccatcgaccgtgacggcgagcaggacatggttatactcagcgccatcaacgtcctccagggcctcatcttcctgcacccgcccaccaagtccatcttcacgcgaccctattacatgaatctgctcctcgaacctcttaaaggagacaagtatccgccggtcgtccaaactactaccattgagctccttatcaacctgcttaatggcattcccgccaacgcccgtacgctcgagaacattgacggtctcttcatcttgacggagatgttcatggccctttatactgcgaaggctgtcaaatccaagcttgtcgaccttctttacctttatctcatgcccgagacgccgtccatcccgtctgccaatggccgccgtaacaacgtccctgccttgctgaacagatccccgtccaagctcgccaaggcattttcccctcgccctcgtcgggataatggacgcgacatgaatgcggatggtgataagatcacgcgtacgcctgaggagaaggagaagattctgggtggttatctgaacgatggatgggacggaggaaagaccagagtgcagcagctgcttaaggacctgcgcacacagtacaacccctttggtggtgtcttttctgaggaagagagtggcgatgctggagaagaaggcgatggacgcaatggaggatga

SEQ ID NO: 33529 - protein, 328 aa, Muscodor strobelii
  misc_feature: SGI Peptide ID NO. 571568
  misc_feature (1)..(307): Pfam Id: PF08045 Pfam Desc: Cell division control protein 14, SIN component
  misc_feature (8)..(307): Pfam Id: PF08045 Pfam Desc: Cell division control protein 14, SIN component
  misc_feature (9)..(308): NCBI GI: 156044022 Blast Desc: SS1G_10114 [Sclerotinia sclerotiorum 1980] gi|154694503|gb|EDN94241.1| SS1G_10114 [Sclerotinia sclerotiorum 1980]
  misc_feature (9)..(308): NCBI GI: 154304941 Blast Desc: BC1G_09056 [Botryotinia fuckeliana B05.10] gi|150853918|gb|EDN29110.1| BC1G_09056 [Botryotinia fuckeliana B05.10]
  misc_feature (9)..(311): NCBI GI: 170674504 Blast Desc: cell division control protein [Epichloe festucae]
  misc_feature (9)..(309): NCBI GI: 226280624 Blast Desc: cell division control protein [Paracoccidioides brasiliensis Pb01]
  misc_feature (4)..(309): NCBI GI: 225557928 Blast Desc: cell division control protein [Ajellomyces capsulatus G186AR]
  misc_feature (4)..(309): NCBI GI: 240272924 Blast Desc: cell division control protein [Ajellomyces capsulatus H143]
  misc_feature (9)..(309): NCBI GI: 154271676 Blast Desc: conserved [Ajellomyces capsulatus NAm1] gi|150409361|gb|EDN04811.1| conserved [Ajellomyces capsulatus NAm1]
  misc_feature (9)..(309): NCBI GI: 261198603 Blast Desc: cell division control protein 14 [Ajellomyces dermatitidis SLH14081] gi|239594855|gb|EEQ77436.1| cell division control protein 14 [Ajellomyces dermatitidis SLH14081] cell 14
  misc_feature (9)..(309): NCBI GI: 46137169 Blast Desc: FG10100.1 [Gibberella zeae PH-1]
  misc_feature (9)..(309): NCBI GI: 119495311 Blast Desc: cell division control protein 14 [Neosartorya fischeri NRRL 181] gi|119412605|gb|EAW22546.1| cell division control protein 14 [Neosartorya fischeri NRRL 181]
MDGLLAKALCKAFEDLESWVSPTMHKGLKQIESIMASIALSQHQTTRSRRASVANPALEPEPSRNIKDITTVTTDPAFEEFFRSQESFELNCAGPVIRALDHLIAIDRDGEQDMVILSAINVLQGLIFLHPPTKSIFTRPYYMNLLLEPLKGDKYPPVVQTTTIELLINLLNGIPANARTLENIDGLFILTEMFMALYTAKAVKSKLVDLLYLYLMPETPSIPSANGRRNNVPALLNRSPSKLAKAFSPRPRRDNGRDMNADGDKITRTPEEKEKILGGYLNDGWDGGKTRVQQLLKDLRTQYNPFGGVFSEEESGDAGEEGDGRNGG

SEQ ID NO: 33530 - DNA, 2039 bp, Muscodor strobelii
  misc_feature: SGI EST ID NO. CUFF.79348.1
  misc_feature: Variant of the nucleotide sequence at SEQ ID NO 33528
gtggactctggggttacgcggttacatatcgataagaaacgcgcgctgtgttgctgtgtcgacaagccttccccagacaattgggcgccactgtcaacacgctaggataaagtgcttgcattgtcgtcgatttgattcttctttctccaggaacatcctcgccgaccatgatacccctttgcgcctgcgcattctcttctcgccacttgtattaacagttccttcttgtcgccgtttttccgccgctttcatctgattttgtcctcgccgtctccctcccgcattacacctacatcacgcgccactgtatcactgaatcacgatggacggtctgctcgcgaaggcgctgtgcaaggccttcgaggaccttgagtcatgggtgtcgccaaccatgcacaagggcttgaagcagatcgagagcatcatggcgtcgatagccctatcccaacatcagaccacccgcagccgtcgcgcctcggtcgccaaccccgcactcgagcctgagccgtcgcgcaacatcaaggacatcacgactgtcaccaccgatcctgcctttgaggagttctttcgctcgcaggagtcgtttgagctcaactgcgccggccccgtaattagggctctcgatcacctcattgccatcgaccgtgacggcgagcaggacatggttatactcagcgccatcaacgtcctccagggcctcatcttcctgcacccgcccaccaagtccatcttcacgcgaccctattacatgaatctgctcctcgaacctcttaaaggagacaagtatccgccggtcgtccaaactactaccattgagctccttatcaacctgcttaatggcattcccgccaacgcccgtacgctcgagaacattgacggtctcttcatcttgacggagatgttcatggccctttatactgcgaaggctgtcaaatccaagcttgtcgaccttctttacctttatctcatgcccgagacgccgtccatcccgtctgccaatggccgccgtaacaacgtccctgccttgctgaacagatccccgtccaagctcgccaaggcattttcccctcgccctcgtcgggataatggacgcgacatgaatgcggatggtgataagatcacgcgtacgcctgaggagaaggagaagattctgggtggttatctgaacgatggatgggacggaggaaagaccagagtgcagcagctgcttaaggacctgcgcacacagtacaacccctttggtggtgtcttttctgaggaagagagtggcgatgctggagaagaaggcgatggacgcaatggaggatgattgtctgttggccttccgtttgttgtctttgcgtttgttcttgttggtttaggcgttaggttacggattgaagaataatggactggaatgggatggagttcaatacccatgatagcacagcaagcaagtaatgcaataattgatgttcagttttctctgaaaagtcattcatcagggtttcgagggctcatatgggcatatacctgagccctgtattcaacctcatttggaaggagatggagggtcacgaatcgatgtgactatcatcaccaccgctaccttgtaatacaacaccatacatcatctcaatgacttttggccgtaatgagagtgctgagatctgacattgcgatggtggaacgcttgatatcaatgatgctgtagcgaaggcttacgacgctccatgaaattaaaataatcgcgcacgtagacatcgggaatcgcagctgtacttagaactgatttgacattgaaatgacgctttcttgactgtgtcctaggtcactgctacggaatggtcaacggaatgaacttttgtcgtgaacagcctacgtcagtttgaacttgtaatagaaagctcgatgcatctagtattcatgcatgcaatgaatactcttccaaagagacatttggcgcgaggcttgtaccacgatccgatatcgaaatggaataacgccgggcatgaatatatcgtggcagtggtgtgcatgtctgaagggtcacatcgggt

SEQ ID NO: 33531 - DNA, 756 bp, Muscodor strobelii
  misc_feature: SGI cDNA ID NO. 571569
  misc_feature: Elevated expression when VOC is produced
  misc_feature: Encodes the peptide sequence at SEQ ID NO 33532
atggcggtagttgctgtgactttggatcgtctgcctgacaatggatctgggtcgctctcaagcggcgcgaaagccggtataggagtgggcgttgtggtcattgctgctaccatcatcggtctggtgacgtggtttgccctgcgccagcgaagtcgaaaatcacgacatgccaatacgaatggcacaggtgctgagatggaacaaaacaatttcttaccagatatggcagacacagtagcaccgggcggccgccgtagatcatatggcactgcgcccttctcgccatgggcgcgatctacagcattctctgacgacacagagccaacgatctcctccgcacgtccaccgcttcatgaacacggtcgtgcatatgattacttcggtcctgatgcagtagttgggccatacacgacgagagaagacgaagacagaggtgccacacctggaaatgcgattacgccacccatgagtgatggaagtgggcggattggtggaacgccttataatcccgatcatatagtaagaccagtggagattggagaaagtgaagcaaagagagaggaaaaggagattggaaaggttgatgttaagcaaattgcatctgatcataaggaagacacagaacaggggcatcaaactggtccgtatgagctggccgggagtcctggacatgcatcgcctttggactctgatgttgtgagtccgatggagaagggaccatctccgctgcctggaggaggaggggagaaggaataa

SEQ ID NO: 33532 - protein, 251 aa, Muscodor strobelii
  misc_feature: SGI Peptide ID NO. 571569
  misc_feature (19)..(242): NCBI GI: 85098950 Blast Desc: NCU01426 [Neurospora crassa OR74A] gi|28922210|gb|EAA31458.1| [Neurospora crassa OR74A] gi|28949984|emb|CAD70869.1| conserved [Neurospora crassa]
  misc_feature (8)..(179): NCBI GI: 256731793 Blast Desc: NECHADRAFT_25809 [Nectria haematococca mpVI 77-13-4]
  misc_feature (19)..(188): NCBI GI: 154304939 Blast Desc: BC1G_09055 [Botryotinia fuckeliana B05.10] gi|150853917|gb|EDN29109.1| BC1G_09055 [Botryotinia fuckeliana B05.10]
  misc_feature (19)..(190): NCBI GI: 156065675 Blast Desc: SS1G_00848 [Sclerotinia sclerotiorum 1980] gi|154691707|gb|EDN91445.1| SS1G_00848 [Sclerotinia sclerotiorum 1980]
  misc_feature (15)..(53): NCBI GI: 238837765 Blast Desc: SH3 domain-containing protein [Microsporum canis CBS 113480]
  misc_feature: Useful for introducing or modulating the production of volatile compounds
MAVVAVTLDRLPDNGSGSLSSGAKAGIGVGVVVIAATIIGLVTWFALRQRSRKSRHANTNGTGAEMEQNNFLPDMADTVAPGGRRRSYGTAPFSPWARSTAFSDDTEPTISSARPPLHEHGRAYDYFGPDAVVGPYTTREDEDRGATPGNAITPPMSDGSGRIGGTPYNPDHIVRPVEIGESEAKREEKEIGKVDVKQIASDHKEDTEQGHQTGPYELAGSPGHASPLDSDVVSPMEKGPSPLPGGGGEKE

SEQ ID NO: 33533 - DNA, 1317 bp, Muscodor strobelii
  misc_feature: SGI cDNA ID NO. 571570
  misc_feature: Encodes the peptide sequence at SEQ ID NO 33534
atgtctttcattgaggacagtaaacaatggggcccgtacatggtagctgccgccgtggcttatatccttttttgcactgcaatgcgggacagccagagacgcgcgatagagagagagttcaacttcagagataaggcgtcgcttgttcatatgacactcgagcaagctcatgcaattcagacttggctggcggaacaaatgttccccttaactttctccgcctctctgttctttgcgctcttcaaagtagggacgcattgctacattcaaagcttgattagtatgctgaccaatctgcagacatatagcatcccgtcaatctccagtctgcttgctactactcggcagttcggcaagcccggtgacatcgaagctgcttctaaacgggcggcagataccagcgtgttgcttacaaacatgatcatgcgaccccccggatcactccaagcaaggctggctgtcgcacgaaccaattatcttcataatgtccatcgtcgtgcaggacgcatctcgaatgatgatatgctgtacacattaagcttgttcacgcttgagcctatgcgttggacggctaagtatgagtggcgaccattgactgatatggaatgctgcgcgatggctacatgcttcaaggtctggggcgaggatcttcagatctcgtatgagcctttgccttcatacactaaaggatggacggacggacttcattggcttgacgagttggatacttggagccgacggtatgaggctgaacacgtcgagacttcggactcaaacattgaggtggcgaatgcaactaaagagctcgtattatgccaagtaccacgcaacttgcgcaatctcgtctggggtgtcgttgcgatccttcttggtccctcggtccagaaagctatgagcataccaaatccgcctcgtcgtctccaatatggactggactttgtgattgctatcaggaagttcattcttcgttacgcctttccgccacgcccttatctcttgcgacgtatatacaatgatgagaagccccatccagtcacacacagatatcaatctataagatggcttgggcgaccttggtatgtcaagacatctcttttcgaccgatggggactcgctgcatggttattatggatcaatggcaataagacaagtatggtttttgacaacagcaagttcttggctgaaggatatctgcttgatgatgtcgggcctgcgaaccgtgttggcaaaggttacgatgagatgtatgagaatacatcggctcttgcgtccaagagccaatcgcggtgtcctttctcgaatactcgaggaatttga

SEQ ID NO: 33534 - protein, 438 aa, Muscodor strobelii
  misc_feature: SGI Peptide ID NO. 571570
  misc_feature (11)..(432): NCBI GI: 70995398 Blast Desc: conserved [Aspergillus fumigatus Af293] gi|66850090|gb|EAL90417.1| conserved [Aspergillus fumigatus Af293]
  misc_feature (11)..(433): NCBI GI: 240109808 Blast Desc: CPC735_033130 [Coccidioides posadasii C735 delta SOWgp]
  misc_feature (11)..(432): NCBI GI: 159131210 Blast Desc: conserved [Aspergillus fumigatus A1163]
  misc_feature (11)..(433): NCBI GI: 119184205 Blast Desc: CIMG_06926 [Coccidioides immitis RS]
  misc_feature (11)..(432): NCBI GI: 119495804 Blast Desc: NFIA_014740 [Neosartorya fischeri NRRL 181] gi|119412841|gb|EAW22782.1| conserved [Neosartorya fischeri NRRL 181]
  misc_feature (12)..(432): NCBI GI: 255937467 Blast Desc: Pc13g13460 [Penicillium chrysogenum Wisconsin 54-1255] gi|211584380|emb|CAP92415.1| Pc13g13460 [Penicillium chrysogenum Wisconsin 54-1255]
  misc_feature (9)..(432): NCBI GI: 121701813 Blast Desc: conserved [Aspergillus clavatus NRRL 1] gi|119397314|gb|EAW07745.1| conserved [Aspergillus clavatus NRRL 1]
  misc_feature (3)..(432): NCBI GI: 226291376 Blast Desc: conserved [Paracoccidioides brasiliensis Pb18]
  misc_feature (12)..(432): NCBI GI: 238839098 Blast Desc: conserved [Microsporum canis CBS 113480]
  misc_feature (13)..(432): NCBI GI: 67518041 Blast Desc: AN1187.2 [Aspergillus nidulans FGSC A4] gi|40747149|gb|EAA66305.1| AN1187.2 [Aspergillus nidulans FGSC A4] gi|259488494|tpe|CBF87972.1| TPA: conserved [Aspergillus FGSC
MSFIEDSKQWGPYMVAAAVAYILFCTAMRDSQRRAIEREFNFRDKASLVHMTLEQAHAIQTWLAEQMFPLTFSASLFFALFKVGTHCYIQSLISMLTNLQTYSIPSISSLLATTRQFGKPGDIEAASKRAADTSVLLTNMIMRPPGSLQARLAVARTNYLHNVHRRAGRISNDDMLYTLSLFTLEPMRWTAKYEWRPLTDMECCAMATCFKVWGEDLQISYEPLPSYTKGWTDGLHWLDELDTWSRRYEAEHVETSDSNIEVANATKELVLCQVPRNLRNLVWGVVAILLGPSVQKAMSIPNPPRRLQYGLDFVIAIRKFILRYAFPPRPYLLRRIYNDEKPHPVTHRYQSIRWLGRPWYVKTSLFDRWGLAAWLLWINGNKTSMVFDNSKFLAEGYLLDDVGPANRVGKGYDEMYENTSALASKSQSRCPFSNTRGI

SEQ ID NO: 33535 - DNA, 1512 bp, Muscodor strobelii
  misc_feature: SGI EST ID NO. CUFF.79272.0
  misc_feature: Variant of the nucleotide sequence at SEQ ID NO 33533
tgttgatgtacgtatatttcatttgttcacgaatgcctccggctggcttgataatcatacactcaatattcggagatgtctttcattgaggacagtaaacaatggggcccgtacatggtagctgccgccgtggcttatatccttttttgcactgcaatgcgggacagccagagacgcgcgatagagagagagttcaacttcagagataaggcgtcgcttgttcatatgacactcgagcaagctcatgcaattcagacttggctggcggaacaaatgttccccttaactttctccgcctctctgttctttgcgctcttcaaagtagggacgcattgctacattcaaagcttgattagtatgctgaccaatctgcagacatatagcatcccgtcaatctccagtctgcttgctactactcggcagttcggcaagcccggtgacatcgaagctgcttctaaacgggcggcagataccagcgtgttgcttacaaacatgatcatgcgaccccccggatcactccaagcaaggctggctgtcgcacgaaccaattatcttcataatgtccatcgtcgtgcaggacgcatctcgaatgatgatatgctgtacacattaagcttgttcacgcttgagcctatgcgttggacggctaagtatgagtggcgaccattgactgatatggaatgctgcgcgatggctacatgcttcaaggtctggggcgaggatcttcagatctcgtatgagcctttgccttcatacactaaaggatggacggacggacttcattggcttgacgagttggatacttggagccgacggtatgaggctgaacacgtcgagacttcggactcaaacattgaggtggcgaatgcaactaaagagctcgtattatgccaagtaccacgcaacttgcgcaatctcgtctggggtgtcgttgcgatccttcttggtccctcggtccagaaagctatgagcataccaaatccgcctcgtcgtctccaatatggactggactttgtgattgctatcaggaagttcattcttcgttacgcctttccgccacgcccttatctcttgcgacgtatatacaatgatgagaagccccatccagtcacacacagatatcaatctataagatggcttgggcgaccttggtatgtcaagacatctcttttcgaccgatggggactcgctgcatggttattatggatcaatggcaataagacaagtatggtttttgacaacagcaagttcttggctgaaggatatctgcttgatgatgtcgggcctgcgaaccgtgttggcaaaggttacgatgagatgtatgagaatacatcggctcttgcgtccaagagccaatcgcggtgtcctttctcgaatactcgaggaatttgagtactgaacggaatttgttatcttgtcggcccagttcggaatgaatattgcgtcacaggatctcgtgagttgataaacttgcagttcttgatctttctgtagatttgacgcggaagtttc

SEQ ID NO: 33536 - DNA, 930 bp, Muscodor strobelii
  misc_feature: SGI cDNA ID NO. 571571
  misc_feature: Encodes the peptide sequence at SEQ ID NO 33537
atgaaagccctaggccagcccaaatggattcttacacatggattatatgctgatagtggcggttttcaactacacacacaaagctacaatcctttccccatcacagcggagcagatagcttatcttgtcgagcatggcaaccgcgagactaaagtcctagcatttatacaagcaggccggcttatcacaagacttatcgcaagagcagcgcagaagctacaaattaccccttatgaacttactactgtcgcacttctcgtgtgctcattcacgacactcattctttggtggcacaagcctctagatgtccgctctccaacgccagtgtttctaaagcagcaattgaagactgcagaagataaagtttatggcaaacctgatgacttgatttgccatgggttgtttaaagatacgcctcttgattttatcgaggataacatctactggtcgaggaaagcccatgagcctcttctacagatggtcttgagatgggaacttcagacaactccacttgacaggataccaaatgatagagactaccaccctcgaaacctcaggcagaatctgtatctagtactccctgtatctgccttcggcgccatccacccagcagggtacgcactcattcttccgactgcggcagaagagcttttatggagaatgaacagtatcgtggtggtagtcactttgttcctccactgtgtatctgaagccgttggattctggtggaccaactacaaggtcgaaagcctcgagctttggggtcaatacaagaagaacatgccgggaagtatgattttcgtgggaatggctacgttgtatgggatcccacgcatgatactcttagttgagtcgatcatcagtcttcgtgatctaccagagacgacatatctcgaggtatcgtggacgcaatttctgccgcgactctga

SEQ ID NO: 33537 - protein, 309 aa, Muscodor strobelii
  misc_feature: SGI Peptide ID NO. 571571
  misc_feature (1)..(309): NCBI GI: 145234855 Blast Desc: An03g01740 [Aspergillus niger] gi|134057750|emb|CAK38147.1| protein product [Aspergillus niger]
  misc_feature (1)..(309): NCBI GI: 145251660 Blast Desc: An16g00290 [Aspergillus niger] gi|134082879|emb|CAK42709.1| protein product [Aspergillus niger]
  misc_feature (1)..(309): NCBI GI: 255956865 Blast Desc: Pc21g22150 [Penicillium chrysogenum Wisconsin 54-1255] gi|211590896|emb|CAP97112.1| Pc21g22150 [Penicillium chrysogenum Wisconsin 54-1255]
  misc_feature (9)..(225): NCBI GI: 156059350 Blast Desc: SS1G_03687 [Sclerotinia sclerotiorum 1980] gi|154701474|gb|EDO01213.1| SS1G_03687 [Sclerotinia sclerotiorum 1980]
  misc_feature (6)..(309): NCBI GI: 169599991 Blast Desc: SNOG_02825 [Phaeosphaeria nodorum SN15] gi|111068436|gb|EAT89556.1| SNOG_02825 [Phaeosphaeria nodorum SN15]
  misc_feature (14)..(225): NCBI GI: 171682874 Blast Desc: protein product [Podospora anserina] gi|170941396|emb|CAP67046.1| protein product [Podospora anserina]
  misc_feature (5)..(309): NCBI GI: 170087070 Blast Desc: [Laccaria bicolor S238N-H82] gi|170109747|ref|XP_001886080.1| [Laccaria bicolor S238N-H82] gi|164639010|gb|EDR03284.1| [Laccaria bicolor S238N-H82] bicolor
  misc_feature (5)..(309): NCBI GI: 170087074 Blast Desc: [Laccaria bicolor S238N-H82] gi|164649960|gb|EDR14201.1| [Laccaria bicolor S238N-H82]
  misc_feature (1)..(228): NCBI GI: 212530492 Blast Desc: PMAA_036780 [Penicillium marneffei ATCC 18224] gi|210074801|gb|EEA28888.1| PMAA_036780 [Penicillium marneffei ATCC 18224]
  misc_feature (9)..(309): NCBI GI: 121717127 Blast Desc: ACLA_076300 [Aspergillus clavatus NRRL 1] gi|119404173|gb|EAW14590.1| ACLA_076300 [Aspergillus clavatus NRRL 1]
MKALGQPKWILTHGLYADSGGFQLHTQSYNPFPITAEQIAYLVEHGNRETKVLAFIQAGRLITRLIARAAQKLQITPYELTTVALLVCSFTTLILWWHKPLDVRSPTPVFLKQQLKTAEDKVYGKPDDLICHGLFKDTPLDFIEDNIYWSRKAHEPLLQMVLRWELQTTPLDRIPNDRDYHPRNLRQNLYLVLPVSAFGAIHPAGYALILPTAAEELLWRMNSIVVVVTLFLHCVSEAVGFWWTNYKVESLELWGQYKKNMPGSMIFVGMATLYGIPRMILLVESIISLRDLPETTYLEVSWTQFLPRL

SEQ ID NO: 33538 - DNA, 738 bp, Muscodor strobelii
  misc_feature: SGI cDNA ID NO. 571572
  misc_feature: Encodes the peptide sequence at SEQ ID NO 33539
ggtctctcgagagatgagatcttcggcaatctcttcgtcatcaatttcgccggtcacgacactacagcgaataccctagcttttgctacgctactcctagcggcacatctagaagtccaagcttggctggcagaggaaatcgaacttgtgactggtgactacctcgtggaagcgtgggactacaaagagctgttcccacggctcaagcgctgccgagccacgatttacgaagtcttgcggctctatgcgcccgttcctgccttgccgtcaatcgcttccaaccacacccagacactccaaatcggcactcagactctgattatacctgagggtgtcagtctcactgttaatctaagggctatgcaggtacatcccgcgtactgggctgacgcaaacgagtggaagccctcacgtaggatctcgagacccgcgtctacatcacctgtgactaaggcccaactagctactgaggagctaattgtaccgaataagaacatattcttcccgtggggcgatggaccacagatctgccctggaaagaagttcgctgaggtggaagctgttgcggttctggcctgcttatttggaaaacatcgtctagcggttaagaagcaagctggcgagagcgagaaagctgcgatgaagagagcgaaatactgtagtaatgacgttgatctggagatgcttgttagacttagagatgcggaccgtgttactttgatctgcagtgaaaaatga

SEQ ID NO: 33539 - protein, 245 aa, Muscodor strobelii
  misc_feature: SGI Peptide ID NO. 571572
  misc_feature (1)..(53): Pfam Id: PF00067 Pfam Desc: Cytochrome P450
  misc_feature (1)..(242): NCBI GI: 238507582 Blast Desc: cytochrome P450, [Aspergillus flavus NRRL3357] gi|220688511|gb|EED44863.1| cytochrome P450, [Aspergillus flavus NRRL3357]
  misc_feature (1)..(242): NCBI GI: 169785166 Blast Desc: [Aspergillus oryzae RIB40] gi|83775791|dbj|BAE65911.1| protein product [Aspergillus oryzae]
  misc_feature (1)..(243): NCBI GI: 145246712 Blast Desc: An12g05360 [Aspergillus niger] gi|134080326|emb|CAK46248.1| protein product [Aspergillus niger]
  misc_feature (2)..(242): NCBI GI: 212538427 Blast Desc: cytochrome P450, [Penicillium marneffei ATCC 18224] gi|210069111|gb|EEA23202.1| cytochrome P450, [Penicillium marneffei ATCC 18224]
  misc_feature (2)..(242): NCBI GI: 242765017 Blast Desc: cytochrome P450, [Talaromyces stipitatus ATCC 10500] gi|218724085|gb|EED23502.1| cytochrome P450, [Talaromyces stipitatus ATCC 10500]
  misc_feature (1)..(242): NCBI GI: 242813672 Blast Desc: cytochrome P450 monooxygenase, [Talaromyces stipitatus ATCC 10500] gi|218714552|gb|EED13975.1| cytochrome P450 monooxygenase, [Talaromyces stipitatus ATCC 10500]
  misc_feature (1)..(245): NCBI GI: 169599605 Blast Desc: SNOG_02626 [Phaeosphaeria nodorum SN15] gi|111068237|gb|EAT89357.1| SNOG_02626 [Phaeosphaeria nodorum SN15]
  misc_feature (2)..(241): NCBI GI: 238485360 Blast Desc: cytochrome P450, [Aspergillus flavus NRRL3357] gi|220698797|gb|EED55136.1| cytochrome P450, [Aspergillus flavus NRRL3357]
  misc_feature (1)..(238): NCBI GI: 156031110 Blast Desc: SS1G_14163 [Sclerotinia sclerotiorum 1980] gi|154700554|gb|EDO00293.1| SS1G_14163 [Sclerotinia sclerotiorum 1980]
  misc_feature (1)..(238): NCBI GI: 154310459 Blast Desc: BC1G_07150 [Botryotinia fuckeliana B05.10] gi|150851481|gb|EDN26674.1| BC1G_07150 [Botryotinia fuckeliana B05.10]
  misc_feature (2)..(201): SWISSPROT Homolog: EC 1.14.15.3 Alkane 1-monooxygenase
GLSRDEIFGNLFVINFAGHDTTANTLAFATLLLAAHLEVQAWLAEEIELVTGDYLVEAWDYKELFPRLKRCRATIYEVLRLYAPVPALPSIASNHTQTLQIGTQTLIIPEGVSLTVNLRAMQVHPAYWADANEWKPSRRISRPASTSPVTKAQLATEELIVPNKNIFFPWGDGPQICPGKKFAEVEAVAVLACLFGKHRLAVKKQAGESEKAAMKRAKYCSNDVDLEMLVRLRDADRVTLICSEK

SEQ ID NO: 33540 - DNA, 1328 bp, Muscodor strobelii
  misc_feature: SGI EST ID NO. CUFF.79281.0
  misc_feature: Variant of the nucleotide sequence at SEQ ID NO 33538
tggctggcagaggaaatcgaacttgtgactggtgactacctcgtggaagcgtgggactacaaagagctgttcccacggctcaagcgctgccgagccacgatttacgaagtcttgcggctctatgcgcccgttcctgccttgccgtcaatcgcttccaaccacacccagacactccaaatcggcactcagactctgattatacctgagggtgtcagtctcactgttaatctaagggctatgcaggtacatcccgcgtactgggctgacgcaaacgagtggaagccctcacgtaggatctcgagacccgcgtctacatcacctgtgactaaggcccaactagctactgaggagctaattgtaccgaataagaacatattcttcccgtggggcgatggaccacagatctgccctggaaagaagttcgctgaggtggaagctgttgcggttctggcctgcttatttggaaaacatcgtctagcggttaagaagcaagctggcgagagcgagaaagctgcgatgaagagagcgaaatactgtagtaatgacgttgatctggagatgcttgttagacttagagatgcggaccgtgttactttgatctgcagtgaaaaatgaacattagtacatattgtcccaagacaaccgagttctctttagcaatgctagatagcacagaatcacgattagtgaataaacacttggtggaacgaatgtaactcttatatggtatcgcgtatgtggcatgattcaatactatgcgtatttactaagtttcgaaacactgacatcgaaaacctggtgaaggttatacagggtgagtggtttgcatactattcagagtcgcggcagaaattgcgtccacgatacctcgagatatgtcgtctctggtagatcacgaagactgatgatcgactcaactaagagtatcatgcgtgggatcccatacaacgtagccattcccacgaaaatcatacttcccggcatgttcttcttgtattgaccccaaagctcgaggctttcgaccttgtagttggtccaccagaatccaacggcttcagatacacagtggaggaacaaagtgactaccaccacgatactgttcattctccataaaagctcttctgccgcagtcggaagaatgagtgcgtaccctgctgggtggatggcgccgaaggcagatacagggagtactagatacagattctgcctgaggtttcgagggtggtagtctctatcatttggtatccctaacaaaggtcagtattaagatgttgttaaaggaaggatatagaacaacctactgtcaagtggagttgtctgaagttccc

SEQ ID NO: 33541 - DNA, 411 bp, Muscodor strobelii
  misc_feature: SGI cDNA ID NO. 571573
  misc_feature: Encodes the peptide sequence at SEQ ID NO 33542
atgctcttctccaagtccagcatcacggcccttctagctaccgtcaccgtcgttgcggctggttcggttttgaccacccgtcaaaatggcgtgacatgccagacatctggtggctcgccttccactgattcagtgactaacgtcatcaacgagctaaatgggaagtcaggtgatgactgttccaacacgaatggtgatgcctctgactgcaccactcttgtaacacaggacgatgctgctatcgggatatgcggagagaccaacaccggcatcagctgtggagatgtcgcaggctatgccaaccaagtccagcaaacatgccagagcggtggagttgtgggagggacttacactattagttctagtcttagggtcattgtgttcaactcagctgactctaaggtagagtga

SEQ ID NO: 33542 - protein, 136 aa, Muscodor strobelii
  misc_feature: SGI Peptide ID NO. 571573
MLFSKSSITALLATVTVVAAGSVLTTRQNGVTCQTSGGSPSTDSVTNVINELNGKSGDDCSNTNGDASDCTTLVTQDDAAIGICGETNTGISCGDVAGYANQVQQTCQSGGVVGGTYTISSSLRVIVFNSADSKVE

SEQ ID NO: 33543 - DNA, 2196 bp, Muscodor strobelii
  misc_feature: SGI cDNA ID NO. 571574
  misc_feature: Elevated expression when VOC is produced
  misc_feature: Encodes the peptide sequence at SEQ ID NO 33544
atgtcttctcactacgacttagcttctcctctacaagagcccatgttaatggcaacacaagttcctcctcctcagcaaattttcggtactggtattacaaacagggagtggtgctccctaaacagaataggaagacgtgaacaatcggaactggacgatgccgttgacagttctgacaatgctggcaataagggaactatcaacgaaacagaaccaatcgaagtcggcatgaccgtagagacgaaagacctctatcgggaggactacagatctccttgggaggaatggtcacctgacgacatcggaatcaactccaaatcgagccccgattctgagaaatttgctctgatagtacgccgagaaaagtcgcaaagcgacgccggcgagccggtactgaggatgcactccatcgcggtgcaaagcccactgatcaagaagaagctaggctctgtgtttgcggggtaccaaggtataaacacaaatctcaaaaagcttgaattcaatgcaccgttccatgaattcttctaccgatgggacgagtttaaatctcaagcagtcggtgaacaggaaagtgacgatgcaaagcattacagactactctatgacatcataaagtccgaagtcgaacctcacattgagcaaacagaagatcttctcaacaacaaggtcatctctttcgattatgtatgggcactcttcgagcctggcacagaaattcatagcacagtacaagacgaagaccgtttgtatcttttaaatggaggaaactatcaacagctccctaatggtagcaagttatatgccatgtcatgccggtatattgatacggatggaaagctctttgggtacagaacggcgtctctgagcatcggcccttttgaaaatgtaaaaccgatctccgagctcactgtcctgcctagtcatttacgtccagcaattgtcgaaactcgtatgagactcgcggaaaggggacgtaagtttgaaagattgcaaggaacacacttcatgagctattctggtccttacaacctacgaaacccagccttcggtgcaaccaggagacagatattggaagagggcagaattgtccttgactgtgcctcgttcttgagatacaccggcgaaaacctggacaagttgggaccgcttgaaggaccaccacctacgtcggaccatgtggatataatgttatcggatgccatatttggcgaccaagaggatgattcttatgacaatactcccccgcttccagctgttcaactagctcgatacatagcaagacaaaccagacgcaaatacgctgcgtatcagccgaagtctgcagataatgcctgcctatcagagaagcattatgctttatgcagtcctactgttaagggattctgtatgaaagcgaaggactgggcttacttccgagttgatcttgtggaggacataaaatggaatggtgatgtattcaaacatcttgttctgccggaagactacaagaggatagtttgggcgtttgttgactctcagttatctcgcactgatgactttgacgacatcgtccgaggaaaaggaaaaggaattattatgctcttgagcggcgagcccgggacgggtaaaactctgacatctgagtcagtggcagagactatgaagaagcctttgtatagcatttccgctggcgaattgggagatgccgcgggtgaagtggaaaccaatctacgacgagtacttgagttgtcggccaaatgggatgccgttctactgatcgacgaatgcgacatattcctcgagcaacgaacaacgtcagatttgcaccggaataagattgtatctgtgttcttgagacttttggaatactaccaaggtgtgatgtttctcaccaccaaccgggtggcgtcgttcgacccggctttcgaatcgaggatccatctcactattaattaccccgaacttaactttgaaagcaggctgcacatctggaaaacatttgtcaaacccgactcatcgaataccgcagttaagaaagcggaattgcaaatactatctcgcatcaaactcaatggacggcaaatcaagaacgttgttaagactgcaaggctgctggcgagcagagagcagaagtctttggcgttggaacatcttgaggtcgtcttgcgggtcaagaactgtctccctacagattcactcgatgtgaggatggattag

SEQ ID NO: 33544 - protein, 731 aa, Muscodor strobelii
  misc_feature: SGI Peptide ID NO. 571574
  misc_feature (525)..(701): Pfam Id: PF00004 Pfam Desc: ATPase family associated with various cellular activities (AAA)
  misc_feature (51)..(718): NCBI GI: 256726505 Blast Desc: NECHADRAFT_39197 [Nectria haematococca mpVI 77-13-4]
  misc_feature (65)..(725): NCBI GI: 189209339 Blast Desc: conserved [Pyrenophora tritici-repentis Pt-1C-BFP] gi|187977095|gb|EDU43721.1| conserved [Pyrenophora tritici-repentis Pt-1C-BFP]
  misc_feature (73)..(718): NCBI GI: 46123125 Blast Desc: FG05940.1 [Gibberella zeae PH-1]
  misc_feature (73)..(719): NCBI GI: 256731079 Blast Desc: NECHADRAFT_48916 [Nectria haematococca mpVI 77-13-4]
  misc_feature (47)..(719): NCBI GI: 145607209 Blast Desc: MGG_04085 [Magnaporthe grisea 70-15] gi|145014809|gb|EDJ99377.1| MGG_04085 [Magnaporthe grisea 70-15]
  misc_feature (53)..(723): NCBI GI: 119483180 Blast Desc: AAA family ATPase, [Neosartorya fischeri NRRL 181] gi|119409773|gb|EAW19721.1| AAA family ATPase, [Neosartorya fischeri NRRL 181]
  misc_feature (56)..(720): NCBI GI: 159123389 Blast Desc: AAA family ATPase, [Aspergillus fumigatus A1163]
  misc_feature (74)..(722): NCBI GI: 261357186 Blast Desc: conserved [Verticillium albo-atrum VaMs.102]
  misc_feature (47)..(725): NCBI GI: 169613518 Blast Desc: SNOG_09890 [Phaeosphaeria nodorum SN15] gi|160702743|gb|EAT83155.2| SNOG_09890 [Phaeosphaeria nodorum SN15]
  misc_feature (73)..(722): NCBI GI: 171684197 Blast Desc: protein product [Podospora anserina] gi|170942059|emb|CAP67711.1| protein product [Podospora anserina]
  misc_feature: Useful for introducing or modulating the production of volatile compounds
MSSHYDLASPLQEPMLMATQVPPPQQIFGTGITNREWCSLNRIGRREQSELDDAVDSSDNAGNKGTINETEPIEVGMTVETKDLYREDYRSPWEEWSPDDIGINSKSSPDSEKFALIVRREKSQSDAGEPVLRMHSIAVQSPLIKKKLGSVFAGYQGINTNLKKLEFNAPFHEFFYRWDEFKSQAVGEQESDDAKHYRLLYDIIKSEVEPHIEQTEDLLNNKVISFDYVWALFEPGTEIHSTVQDEDRLYLLNGGNYQQLPNGSKLYAMSCRYIDTDGKLFGYRTASLSIGPFENVKPISELTVLPSHLRPAIVETRMRLAERGRKFERLQGTHFMSYSGPYNLRNPAFGATRRQILEEGRIVLDCASFLRYTGENLDKLGPLEGPPPTSDHVDIMLSDAIFGDQEDDSYDNTPPLPAVQLARYIARQTRRKYAAYQPKSADNACLSEKHYALCSPTVKGFCMKAKDWAYFRVDLVEDIKWNGDVFKHLVLPEDYKRIVWAFVDSQLSRTDDFDDIVRGKGKGIIMLLSGEPGTGKTLTSESVAETMKKPLYSISAGELGDAAGEVETNLRRVLELSAKWDAVLLIDECDIFLEQRTTSDLHRNKIVSVFLRLLEYYQGVMFLTTNRVASFDPAFESRIHLTINYPELNFESRLHIWKTFVKPDSSNTAVKKAELQILSRIKLNGRQIKNVVKTARLLASREQKSLALEHLEVVLRVKNCLPTDSLDVRMD

SEQ ID NO: 33545 - DNA, 2390 bp, Muscodor strobelii
  misc_feature: SGI EST ID NO. CUFF.79329.0
  misc_feature: Variant of the nucleotide sequence at SEQ ID NO 33543
atttacctgtcatttgagatacttacaacagcgcagaactgggcaagatgtcttctcactacgacttagcttctcctctacaagagcccatgttaatggcaacacaagttcctcctcctcagcaaattttcggtactggtattacaaacagggagtggtgctccctaaacagaataggaagacgtgaacaatcggaactggacgatgccgttgacagttctgacaatgctggcaataagggaactatcaacgaaacagaaccaatcgaagtcggcatgaccgtagagacgaaagacctctatcgggaggactacagatctccttgggaggaatggtcacctgacgacatcggaatcaactccaaatcgagccccgattctgagaaatttgctctgatagtacgccgagaaaagtcgcaaagcgacgccggcgagccggtactgaggatgcactccatcgcggtgcaaagcccactgatcaagaagaagctaggctctgtgtttgcggggtaccaaggtataaacacaaatctcaaaaagcttgaattcaatgcaccgttccatgaattcttctaccgatgggacgagtttaaatctcaagcagtcggtgaacaggaaagtgacgatgcaaagcattacagactactctatgacatcataaagtccgaagtcgaacctcacattgagcaaacagaagatcttctcaacaacaaggtcatctctttcgattatgtatgggcactcttcgagcctggcacagaaattcatagcacagtacaagacgaagaccgtttgtatcttttaaatggaggaaactatcaacagctccctaatggtagcaagttatatgccatgtcatgccggtatattgatacggatggaaagctctttgggtacagaacggcgtctctgagcatcggcccttttgaaaatgtaaaaccgatctccgagctcactgtcctgcctagtcatttacgtccagcaattgtcgaaactcgtatgagactcgcggaaaggggacgtaagtttgaaagattgcaaggaacacacttcatgagctattctggtccttacaacctacgaaacccagccttcggtgcaaccaggagacagatattggaagagggcagaattgtccttgactgtgcctcgttcttgagatacaccggcgaaaacctggacaagttgggaccgcttgaaggaccaccacctacgtcggaccatgtggatataatgttatcggatgccatatttggcgaccaagaggatgattcttatgacaatactcccccgcttccagctgttcaactagctcgatacatagcaagacaaaccagacgcaaatacgctgcgtatcagccgaagtctgcagataatgcctgcctatcagagaagcattatgctttatgcagtcctactgttaagggattctgtatgaaagcgaaggactgggcttacttccgagttgatcttgtggaggacataaaatggaatggtgatgtattcaaacatcttgttctgccggaagactacaagaggatagtttgggcgtttgttgactctcagttatctcgcactgatgactttgacgacatcgtccgaggaaaaggaaaaggaattattatgctcttgagcggcgagcccgggacgggtaaaactctgacatctgagtcagtggcagagactatgaagaagcctttgtatagcatttccgctggcgaattgggagatgccgcgggtgaagtggaaaccaatctacgacgagtacttgagttgtcggccaaatgggatgccgttctactgatcgacgaatgcgacatattcctcgagcaacgaacaacgtcagatttgcaccggaataagattgtatctgtgttcttgagacttttggaatactaccaaggtgtgatgtttctcaccaccaaccgggtggcgtcgttcgacccggctttcgaatcgaggatccatctcactattaattaccccgaacttaactttgaaagcaggctgcacatctggaaaacatttgtcaaacccgactcatcgaataccgcagttaagaaagcggaattgcaaatactatctcgcatcaaactcaatggacggcaaatcaagaacgttgttaagactgcaaggctgctggcgagcagagagcagaagtctttggcgttggaacatcttgaggtcgtcttgcgggtcaagaactgtctccctacagattcactcgatgtgaggatggattagtaggctatggtaggtggtcagctgctccgctgtggcgcgaagcacgagtatacattggcgaaggaagactcgcaatgacagaggtgagactggtgatcgtggaagcttacggaagtactttagatgctcatatagaaagagcaataa

SEQ ID NO: 33546 - DNA, 2253 bp, Muscodor strobelii
  misc_feature: SGI cDNA ID NO. 571575
  misc_feature: Encodes the peptide sequence at SEQ ID NO 33547
atgtcttctcactacgacttagcttctcctctacaagagcccatgttaatggcaacacaagttcctcctcctcagcaaattttcggtactggtattacaaacagggagtggtgctccctaaacagaataggaagacgtgaacaatcggaactggacgatgccgttgacagttctgacaatgctggcaataagggaactatcaacgaaacagaaccaatcgaagtcggcatgaccgtagagacgaaagacctctatcgggaggactacagatctccttgggaggaatggtcacctgacgacatcggaatcaactccaaatcgagccccgattctgagaaatttgctctgatagtacgccgagaaaagtcgcaaagcgacgccggcgagccggtactgaggatgcactccatcgcggtgcaaagcccactgatcaagaagaagctaggctctgtgtttgcggggtaccaaggtataaacacaaatctcaaaaagcttgaattcaatgcaccgttccatgaattcttctaccgatgggacgagtttaaatctcaagcagtcggtgaacaggaaagtgacgatgcaaagcattacagactactctatgacatcataaagtccgaagtcgaacctcacattgagcaaacagaagatcttctcaacaacaaggtcatctctttcgattatgtatgggcactcttcgagcctggcacagaaattcatagcacagtacaagacgaagaccgtttgtatcttttaaatggaggaaactatcaacagctccctaatggtagcaagttatatgccatgtcatgccggtatattgatacggatggaaagctctttgggtacagaacggcgtctctgagcatcggcccttttgaaaatgtaaaaccgatctccgagctcactgtcctgcctagtcatttacgtccagcaattgtcgaaactcgtatgagactcgcggaaaggggacgtaagtttgaaagattgcaaggaacacacttcatgagctattctggtccttacaacctacgaaacccagccttcggtgcaaccaggagacagatagtgagtggaagaaagaaagaaagttttcgaacaataattgctaatgcattgctcaagttggaagagggcagaattgtccttgactgtgcctcgttcttgagatacaccggcgaaaacctggacaagttgggaccgcttgaaggaccaccacctacgtcggaccatgtggatataatgttatcggatgccatatttggcgaccaagaggatgattcttatgacaatactcccccgcttccagctgttcaactagctcgatacatagcaagacaaaccagacgcaaatacgctgcgtatcagccgaagtctgcagataatgcctgcctatcagagaagcattatgctttatgcagtcctactgttaagggattctgtatgaaagcgaaggactgggcttacttccgagttgatcttgtggaggacataaaatggaatggtgatgtattcaaacatcttgttctgccggaagactacaagaggatagtttgggcgtttgttgactctcagttatctcgcactgatgactttgacgacatcgtccgaggaaaaggaaaaggaattattatgctcttgagcggcgagcccgggacgggtaaaactctgacatctgagtcagtggcagagactatgaagaagcctttgtatagcatttccgctggcgaattgggagatgccgcgggtgaagtggaaaccaatctacgacgagtacttgagttgtcggccaaatgggatgccgttctactgatcgacgaatgcgacatattcctcgagcaacgaacaacgtcagatttgcaccggaataagattgtatctgtgttcttgagacttttggaatactaccaaggtgtgatgtttctcaccaccaaccgggtggcgtcgttcgacccggctttcgaatcgaggatccatctcactattaattaccccgaacttaactttgaaagcaggctgcacatctggaaaacatttgtcaaacccgactcatcgaataccgcagttaagaaagcggaattgcaaatactatctcgcatcaaactcaatggacggcaaatcaagaacgttgttaagactgcaaggctgctggcgagcagagagcagaagtctttggcgttggaacatcttgaggtcgtcttgcgggtcaagaactgtctccctacagattcactcgatgtgaggatggattag

SEQ ID NO: 33547 - protein, 750 aa, Muscodor strobelii
  misc_feature: SGI Peptide ID NO. 571575
  misc_feature (544)..(720): Pfam Id: PF00004 Pfam Desc: ATPase family associated with various cellular activities (AAA)
  misc_feature (51)..(737): NCBI GI: 256726505 Blast Desc: NECHADRAFT_39197 [Nectria haematococca mpVI 77-13-4]
  misc_feature (65)..(744): NCBI GI: 189209339 Blast Desc: conserved [Pyrenophora tritici-repentis Pt-1C-BFP] gi|187977095|gb|EDU43721.1| conserved [Pyrenophora tritici-repentis Pt-1C-BFP]
  misc_feature (73)..(737): NCBI GI: 46123125 Blast Desc: FG05940.1 [Gibberella zeae PH-1]
  misc_feature (73)..(738): NCBI GI: 256731079 Blast Desc: NECHADRAFT_48916 [Nectria haematococca mpVI 77-13-4]
  misc_feature (47)..(738): NCBI GI: 145607209 Blast Desc: MGG_04085 [Magnaporthe grisea 70-15] gi|145014809|gb|EDJ99377.1| MGG_04085 [Magnaporthe grisea 70-15]
  misc_feature (74)..(741): NCBI GI: 261357186 Blast Desc: conserved [Verticillium albo-atrum VaMs.102]
  misc_feature (47)..(744): NCBI GI: 169613518 Blast Desc: SNOG_09890 [Phaeosphaeria nodorum SN15] gi|160702743|gb|EAT83155.2| SNOG_09890 [Phaeosphaeria nodorum SN15]
  misc_feature (73)..(741): NCBI GI: 171684197 Blast Desc: protein product [Podospora anserina] gi|170942059|emb|CAP67711.1| protein product [Podospora anserina]
  misc_feature (110)..(742): NCBI GI: 115397169 Blast Desc: [Aspergillus terreus NIH2624] gi|114192367|gb|EAU34067.1| [Aspergillus terreus NIH2624]
  misc_feature (62)..(741): NCBI GI: 169617988 Blast Desc: SNOG_12178 [Phaeosphaeria nodorum SN15] gi|111059470|gb|EAT80590.1| SNOG_12178 [Phaeosphaeria nodorum SN15]
MSSHYDLASPLQEPMLMATQVPPPQQIFGTGITNREWCSLNRIGRREQSELDDAVDSSDNAGNKGTINETEPIEVGMTVETKDLYREDYRSPWEEWSPDDIGINSKSSPDSEKFALIVRREKSQSDAGEPVLRMHSIAVQSPLIKKKLGSVFAGYQGINTNLKKLEFNAPFHEFFYRWDEFKSQAVGEQESDDAKHYRLLYDIIKSEVEPHIEQTEDLLNNKVISFDYVWALFEPGTEIHSTVQDEDRLYLLNGGNYQQLPNGSKLYAMSCRYIDTDGKLFGYRTASLSIGPFENVKPISELTVLPSHLRPAIVETRMRLAERGRKFERLQGTHFMSYSGPYNLRNPAFGATRRQIVSGRKKESFRTIIANALLKLEEGRIVLDCASFLRYTGENLDKLGPLEGPPPTSDHVDIMLSDAIFGDQEDDSYDNTPPLPAVQLARYIARQTRRKYAAYQPKSADNACLSEKHYALCSPTVKGFCMKAKDWAYFRVDLVEDIKWNGDVFKHLVLPEDYKRIVWAFVDSQLSRTDDFDDIVRGKGKGIIMLLSGEPGTGKTLTSESVAETMKKPLYSISAGELGDAAGEVETNLRRVLELSAKWDAVLLIDECDIFLEQRTTSDLHRNKIVSVFLRLLEYYQGVMFLTTNRVASFDPAFESRIHLTINYPELNFESRLHIWKTFVKPDSSNTAVKKAELQILSRIKLNGRQIKNVVKTARLLASREQKSLALEHLEVVLRVKNCLPTDSLDVRMD

SEQ ID NO: 33548 - DNA, 2390 bp, Muscodor strobelii; identical to SEQ ID NO: 33545
  misc_feature: SGI EST ID NO. CUFF.79329.0
  misc_feature: Variant of the nucleotide sequence at SEQ ID NO 33546

SEQ ID NO: 33549 - DNA, 1104 bp, Muscodor strobelii
  misc_feature: SGI cDNA ID NO. 571576
  misc_feature: Encodes the peptide sequence at SEQ ID NO 33550
atggcgcagccaatccctgcgaaagacttggcaaccgccagacctccccctgcgcctcgatctactcgcgaccaacggctcgcggccggattacagatatcccaacctctcaccccatctacacagaaccagaagaccttggtttcgtatgccgatcgtctttgcggctattgccaatcagattgggctatgatcaactctcgccgctcgcctgggcaccaagataccgagacagaagaccggatattcgagagactcttcgcggtacacatggacgagtggagtaaaagcgacgagtttggagagataattcgcgtgcttgggacaaagaagccacatctcagcaaggttgacaaaattatctgtttcggcgctggtacgaccaagggtcaatggtggaaagacagcaacagatacgaagcgctatcggatcatcattgccttatctgcaagtacggcttggtgtatgctctggcagcgtatttccaggatatgcagagtcaggaggttcgaatttgtgcttctgatcttgatctcgccatcacagagatcgaatgtctcacgaaatggggcattcagatcctatctccttataatggtgaagatcagatgctcgtggacaagaatactatggtgatctgccttcctgctggagagacgaactttcgcaaaggcttttctaacaacgacgtccagcctgccgccatgttcgtgagcaggagtttacgaatagaattggagatccctcaatcagtcgccctcttctctacatactttcaacctgctaccaagatcttcaagaataccactgtaggtggtgtccgataccctcgcattgttgcccaagcggagctctgggtcagaaagaaacagaaacgcaatgatgggtcaacgactatgccacatgccgaaccaacagcccgtactgctccaatctcaagtcttccctcgccaccatcgagcgccgctgaaagccatcggcaagatccaattattcaggaacggattaggctccgccaagaacaggtagtggatttggtacttgaaatcgagaggttgcgtcgcgagcgagtcgcaattcgcaagaaaatctctcagctttaa

SEQ ID NO: 33550 - protein, 367 aa, Muscodor strobelii
  misc_feature: SGI Peptide ID NO. 571576
MAQPIPAKDLATARPPPAPRSTRDQRLAAGLQISQPLTPSTQNQKTLVSYADRLCGYCQSDWAMINSRRSPGHQDTETEDRIFERLFAVHMDEWSKSDEFGEIIRVLGTKKPHLSKVDKIICFGAGTTKGQWWKDSNRYEALSDHHCLICKYGLVYALAAYFQDMQSQEVRICASDLDLAITEIECLTKWGIQILSPYNGEDQMLVDKNTMVICLPAGETNFRKGFSNNDVQPAAMFVSRSLRIELEIPQSVALFSTYFQPATKIFKNTTVGGVRYPRIVAQAELWVRKKQKRNDGSTTMPHAEPTARTAPISSLPSPPSSAAESHRQDPIIQERIRLRQEQVVDLVLEIERLRRERVAIRKKISQL

SEQ ID NO: 33551 - DNA, 242 bp, Muscodor strobelii
  misc_feature: SGI EST ID NO. CUFF.79305.0
  misc_feature: Variant of the nucleotide sequence at SEQ ID NO 33549
ttccgcctgagacgctgtgaattgtccgctcactcgcgaatctccagaacacatcatatctctcccgcgaccgcccgatccagagcgacacggctttcttctattgtcgcctcgatcttcaccagagagtaagcgttctcgtcacattacctcgtccaaacttctccgcttctatacctgttctgacgaatgtccttcaagttaaactagagatggcgcagccaatccctgcgaaagacttg

SEQ ID NO: 33552 - DNA, 243 bp, Muscodor strobelii
  misc_feature: SGI cDNA ID NO. 571577
  misc_feature: Encodes the peptide sequence at SEQ ID NO 33553
atgcgcttcccgtccgtctcaactacgcgctccgaagacgtagtagggcttgccgcccatcatcggcgggaatacgagctcgaaattgcgcagtacgcccgccgacttcgtccccccgtcatcgtggaggaccatctcgcccggggtgaaagccaatgcgagcgtggcaaaggttatgtatcctgtcttcccaaggcgcgccagagtctcgaaacagcccccgagcgtggctacagctgttag

SEQ ID NO: 33553 - protein, 80 aa, Muscodor strobelii
  misc_feature: SGI Peptide ID NO. 571577
MRFPSVSTTRSEDVVGLAAHHRREYELEIAQYARRLRPPVIVEDHLARGESQCERGKGYVSCLPKARQSLETAPERGYSC

SEQ ID NO: 33554 - DNA, 861 bp, Muscodor strobelii
  misc_feature: SGI cDNA ID NO. 571578
  misc_feature: Encodes the peptide sequence at SEQ ID NO 33555
atgcgtttcacttctgccgttttcctgtccctcgcgtttgtcgcggctgcagcccctccagatgcatcgcccgataatacaacgctctttgcatgtggcaaccctcctccaacggctgagcaacgcgctattctagctgaactggcccaggaggaggatgcaggacgcgtcaccgccgatgcagcaattccaacagtaaatgtttacttccatgttgttgcatcttcgaagatgcccgccggtggctgggttgctcaatcgcgtatccaacagcaaatgaaggtcctcaacaacaactacaattcccatggcatccactttaaactagccggaacgactcgcactgtcaactcgggatgggcgcaaggtaacaatcctgatgcgatgaaggcaaagttgcgcaagggttcctacaatgacctcaacatttatctccaacaaggtcttccggggaatgcagcaggactctgtacactgccgggagccattggtggaccgggcacgtatgataacgatgggtgccaaattctgaccggttcgctccccggcggaggtccatataatggactcaacgacggcaaggccggagtccacgaagttggacattggttcggacttctacacacttttgacggtggctgtgacgctcctggcgattatgtcaacgatacacccttcgaggcatcccctcctcccaatggcggttgccctaccggccgtaactcttgcccaggcaagcccggcaatgatcctatccataaccatatggactacactagcgggaagtgcaagaccaagtttaccgctggtcagcagaagcgcatgcataaccaatgggcaaaattccgtgccggacactag

SEQ ID NO: 33555 - protein, 286 aa, Muscodor strobelii
  misc_feature: SGI Peptide ID NO. 571578
  misc_feature (7)..(284): NCBI GI: 261352606 Blast Desc: metalloprotease [Verticillium albo-atrum VaMs.102]
  misc_feature (7)..(285): NCBI GI: 39945842 Blast Desc: MGG_08041 [Magnaporthe grisea 70-15] gi|145019277|gb|EDK03505.1| MGG_08041 [Magnaporthe grisea 70-15]
  misc_feature (1)..(285): NCBI GI: 119180007 Blast Desc: CIMG_08674 [Coccidioides immitis RS] gi|33323431|gb|AAQ07436.1| metalloprotease 1 precursor [Coccidioides posadasii] gi|240110235|gb|EER28394.1| 1 precursor
  misc_feature (30)..(284): NCBI GI: 85085015 Blast Desc: NCU07200 [Neurospora crassa OR74A] gi|28918516|gb|EAA28189.1| NCU07200 [Neurospora crassa OR74A] gi|28950215|emb|CAD71082.1| related to metalloprotease MEP1
  misc_feature (22)..(283): NCBI GI: 171676591 Blast Desc: protein product [Podospora anserina] gi|170936362|emb|CAP61020.1| protein product [Podospora anserina]
  misc_feature (32)..(283): NCBI GI: 256724473 Blast Desc: NECHADRAFT_98075 [Nectria haematococca mpVI 77-13-4]
  misc_feature (48)..(283): NCBI GI: 258576093 Blast Desc: metalloprotease 1 [Uncinocarpus reesii 1704] gi|237902494|gb|EEP76895.1| metalloprotease 1 [Uncinocarpus reesii 1704]
  misc_feature (1)..(284): NCBI GI: 258564494 Blast Desc: metalloprotease 1 [Uncinocarpus reesii 1704] gi|237908499|gb|EEP82900.1| metalloprotease 1 [Uncinocarpus reesii 1704]
  misc_feature (10)..(283): NCBI GI: 6624954 Blast Desc: metalloprotease MEP1 [Metarhizium anisopliae var. anisopliae]
  misc_feature (32)..(283): NCBI GI: 261359345 Blast Desc: metalloprotease [Verticillium albo-atrum VaMs.102]
MRFTSAVFLSLAFVAAAAPPDASPDNTTLFACGNPPPTAEQRAILAELAQEEDAGRVTADAAIPTVNVYFHVVASSKMPAGGWVAQSRIQQQMKVLNNNYNSHGIHFKLAGTTRTVNSGWAQGNNPDAMKAKLRKGSYNDLNIYLQQGLPGNAAGLCTLPGAIGGPGTYDNDGCQILTGSLPGGGPYNGLNDGKAGVHEVGHWFGLLHTFDGGCDAPGDYVNDTPFEASPPPNGGCPTGRNSCPGKPGNDPIHNHMDYTSGKCKTKFTAGQQKRMHNQWAKFRAGH

SEQ ID NO: 33556 - DNA, 2616 bp, Muscodor strobelii
  misc_feature: SGI cDNA ID NO. 571579
  misc_feature: Encodes the peptide sequence at SEQ ID NO 33557
atggcgcccgacgacgacgacgatatacccgactactgcaaaggcgtacacgccctggatcctgggaataaagacatctacgtccagctggtcctgtcctttggcttgggcatcactgccttcattgccttctgcatactccggccacgatggaagaccctctacgccgcgcgaaagcggcatacgaatcccgagatcgcgttgcccgtcctgcctgatagctttctaggatggatcccagcattgtacaaagtgaccgaggatcaagtgctggcctcggccgggctggatgcctttgtgttcctctccttcttcaagatggccctcaagctgttcgtcaccatgttcttcttctccgtcgccgtactgtggcccgtccacaggacctttgccggcgacctcgacccgaaccaccgaaatgcctcaatgatacatactgattcgatcgccaatgacctatacttctccactctgaagcacggtgctaaggacagaagctggatctgggcatacctcatattcacttggttcttctcagccctgaccatctacttcatgaacgccgagacatacagggtcgtggaaatccgccaggactatctcggcacccaatcgaccgtaactgatcgcacctttcgcttgactgggattccgcaggacttgaggacggaggataagatcaaagaatttgtagagaatctcgagataggtcacgtcagaaaggtcgcgctctgtcggaattggaccgaaatagacgctttcatggctcagcgtcaaaacacgcttcgcaaacttgaagaggcatggactgcctacagggcgcagaaggccgctgtgtcgagaaccgtcgtggacgccgaggccatccagggtacccaccagcctgatatcgaggaaggtgacgacacgaatgagaatgggcggctgctccacgatgaagacgacccacacaacttattaggcgaaagagtgcgaccgaagatccggctgcgattcggttttcttaagatgcgaaaccgtaaggttgacgccctagattactatgaggaaagtcttcgccggcttgatgagaaaatccacgctgcgaggaaaaaggaatatccaccgactgatacggcatttgtgaccatggactcaatcgccgcctgtcaaatggctattcaagctgtaatcgatcctcgaccgggacggctgcttacgaagccagcgccagcgccctctgatgtcatttggaaaaatacatacgcgccgcgataccggagaagactgcagtcggcaactgtcaccatatttatcatattgctgactattctctggttcttcccggttgcaatattggcccagttgctcagcatctgcaatatcaacaatgtggcaccccaattcggcgaatttctcgaggatcatgatgtgacccaagtcctcgttcgaaccggcttgccaaccctggtggtatccttgctcaacgtgctcgtcccgttcctctatgattacctatcgaatattcaaggtgcgatatcgcagggcgacgttgaactttcggcgatatcgaagaacttcttctttgtcttcttcaacattttcgttgtgtacgccgtctcgggttctgctgctatggcagaattctggcagattatcagagactcgctgagggatacaagccagattgcggcaaaaatagcccagtcgattcaaaagctcaacaatttctacctcaactttattatgctccaaggcttcggtttgttccccttcaagctactccaatttggaagcgtgtctatgtatccaatataccggatgggagccaaaacaccacgcgattttgctggacttgttgaaccgaccctgttcaactacggattcttcttgccgaccgcactgctcgttttcattctttgtctggtttatagcgtcctgccaggctctcaagtggtcttgctactaggtatttgttacttcggcttgggatactttgtttacaagtatcagttgttgtactccatggatcaacctcaacatgcaacgggtagagcttggactatgatctgtcgtcgcatcgtcctcggtcttgtatccttccatgtcgtcatgcttgcaatccttgtactgagagaagcttttgttgaggcagcacttattgtgccactaactcttctgaccctttggtataactgggactatcatcgtcgtttcgtccctctgacccggttcatcgcccttcgtagcattaaccgcgagtcagatccgggacgtcagagcaacccagaccaaagcgagcagcaaccaatgcgacttgctcgacggatgagcactattgatgaggatagagagaagggtatgtcgttcatcaatccatcattagtggtcccgctcgaacagccttggatctaccaagatcctcctccaccaattagtccttccgaatccgctgtcgatggatcgagcatacgcgataatgggaataattacgagaatgcaaacgcaaacgcaaacaataatacccggcctggaatatcaggcggctataatacggacacggcggtaagcacgtcgagctcatttagtttaggagacactcacgtgtggcgagacggtggtgaagataacgcataa

SEQ ID NO: 33557 - protein, 871 aa, Muscodor strobelii
  misc_feature: SGI Peptide ID NO. 571579
  misc_feature (359)..(782): Pfam Id: PF02714 Pfam Desc: Domain of function DUF221
  misc_feature (359)..(744): Pfam Id: PF02714 Pfam Desc: Domain of function DUF221
  misc_feature (7)..(866): NCBI GI: 85115833 Blast Desc: NCU00789 [Neurospora crassa OR74A] gi|28926743|gb|EAA35709.1| conserved [Neurospora crassa OR74A] gi|38636392|emb|CAE81929.1| conserved [Neurospora crassa]
  misc_feature (5)..(811): NCBI GI: 116181196 Blast Desc: CHGG_01226 [Chaetomium globosum CBS 148.51] gi|88185523|gb|EAQ92991.1| CHGG_01226 [Chaetomium globosum CBS 148.51]
  misc_feature (14)..(870): NCBI GI: 156036246 Blast Desc: SS1G_12811 [Sclerotinia sclerotiorum 1980] gi|154698217|gb|EDN97955.1| SS1G_12811 [Sclerotinia sclerotiorum 1980]
  misc_feature (6)..(864): NCBI GI: 171695740 Blast Desc: protein product [Podospora anserina] gi|170948112|emb|CAP60276.1| protein product [Podospora anserina]
  misc_feature (1)..(870): NCBI GI: 256726792 Blast Desc: NECHADRAFT_34365 [Nectria haematococca mpVI 77-13-4]
  misc_feature (13)..(803): NCBI GI: 145601251 Blast Desc: MGG_08731 [Magnaporthe grisea 70-15] gi|145009275|gb|EDJ93986.1| MGG_08731 [Magnaporthe grisea 70-15]
  misc_feature (7)..(788): NCBI GI: 261353842 Blast Desc: Nmr6p [Verticillium albo-atrum VaMs.102]
  misc_feature (13)..(870): NCBI GI: 46136367 Blast Desc: FG09699.1 [Gibberella zeae PH-1]
  misc_feature (24)..(816): NCBI GI: 189193929 Blast Desc: PTRG_02970 [Pyrenophora tritici-repentis Pt-1C-BFP] gi|187978867|gb|EDU45493.1| PTRG_02970 [Pyrenophora tritici-repentis Pt-1C-BFP]
  misc_feature (4)..(797): NCBI GI: 240111693 Blast Desc: CPC735_011560 [Coccidioides posadasii C735 delta SOWgp]
MAPDDDDDIPDYCKGVHALDPGNKDIYVQLVLSFGLGITAFIAFCILRPRWKTLYAARKRHTNPEIALPVLPDSFLGWIPALYKVTEDQVLASAGLDAFVFLSFFKMALKLFVTMFFFSVAVLWPVHRTFAGDLDPNHRNASMIHTDSIANDLYFSTLKHGAKDRSWIWAYLIFTWFFSALTIYFMNAETYRVVEIRQDYLGTQSTVTDRTFRLTGIPQDLRTEDKIKEFVENLEIGHVRKVALCRNWTEIDAFMAQRQNTLRKLEEAWTAYRAQKAAVSRTVVDAEAIQGTHQPDIEEGDDTNENGRLLHDEDDPHNLLGERVRPKIRLRFGFLKMRNRKVDALDYYEESLRRLDEKIHAARKKEYPPTDTAFVTMDSIAACQMAIQAVIDPRPGRLLTKPAPAPSDVIWKNTYAPRYRRRLQSATVTIFIILLTILWFFPVAILAQLLSICNINNVAPQFGEFLEDHDVTQVLVRTGLPTLVVSLLNVLVPFLYDYLSNIQGAISQGDVELSAISKNFFFVFFNIFVVYAVSGSAAMAEFWQIIRDSLRDTSQIAAKIAQSIQKLNNFYLNFIMLQGFGLFPFKLLQFGSVSMYPIYRMGAKTPRDFAGLVEPTLFNYGFFLPTALLVFILCLVYSVLPGSQVVLLLGICYFGLGYFVYKYQLLYSMDQPQHATGRAWTMICRRIVLGLVSFHVVMLAILVLREAFVEAALIVPLTLLTLWYNWDYHRRFVPLTRFIALRSINRESDPGRQSNPDQSEQQPMRLARRMSTIDEDREKGMSFINPSLVVPLEQPWIYQDPPPPISPSESAVDGSSIRDNGNNYENANANANNNTRPGISGGYNTDTAVSTSSSFSLGDTHVWRDGGEDNA

SEQ ID NO: 33558 - DNA, 4960 bp, Muscodor strobelii
  misc_feature: SGI EST ID NO. CUFF.79503.1
  misc_feature: Variant of the nucleotide sequence at SEQ ID NO 33556
cctgggcctggggtctctatttgaggttaccatggcgcctttgggataggagtctacggtctgtttgggtggtcctttggcgcttcactttgtccatctggaggcatttctcgggcgcagcgtggatctctggttgtgtcggtctggggttgggtcttgtacgttgggcagattagagaccagagtggtcgggtgttttctgttcaatgttatatataaatactaattccaatacactgccgaatcatcagaatagctgcttttagaataatcacgtgcatgtacctccaatataatagctaggcgatgaacggaatagatatcagcgcagcactcttgacgatctagtaggcatgtggcggataaatctgcgcgtgcagcttcgatcattaaaagacaatgtacagaatctatttatgaatatcatcaatgagctgagcgatgcaatcgaatgggcttcggtcatgcctggtctgtggacacatgcaggtatatctaatttcccgggtaggctctaccaagcggagacgggcgaggcaggcagtcaggtacaggggtccagggtatgacgcatcacgtcactttcatgctttcacttgcccccactagagcctctgagacgtgatgtgtgtgcctgctccaggcgtcttcgtaacccagaagaagccggcggcgtttgcgaacacgatgacatacacacatacccgtatccttcacctacggtagcccgagacctcacacgcgccaggcgttgcccccttgtcgagcatcatccagcatggcgcccgacgacgacgacgatatacccgactactgcaaaggcgtacacgccctggatcctgggaataaagacatctacgtccagctggtcctgtcctttggcttgggcatcactgccttcattgccttctgcatactccggccacgatggaagaccctctacgccgcgcgaaagcggcatacgaatcccgagatcgcgttgcccgtcctgcctgatagctttctaggatggatcccagcattgtacaaagtgaccgaggatcaagtgctggcctcggccgggctggatgcctttgtgttcctctccttcttcaagatggccctcaagctgttcgtcaccatgttcttcttctccgtcgccgtactgtggcccgtccacaggacctttgccggcgacctcgacccgaaccaccgaaatgcctcaatgatacatactgattcgatcgccaatgacctatacttctccactctgaagcacggtgctaaggacagaagctggatctgggcatacctcatattcacttggttcttctcagccctgaccatctacttcatgaacgccgagacatacagggtcgtggaaatccgccaggactatctcggcacccaatcgaccgtaactgatcgcacctttcgcttgactgggattccgcaggacttgaggacggaggataagatcaaagaatttgtagagaatctcgagataggtcacgtcagaaaggtcgcgctctgtcggaattggaccgaaatagacgctttcatggctcagcgtcaaaacacgcttcgcaaacttgaagaggcatggactgcctacagggcgcagaaggccgctgtgtcgagaaccgtcgtggacgccgaggccatccagggtacccaccagcctgatatcgaggaaggtgacgacacgaatgagaatgggcggctgctccacgatgaagacgacccacacaacttattaggcgaaagagtgcgaccgaagatccggctgcgattcggttttcttaagatgcgaaaccgtaaggttgacgccctagattactatgaggaaagtcttcgccggcttgatgagaaaatccacgctgcgaggaaaaaggaatatccaccgactgatacggcatttgtgaccatggactcaatcgccgcctgtcaaatggctattcaagctgtaatcgatcctcgaccgggacggctgcttacgaagccagcgccagcgccctctgatgtcatttggaaaaatacatacgcgccgcgataccggagaagactgcagtcggcaactgtcaccatatttatcatattgctgactattctctggttcttcccggttgcaatattggcccagttgctcagcatctgcaatatcaacaatgtggcaccccaattcggcgaatttctcgaggatcatgatgtgacccaagtcctcgttcgaaccggcttgccaaccctggtggtatccttgctcaacgtgctcgtcccgttcctctatgattacctatcgaatattcaaggtgcgatatcgcagggcgacgttgaactttcggcgatatcgaagaacttcttctttgtcttcttcaacattttcgttgtgtacgccgtctcgggttctgctgctatggcagaattctggcagattatcagagactcgctgagggatacaagccagattgcggcaaaaatagcccagtcgattcaaaagctcaacaatttctacctcaactttattatgctccaaggcttcggtttgttccccttcaagctactccaatttggaagcgtgtctatgtatccaatataccggatgggagccaaaacaccacgcgattttgctggacttgttgaaccgaccctgttcaactacggattcttcttgccgaccgcactgctcgttttcattctttgtctggtttatagcgtcctgccaggctctcaagtggtcttgctactaggtatttgttacttcggcttgggatactttgtttacaagtatcagttgttgtactccatggatcaacctcaacatgcaacgggtagagcttggactatgatctgtcgtcgcatcgtcctcggtcttgtatccttccatgtcgtcatgcttgcaatccttgtactgagagaagcttttgttgaggcagcacttattgtgccactaactcttctgaccctttggtataactgggactatcatcgtcgtttcgtccctctgacccggttcatcgcccttcgtagcattaaccgcgagtcagatccgggacgtcagagcaacccagaccaaagcgagcagcaaccaatgcgacttgctcgacggatgagcactattgatgaggatagagagaagggtatgtcgttcatcaatccatcattagtggtcccgctcgaacagccttggatctaccaagatcctcctccaccaattagtccttccgaatccgctgtcgatggatcgagcatacgcgataatgggaataattacgagaatgcaaacgcaaacgcaaacaataatacccggcctggaatatcaggcggctataatacggacacggcggtaagcacgtcgagctcatttagtttaggagacactcacgtgtggcgagacggtggtgaagataacgcataagagacctaggatgaacagactgatcttgtgtataatcattaataatacccattgtttcattagtagttgaaaaaaacgaagtccttagaactcgtttcagatcaatctggccgtttggctgtccgttgacggccgcttgtgaggcgagaccaaacatcagaatctttcggtcatgtgtccatccacacttcgaactagagtaacaacaattttttcctagccggtcgccagcgggatcaccgctacggccacatcccatcaaacatgaaaagccagtcatcccaatacttttggtaccgcccagctaaccagcttctgccatcaccggacccgactctaaacggccgtgaataaataccgtctctttggaggtgtctcttcaacgcgatattgatgctgaaactacttggactgacgcccacgaaataatcggcctggagcagcaccgcaaaatccacaagagcctgctggtcccagctcatcgcccgtagatcctcgagatctcgacccttgactagatcgtatttggacttgacgtctagatgcaggtgtctttttgcgtctgccgcgaatttgtggctttctttttcgctccctgatgctagatatgctacacgacctctgaatccttgtttttcggcctcgtggaagtagcccttgctttggttttcgtatgtaggccattgggatagggcgtcttcttctgttcgtaggtggatgcctaggaatgcatgattgggtcttttgacgctcgtttcttggttattaatatgtgatattgtcactgcgtgttctctcgtagcgtgcacaattttatcagcgagctgtagtatatcctctcgaatcctcagcagtccgccaaaggttgacgcgaactccggtccatcgtagtagattggccaatcccagagtacgccccatgctagacgaacgagcattgggttatcccagcttggcggttgtaggttcagttcttcctctctgtcacgcatccatttttgaaatgaagagccgaattgagagggatatctatggggatctctgacgtcgcaaccacctcgacttccgccgaagttcttgggtgttatccggtggatcatacgcgatgggtctgttatgccctcgcgctgcgttttggcggttacgccgggaattagatccagtcctgcgttctctcctgcaatgggggctgggaagagggatatgtgtggacaggcttctgtaaatgcatcacggaaatgggattcggagaacatgtagcctagcggtttatactctttgaagaggtttgcgcgatcggtagtggatcttgttcggatcatgggcatctgaagaccggttgcgcccgcttcgatggcgtagtggagacatgttaggatgtagtttcggatgtttcctgggccgcctgagttgttgtcgcaaaggaagacgaggcctgggactagggaggtttggacttgttctgcgcagagacgttttaggggccaggatatgaatggggcgttgggagtcgagaggtcgatacttggtggtttaggaggattaaagcctgagattatgtctgtg

SEQ ID NO: 33559 - DNA, 1608 bp, Muscodor strobelii
  misc_feature: SGI cDNA ID NO. 571580
  misc_feature: Encodes the peptide sequence at SEQ ID NO 33560
atgcgaaaccgtaaggttgacgccctagattactatgaggaaagtcttcgccggcttgatgagaaaatccacgctgcgaggaaaaaggaatatccaccgactgatacggcatttgtgaccatggactcaatcgccgcctgtcaaatggctattcaagctgtaatcgatcctcgaccgggacggctgcttacgaagccagcgccagcgccctctgatgtcatttggaaaaatacatacgcgccgcgataccggagaagactgcagtcggcaactgtcaccatatttatcatattgctgactattctctggttcttcccggttgcaatattggcccagttgctcagcatctgcaatatcaacaatgtggcaccccaattcggcgaatttctcgaggatcatgatgtgacccaagtcctcgttcgaaccggcttgccaaccctggtggtatccttgctcaacgtgctcgtcccgttcctctatgattacctatcgaatattcaaggtgcgatatcgcagggcgacgttgaactttcggcgatatcgaagaacttcttctttgtcttcttcaacattttcgttgtgtacgccgtctcgggttctgctgctatggcagaattctggcagattatcagagactcgctgagggatacaagccagattgcggcaaaaatagcccagtcgattcaaaagctcaacaatttctacctcaactttattatgctccaaggcttcggtttgttccccttcaagctactccaatttggaagcgtgtctatgtatccaatataccggatgggagccaaaacaccacgcgattttgctggacttgttgaaccgaccctgttcaactacggattcttcttgccgaccgcactgctcgttttcattctttgtctggtttatagcgtcctgccaggctctcaagtggtcttgctactaggtatttgttacttcggcttgggatactttgtttacaagtatcagttgttgtactccatggatcaacctcaacatgcaacgggtagagcttggactatgatctgtcgtcgcatcgtcctcggtcttgtatccttccatgtcgtcatgcttgcaatccttgtactgagagaagcttttgttgaggcagcacttattgtgccactaactcttctgaccctttggtataactgggactatcatcgtcgtttcgtccctctgacccggttcatcgcccttcgtagcattaaccgcgagtcagatccgggacgtcagagcaacccagaccaaagcgagcagcaaccaatgcgacttgctcgacggatgagcactattgatgaggatagagagaagggtatgtcgttcatcaatccatcattagtggtcccgctcgaacagccttggatctaccaagatcctcctccaccaattagtccttccgaatccgctgtcgatggatcgagcatacgcgataatgggaataattacgagaatgcaaacgcaaacgcaaacaataatacccggcctggaatatcaggcggctataatacggacacggcggtaagcacgtcgagctcatttagtttaggagacactcacgtgtggcgagacggtggtgaagataacgcataa

SEQ ID NO: 33560 - protein, 535 aa, Muscodor strobelii
  misc_feature: SGI Peptide ID NO. 571580
  misc_feature (23)..(446): Pfam Id: PF02714 Pfam Desc: Domain of function DUF221
  misc_feature (23)..(408): Pfam Id: PF02714 Pfam Desc: Domain of function DUF221
  misc_feature (2)..(534): NCBI GI: 156036246 Blast Desc: SS1G_12811 [Sclerotinia sclerotiorum 1980] gi|154698217|gb|EDN97955.1| SS1G_12811 [Sclerotinia sclerotiorum 1980]
  misc_feature (1)..(528): NCBI GI: 171695740 Blast Desc: protein product [Podospora anserina] gi|170948112|emb|CAP60276.1| protein product [Podospora anserina]
  misc_feature (1)..(530): NCBI GI: 85115833 Blast Desc: NCU00789 [Neurospora crassa OR74A] gi|28926743|gb|EAA35709.1| conserved [Neurospora crassa OR74A] gi|38636392|emb|CAE81929.1| conserved [Neurospora crassa]
  misc_feature (1)..(475): NCBI GI: 116181196 Blast Desc: CHGG_01226 [Chaetomium globosum CBS 148.51] gi|88185523|gb|EAQ92991.1| CHGG_01226 [Chaetomium globosum CBS 148.51]
  misc_feature (1)..(534): NCBI GI: 256726792 Blast Desc: NECHADRAFT_34365 [Nectria haematococca mpVI 77-13-4]
  misc_feature (1)..(488): NCBI GI: 145601251 Blast Desc: MGG_08731 [Magnaporthe grisea 70-15] gi|145009275|gb|EDJ93986.1| MGG_08731 [Magnaporthe grisea 70-15]
  misc_feature (1)..(534): NCBI GI: 46136367 Blast Desc: FG09699.1 [Gibberella zeae PH-1]
  misc_feature (1)..(489): NCBI GI: 189193929 Blast Desc: PTRG_02970 [Pyrenophora tritici-repentis Pt-1C-BFP] gi|187978867|gb|EDU45493.1| PTRG_02970 [Pyrenophora tritici-repentis Pt-1C-BFP]
  misc_feature (2)..(415): NCBI GI: 154289029 Blast Desc: BC1G_16277 [Botryotinia fuckeliana B05.10] gi|150851635|gb|EDN26828.1| BC1G_16277 [Botryotinia fuckeliana B05.10]
  misc_feature (1)..(461): NCBI GI: 240111693 Blast Desc: CPC735_011560 [Coccidioides posadasii C735 delta SOWgp]
MRNRKVDALDYYEESLRRLDEKIHAARKKEYPPTDTAFVTMDSIAACQMAIQAVIDPRPGRLLTKPAPAPSDVIWKNTYAPRYRRRLQSATVTIFIILLTILWFFPVAILAQLLSICNINNVAPQFGEFLEDHDVTQVLVRTGLPTLVVSLLNVLVPFLYDYLSNIQGAISQGDVELSAISKNFFFVFFNIFVVYAVSGSAAMAEFWQIIRDSLRDTSQIAAKIAQSIQKLNNFYLNFIMLQGFGLFPFKLLQFGSVSMYPIYRMGAKTPRDFAGLVEPTLFNYGFFLPTALLVFILCLVYSVLPGSQVVLLLGICYFGLGYFVYKYQLLYSMDQPQHATGRAWTMICRRIVLGLVSFHVVMLAILVLREAFVEAALIVPLTLLTLWYNWDYHRRFVPLTRFIALRSINRESDPGRQSNPDQSEQQPMRLARRMSTIDEDREKGMSFINPSLVVPLEQPWIYQDPPPPISPSESAVDGSSIRDNGNNYENANANANNNTRPGISGGYNTDTAVSTSSSFSLGDTHVWRDGGEDNA

SEQ ID NO: 33561 - DNA, 4960 bp, Muscodor strobelii; identical to SEQ ID NO: 33558
  misc_feature: SGI EST ID NO. CUFF.79503.1
  misc_feature: Variant of the nucleotide sequence at SEQ ID NO 33559

SEQ ID NO: 33562 - DNA, 1434 bp, Muscodor strobelii
  misc_feature: SGI cDNA ID NO. 571581
  misc_feature: Encodes the peptide sequence at SEQ ID NO 33563
atggcaacccaacatcaccataaacgccgtctcgggctctccatcatcactctcctagtcctagtattaatatggcaccaccgactcgccaataacctcaaacaacctgccacagacataatctcaggctttaatcctcctaaaccaccaagtatcgacctctcgactcccaacgccccattcatatcctggcccctaaaacgtctctgcgcagaacaagtccaaacctccctagtcccaggcctcgtcttcctttgcgacaacaactcaggcggcccaggaaacatccgaaactacatcctaacatgtctccactacgccatcgaagcgggcgcaaccggtcttcagatgcccatgatccgaacaagatccactaccgatcgcgcaaacctcttcaaagagtataaaccgctaggctacatgttctccgaatcccatttccgtgatgcatttacagaagcctgtccacacatatccctcttcccagcccccattgcaggagagaacgcaggactggatctaattcccggcgtaaccgccaaaacgcagcgcgagggcataacagacccatcgcgtatgatccaccggataacacccaagaacttcggcggaagtcgaggtggttgcgacgtcagagatccccatagatatccctctcaattcggctcttcatttcaaaaatggatgcgtgacagagaggaagaactgaacctacaaccgccaagctgggataacccaatgctcgttcgtctagcatggggcgtactctgggattggccaatctactacgatggaccggagttcgcgtcaacctttggcggactgctgaggattcgagaggatatactacagctcgctgataaaattgtgcacgctacgagagaacacgcagtgacaatatcacatattaataaccaagaaacgagcgtcaaaagacccaatcatgcattcctaggcatccacctacgaacagaagaagacgccctatcccaatggcctacatacgaaaaccaaagcaagggctacttccacgaggccgaaaaacaaggattcagaggtcgtgtagcatatctagcatcagggagcgaaaaagaaagccacaaattcgcggcagacgcaaaaagacacctgcatctagacgtcaagtccaaatacgatctagtcaagggtcgagatctcgaggatctacgggcgatgagctgggaccagcaggctcttgtggattttgcggtgctgctccaggccgattatttcgtgggcgtcagtccaagtagtttcagcatcaatatcgcgttgaagagacacctccaaagagacggtatttattcacggccgtttagagtcgggtccggtgatggcagaagctggttagctgggcggtaccaaaagtattgggatgactggcttttcatgtttgatgggatgtggccgtag

SEQ ID NO: 33563 - protein, 477 aa, Muscodor strobelii
  misc_feature: SGI Peptide ID NO. 571581
  misc_feature (8)..(477): NCBI GI: 85090647 Blast Desc: NCU09522 [Neurospora crassa OR74A] gi|28919886|gb|EAA29281.1| [Neurospora crassa OR74A]
  misc_feature (13)..(477): NCBI GI: 171680996 Blast Desc: protein product [Podospora anserina] gi|170940456|emb|CAP65683.1| protein product [Podospora anserina]
  misc_feature (90)..(477): NCBI GI: 116191425 Blast Desc: CHGG_05430 [Chaetomium globosum CBS 148.51] gi|88181343|gb|EAQ88811.1| CHGG_05430 [Chaetomium globosum CBS 148.51]
  misc_feature (66)..(466): NCBI GI: 154302925 Blast Desc: BC1G_09206 [Botryotinia fuckeliana B05.10] gi|150855130|gb|EDN30322.1| BC1G_09206 [Botryotinia fuckeliana B05.10]
  misc_feature (61)..(436): NCBI GI: 145614594 Blast Desc: MGG_04525 [Magnaporthe grisea 70-15] gi|145021498|gb|EDK05627.1| MGG_04525 [Magnaporthe grisea 70-15]
  misc_feature (58)..(436): NCBI GI: 154305074 Blast Desc: BC1G_08627 [Botryotinia fuckeliana B05.10] gi|150853790|gb|EDN28982.1| BC1G_08627 [Botryotinia fuckeliana B05.10]
  misc_feature (109)..(436): NCBI GI: 156039860 Blast Desc: SS1G_12066 [Sclerotinia sclerotiorum 1980] gi|154696123|gb|EDN95861.1| SS1G_12066 [Sclerotinia sclerotiorum 1980]
  misc_feature (1)..(436): NCBI GI: 156045327 Blast Desc: SS1G_09852 [Sclerotinia sclerotiorum 1980] gi|154694247|gb|EDN93985.1| SS1G_09852 [Sclerotinia sclerotiorum 1980]
  misc_feature (66)..(435): NCBI GI: 171696232 Blast Desc: protein product [Podospora anserina] gi|170948358|emb|CAP60522.1| protein product [Podospora anserina]
  misc_feature (246)..(442): NCBI GI: 154295990 Blast Desc: BC1G_13148 [Botryotinia fuckeliana B05.10] gi|150843800|gb|EDN18993.1| BC1G_13148 [Botryotinia fuckeliana B05.10]
MATQHHHKRRLGLSIITLLVLVLIWHHRLANNLKQPATDIISGFNPPKPPSIDLSTPNAPFISWPLKRLCAEQVQTSLVPGLVFLCDNNSGGPGNIRNYILTCLHYAIEAGATGLQMPMIRTRSTTDRANLFKEYKPLGYMFSESHFRDAFTEACPHISLFPAPIAGENAGLDLIPGVTAKTQREGITDPSRMIHRITPKNFGGSRGGCDVRDPHRYPSQFGSSFQKWMRDREEELNLQPPSWDNPMLVRLAWGVLWDWPIYYDGPEFASTFGGLLRIREDILQLADKIVHATREHAVTISHINNQETSVKRPNHAFLGIHLRTEEDALSQWPTYENQSKGYFHEAEKQGFRGRVAYLASGSEKESHKFAADAKRHLHLDVKSKYDLVKGRDLEDLRAMSWDQQALVDFAVLLQADYFVGVSPSSFSINIALKRHLQRDGIYSRPFRVGSGDGRSWLAGRYQKYWDDWLFMFDGMWP

SEQ ID NO: 33564 - DNA, 5367 bp, Muscodor strobelii
  misc_feature: SGI EST ID NO. CUFF.79504.0
  misc_feature: Variant of the nucleotide sequence at SEQ ID NO 33562
cacagacataatctcaggctttaatcctcctaaaccaccaagtatcgacctctcgactcccaacgccccattcatatcctggcccctaaaacgtctctgcgcagaacaagtccaaacctccctagtcccaggcctcgtcttcctttgcgacaacaactcaggcggcccaggaaacatccgaaactacatcctaacatgtctccactacgccatcgaagcgggcgcaaccggtcttcagatgcccatgatccgaacaagatccactaccgatcgcgcaaacctcttcaaagagtataaaccgctaggctacatgttctccgaatcccatttccgtgatgcatttacagaagcctgtccacacatatccctcttcccagcccccattgcaggagagaacgcaggactggatctaattcccggcgtaaccgccaaaacgcagcgcgagggcataacagacccatcgcgtatgatccaccggataacacccaagaacttcggcggaagtcgaggtggttgcgacgtcagagatccccatagatatccctctcaattcggctcttcatttcaaaaatggatgcgtgacagagaggaagaactgaacctacaaccgccaagctgggataacccaatgctcgttcgtctagcatggggcgtactctgggattggccaatctactacgatggaccggagttcgcgtcaacctttggcggactgctgaggattcgagaggatatactacagctcgctgataaaattgtgcacgctacgagagaacacgcagtgacaatatcacatattaataaccaagaaacgagcgtcaaaagacccaatcatgcattcctaggcatccacctacgaacagaagaagacgccctatcccaatggcctacatacgaaaaccaaagcaagggctacttccacgaggccgaaaaacaaggattcagaggtcgtgtagcatatctagcatcagggagcgaaaaagaaagccacaaattcgcggcagacgcaaaaagacacctgcatctagacgtcaagtccaaatacgatctagtcaagggtcgagatctcgaggatctacgggcgatgagctgggaccagcaggctcttgtggattttgcggtgctgctccaggccgattatttcgtgggcgtcagtccaagtagtttcagcatcaatatcgcgttgaagagacacctccaaagagacggtatttattcacggccgtttagagtcgggtccggtgatggcagaagctggttagctgggcggtaccaaaagtattgggatgactggcttttcatgtttgatgggatgtggccgtagcggtgatcccgctggcgaccggctaggaaaaaattgttgttactctagttcgaagtgtggatggacacatgaccgaaagattctgatgtttggtctcgcctcacaagcggccgtcaacggacagccaaacggccagattgatctgaaacgagttctaaggacttcgtttttttcaactactaatgaaacaatgggtattattaatgattatacacaagatcagtctgttcatcctaggtctcttatgcgttatcttcaccaccgtctcgccacacgtgagtgtctcctaaactaaatgagctcgacgtgcttaccgccgtgtccgtattatagccgcctgatattccaggccgggtattattgtttgcgtttgcgtttgcattctcgtaattattcccattatcgcgtatgctcgatccatcgacagcggattcggaaggactaattggtggaggaggatcttggtagatccaaggctgttcgagcgggaccactaatgatggattgatgaacgacatacccttctctctatcctcatcaatagtgctcatccgtcgagcaagtcgcattggttgctgctcgctttggtctgggttgctctgacgtcccggatctgactcgcggttaatgctacgaagggcgatgaaccgggtcagagggacgaaacgacgatgatagtcccagttataccaaagggtcagaagagttagtggcacaataagtgctgcctcaacaaaagcttctctcagtacaaggattgcaagcatgacgacatggaaggatacaagaccgaggacgatgcgacgacagatcatagtccaagctctacccgttgcatgttgaggttgatccatggagtacaacaactgatacttgtaaacaaagtatcccaagccgaagtaacaaatacctagtagcaagaccacttgagagcctggcaggacgctataaaccagacaaagaatgaaaacgagcagtgcggtcggcaagaagaatccgtagttgaacagggtcggttcaacaagtccagcaaaatcgcgtggtgttttggctcccatccggtatattggatacatagacacgcttccaaattggagtagcttgaaggggaacaaaccgaagccttggagcataataaagttgaggtagaaattgttgagcttttgaatcgactgggctatttttgccgcaatctggcttgtatccctcagcgagtctctgataatctgccagaattctgccatagcagcagaacccgagacggcgtacacaacgaaaatgttgaagaagacaaagaagaagttcttcgatatcgccgaaagttcaacgtcgccctgcgatatcgcaccttgaatattcgataggtaatcatagaggaacgggacgagcacgttgagcaaggataccaccagggttggcaagccggttcgaacgaggacttgggtcacatcatgatcctcgagaaattcgccgaattggggtgccacattgttgatattgcagatgctgagcaactgggccaatattgcaaccgggaagaaccagagaatagtcagcaatatgataaatatggtgacagttgccgactgcagtcttctccggtatcgcggcgcgtatgtatttttccaaatgacatcagagggcgctggcgctggcttcgtaagcagccgtcccggtcgaggatcgattacagcttgaatagccatttgacaggcggcgattgagtccatggtcacaaatgccgtatcagtcggtggatattcctttttcctcgcagcgtggattttctcatcaagccggcgaagactttcctcatagtaatctagggcgtcaaccttacggtttcgcatcttaagaaaaccgaatcgcagccggatcttcggtcgcactctttcgcctaataagttgtgtgggtcgtcttcatcgtggagcagccgcccattctcattcgtgtcgtcaccttcctcgatatcaggctggtgggtaccctggatggcctcggcgtccacgacggttctcgacacagcggccttctgcgccctgtaggcagtccatgcctcttcaagtttgcgaagcgtgttttgacgctgagccatgaaagcgtctatttcggtccaattccgacagagcgcgacctttctgacgtgacctatctcgagattctctacaaattctttgatcttatcctccgtcctcaagtcctgcggaatcccagtcaagcgaaaggtgcgatcagttacggtcgattgggtgccgagatagtcctggcggatttccacgaccctgtatgtctcggcgttcatgaagtagatggtcagggctgagaagaaccaagtgaatatgaggtatgcccagatccagcttctgtccttagcaccgtgcttcagagtggagaagtataggtcattggcgatcgaatcagtatgtatcattgaggcatttcggtggttcgggtcgaggtcgccggcaaaggtcctgtggacgggccacagtacggcgacggagaagaagaacatggtgacgaacagcttgagggccatcttgaagaaggagaggaactgtgacggtgattagagcgagccgcgagccatggtggacaggtggacaggtccacataccacaaaggcatccagcccggccgaggccagcacttgatcctcggtcactttgtacaatgctgggatccatcctagaaagctatcaggcaggacgggcaacgcgatctcgggattcgtatgccgctttcgcgcggcgtagagggtcttccatcgtggccggagtatctacagaacggggcattagatacagactgaggtacttcgggtggcatcggatggcacgggagtgctcacgcagaaggcaatgaaggcagtgatgcccaagccaaaggacaggaccagctggacgtagatgtctttattcccaggatccagggcgtgtacgcctttgcagtagtcgggtatatcgtcgtcgtcgtcgggcgccatgctggatgatgctcgacaagggggcaacgcctggcgcgtgtgaggtctcgggctaccgtaggtgaaggatacgggtatgtgtgtatgtcatcgtgttcgcaaacgccgccggcttcttctgggttacgaagacgcctggagcaggcacacacatcacgtctcagaggctctagtgggggcaagtgaaagcatgaaagtgacgtgatgcgtcataccctggacccctgtacctgactgcctgcctcgcccgtctccgcttggtagagcctacccgggaaattagatatacctgcatgtgtccacagaccaggcatgaccgaagcccattcgattgcatcgctcagctcattgatgatattcataaatagattctgtacattgtcttttaatgatcgaagctgcacgcgcagatttatccgccacatgcctactagatcgtcaagagtgctgcgctgatatctattccgttcatcgcctagctattatattggaggtacatgcacgtgattattctaaaagcagctattctgatgattcggcagtgtattggaattagtatttatatataacattgaacagaaaacacccgaccactctggtctctaatctgcccaacgtacaagacccaaccccagaccgacacaaccagagatccacgctgcgcccgagaaatgcctccagatggacaaagtgaagcgccaaaggaccacccaaacagaccgtagactcctatcccaaaggcgccatggtaacctcaaatagagaccccaggcccaggcgctgattgttcaatctccgccggatttccattaaaagcaatcaaattcgcattgctgactatcgaggccctcgcgtgacatgaggtaggcagccaacccagcaacatgagggcttgccatgcttgtgccagacatactagcatacgcctggtcgttatcgtggctggcgctctgaacgtcaagtcctggcgcaaagatatcgatacagtcgccatagttggagaaccaggcgcggttgtcatgatcatctatggccccgacaacgattgcctccttg

SEQ ID NO: 33565 - DNA, 1206 bp, Muscodor strobelii
  misc_feature: SGI cDNA ID NO. 571582
  misc_feature: Encodes the peptide sequence at SEQ ID NO 33566
atggacggactctccatatcggagttaatgtcgccttgggctacgcgatttcagcaggatgatgagtatgcgcttttccgagtcaatggagttattcattcagggatggcccccttcccgcgtctggatcctacgtattatgacgacgaacccgccgccgaaagtttccaacgtcccaaagacgacgcagacttagacaagatatttctcagcgaagtgtatcagaggcggcgcctcagaggccttacaacgtggcagctcagaaccgatatttgtctttttcagagcgttatgggcatcatatttggtggacatactccggaagtcaagtcacagcgtcagattgggactcttcctcgtttactggaacatgtcaacgccgtaggcggtactcagacccttgaggatacttgcaatcttattgcgaagaccgaatcaattactatcaacgagaataactggtttcattttctgaaaagggatagatggtatgcatcggacagcttaaatccagacgatacaaagagctgggaagtattgagttttgctctcgaattggccaatcgaatgcttcaggcaatggttctagaccagcatgagtggctacagacaatactctatggccgtttagatcattggtcaactttcgatcctgccgtatctcgtaatagaattgtgctcttatcgcttcaagaagagcgtcggattgcagggcagttgaatatacccgttgtgggagagtatatgacgagcctgagccccgaagattggaaagtaaggctagaacacctgttgtcaaaacagctgtggtatgtgattgattctgcaatacgtacggatgctctggcgctgtgcgacaacggcaacgatttgatcgctctgggttccaatcagatattatccttgcgcgatacggcaatgaccctctcagaacgatgtagaggctatctgacattagcgagggtgattttacatgagttgatgcatgcaatcatgttcgttcgtatcacagaggataggggccgcccaggatactgcttgcgagatatcagtatcagctctttagaaggggaaccagcagtggatttcgcgaccgaagctgaacttggtcgggcaatggaaatcagggtgtttggtggtggtgagtacgctttcagcaacccccagctcatcttccaaacgacgcacaactgcaaagtctgttga

SEQ ID NO: 33566 - protein, 401 aa, Muscodor strobelii
  misc_feature: SGI Peptide ID NO. 571582
  misc_feature (13)..(211): NCBI GI: 85089861 Blast Desc: NCU09292 [Neurospora crassa OR74A] gi|28919473|gb|EAA28908.1| NCU09292 [Neurospora crassa OR74A]
MDGLSISELMSPWATRFQQDDEYALFRVNGVIHSGMAPFPRLDPTYYDDEPAAESFQRPKDDADLDKIFLSEVYQRRRLRGLTTWQLRTDICLFQSVMGIIFGGHTPEVKSQRQIGTLPRLLEHVNAVGGTQTLEDTCNLIAKTESITINENNWFHFLKRDRWYASDSLNPDDTKSWEVLSFALELANRMLQAMVLDQHEWLQTILYGRLDHWSTFDPAVSRNRIVLLSLQEERRIAGQLNIPVVGEYMTSLSPEDWKVRLEHLLSKQLWYVIDSAIRTDALALCDNGNDLIALGSNQILSLRDTAMTLSERCRGYLTLARVILHELMHAIMFVRITEDRGRPGYCLRDISISSLEGEPAVDFATEAELGRAMEIRVFGGGEYAFSNPQLIFQTTHNCKVC

SEQ ID NO: 33567 - DNA, 438 bp, Muscodor strobelii
  misc_feature: SGI EST ID NO. CUFF.79341.0
  misc_feature: Variant of the nucleotide sequence at SEQ ID NO 33565
cctggtcatttctaacacatcgtgaaggacaatactctatggccgtttagatcattggtcaactttcgatcctgccgtatctcgtaatagaattgtgctcttatcgcttcaagaagagcgtcggattgcagggcagttgaatatacccgttgtgggagagtatatgacgagcctgagccccgaagattggaaagtaaggctagaacacctgttgtcaaaacagctgtggtatgtgattgattctgcaatacgtacggatgctctggcgctgtgcgacaacggcaacgatttgatcgctctgggttccaatcagatattatccttgcgcgatacggcaatgaccctctcagaacgatgaggctatctgacattagcgagggtgattttacatgagttgatgcatgcaatcatgttcgttcgtatcacagaggatagggg

SEQ ID NO: 33568 - DNA, 1422 bp, Muscodor strobelii
  misc_feature: SGI cDNA ID NO. 571583
  misc_feature: Elevated expression when VOC is produced
  misc_feature: Encodes the peptide sequence at SEQ ID NO 33569
atgcacgatgcaagcctgaattatacgacggcagaagccgggaacccattcgtcgatgggtggtacgcagacccggatacggaattctatgatgaaaaattttgggtatttcctacagcttcctatgattatgacgagcaaacgtatctcgacgccttctccagtagtgatttgatcaactgggaaaagcatccgaatgttctgacgacagacgatgtaagctgggcaacgagggcagtgtgggcgccggcaccaatttcgagaaatggaaaatattatctttacttcggagcaaacgacatacaagagggcgaacccgaagaggggctggtcggtggcatcggtgttggcgtcgcggaaaagccagacggtccttatattgatgccatagggaagccgttaattggagagtatttcaacggtgcccagcccattgaccaagatgtcttcattgatgatgacgggcaagcttacatattttatggtggccatggccactgtaatatggcgaagttgaacgatgacatgatttccattggcaaattcagtaatggctcgtcatacattgagatcacacccgaaaactacgtcgagggtcctcaaatgctgaagcggaacggcaaatactaccttatgtggtcagagggaggctggaccgggcccgactatagcgtgtcttacgccatgtccgactcgatcactggaccattcaaaaaagtggctaagattctcgagcaggattctgcagtagcaaaaggcagtggccacaatggagtcatcaagattccgggaacagatattttctacatcatataccatcggcgtccgctgagcgaaaccgacggcaatcaccgcgagctagcatatgaccgtatgtactttaacgacgacggcaccatcgtccccattaaaatgttggtcaaggacaattttgccgatggaaactcgatcggttggaaacaatacggtagcggaatgtcagtgacgagccaaaggcttacaagttctggtgcttccgccgctatgctcgatacgaattttggagatctgttgtatgacgccactatcgctttcccatcttcggccgaggcaggactcatattccgcgcagcgaatgtgacagatgattttgggcagttgaatggctattatgccaagctttcgacgttgggagacgtaacactggagaagttcattgatggagcttcgtcaatattaggccagggcagtgcagcggtcgtctcggacacggaataccatattagagtcaccgctttagactctacttttcaactatttgttgaagacatggagagccctgttctcactgccacagacaatacattttcgacaggtgcagatggcgttcgcgcatctgcagcaggaataaagtttggtgccatttccgtggcgaagccatga

SEQ ID NO: 33569 - protein, 473 aa, Muscodor strobelii
  misc_feature: SGI Peptide ID NO. 571583
  misc_feature (13)..(300): Pfam Id: PF04616 Pfam Desc: Glycosyl hydrolases family 43
  misc_feature (4)..(471): NCBI GI: 117164657 Blast Desc: glycosyl hydrolase [Streptomyces ambofaciens ATCC 23877]
  misc_feature (4)..(472): NCBI GI: 145614680 Blast Desc: MGG_11400 [Magnaporthe grisea 70-15] gi|145021583|gb|EDK05712.1| MGG_11400 [Magnaporthe grisea 70-15]
  misc_feature (13)..(473): NCBI GI: 115378379 Blast Desc: arabinan endo-1,5-alpha-L-arabinosidase A [Stigmatella aurantiaca DW4/3-1] gi|115364614|gb|EAU63686.1| arabinan endo-1,5-alpha-L-arabinosidase A [Stigmatella aurantiaca DW4/3-1]
  misc_feature (13)..(308): NCBI GI: 282877094 Blast Desc: glycosyl hydrolase, family 43 [Prevotella buccalis ATCC 35310] gi|281300776|gb|EFA93103.1| glycosyl hydrolase, family 43 [Prevotella buccalis ATCC 35310]
  misc_feature (15)..(305): NCBI GI: 237717354 Blast Desc: arabinan endo-1,5-alpha-L-arabinosidase A [Bacteroides sp. D1] gi|229443337|gb|EEO49128.1| arabinan endo-1,5-alpha-L-arabinosidase A [Bacteroides sp. D1]
  misc_feature (15)..(305): NCBI GI: 237720301 Blast Desc: arabinan endo-1,5-alpha-L-arabinosidase A [Bacteroides sp. 2_2_4] gi|262406119|ref|ZP_06082669.1| arabinan endo-1,5-alpha-L-arabinosidase A [Bacteroides sp. 2_1_22] A sp. A
  misc_feature (12)..(305): NCBI GI: 253575583 Blast Desc: glycoside hydrolase [Paenibacillus sp. oral taxon 786 str. D14] gi|251844921|gb|EES72933.1| glycoside hydrolase [Paenibacillus sp. oral taxon 786 str. D14]
  misc_feature (7)..(305): NCBI GI: 237720347 Blast Desc: arabinan endo-1,5-alpha-L-arabinosidase A [Bacteroides sp. 2_2_4] gi|229450098|gb|EEO55889.1| arabinan endo-1,5-alpha-L-arabinosidase A [Bacteroides sp. 2_2_4]
  misc_feature (7)..(305): NCBI GI: 160885337 Blast Desc: BACOVA_03336 [Bacteroides ovatus ATCC 8483] gi|156108959|gb|EDO10704.1| BACOVA_03336 [Bacteroides ovatus ATCC 8483]
  misc_feature (7)..(305): NCBI GI: 237716609 Blast Desc: arabinan endo-1,5-alpha-L-arabinosidase A [Bacteroides sp. D1] gi|262405385|ref|ZP_06081935.1| arabinan endo-1,5-alpha-L-arabinosidase A [Bacteroides sp. 2_1_22] A sp. A
  misc_feature (23)..(304): SWISSPROT Homolog: EC 3.2.1.55 Alpha-N-arabinofuranosidase
  misc_feature (23)..(304): SWISSPROT Homolog: EC 3.2.1.37 Xylan 1,4-beta-xylosidase
  misc_feature: Useful for introducing or modulating the production of volatile compounds
MHDASLNYTTAEAGNPFVDGWYADPDTEFYDEKFWVFPTASYDYDEQTYLDAFSSSDLINWEKHPNVLTTDDVSWATRAVWAPAPISRNGKYYLYFGANDIQEGEPEEGLVGGIGVGVAEKPDGPYIDAIGKPLIGEYFNGAQPIDQDVFIDDDGQAYIFYGGHGHCNMAKLNDDMISIGKFSNGSSYIEITPENYVEGPQMLKRNGKYYLMWSEGGWTGPDYSVSYAMSDSITGPFKKVAKILEQDSAVAKGSGHNGVIKIPGTDIFYIIYHRRPLSETDGNHRELAYDRMYFNDDGTIVPIKMLVKDNFADGNSIGWKQYGSGMSVTSQRLTSSGASAAMLDTNFGDLLYDATIAFPSSAEAGLIFRAANVTDDFGQLNGYYAKLSTLGDVTLEKFIDGASSILGQGSAAVVSDTEYHIRVTALDSTFQLFVEDMESPVLTATDNTFSTGADGVRASAAGIKFGAISVAKP

SEQ ID NO: 33570 - DNA, 3493 bp, Muscodor strobelii
  misc_feature: SGI EST ID NO. CUFF.79378.0
  misc_feature: Variant of the nucleotide sequence at SEQ ID NO 33568
cttgaggaacaagttctggagcgctcatcgtgaaccatggttttcagatgcccatgagcggtggtcaaatacgccatggggtaatttacaagcacgaatgaagcttcactcattttgggtcagcttcgcgaagaaagatcaactatcatgtgccctaattggtgaattcttcatgggaactctgccgtggcagaatcacgacgagtgcttgagtattttaacacgcactgcgcccatggtcaacggcgattggatctcatatgcactctgtttgttgatgatggcagcgattccgctacggcctaccataatagaagcagagaacagaatgcgagtaaacttcaaccttgtagcaggatttgaagcgcatgccagcggctgcccttcttcgattcattcacaccagtttgccacacgaggcacaagaccatccggcggttccagtcatgattttgatagacggcttagaggacggccttgcactcaattggattattgcctctttgttcaagatctcttgacgcatttggcgaatagaggatgcattgtatctgtgccgtggtttttggccattcagtcagccacattatctatccagaaccagcgacaagagatggtaaacatgaccgatccagctctagctacgagagcttggattgagaaatggccatttacagagcctgaatatcgagacggaccgagccgcggccgtttcaacttgaatacaaatgcatgggaagccctatagtggcatttatttcgaaagacgggaggcataacatatggagctaatcttacacattgataacagcaagtctagtgccatatatcttccggtcgttcgatatggtcatcaacgacatacaacttcgctgaatgggcttggaaggtccgcatgacctacaatatcccagccttcctgccagtttctgtaagacccatgtccgtcttgcccagacttgttcgaaattgggttagaagatgcagaagacgtttgcgtcgcgtctacatctggttcgtatacgaaatattacgaacagaccttgcggaaataggaatgctacggggatagtcactgagtagctaagtaatgattagcttcagagctatttcggcattttacctagcaccaccaccagacatttcggcaggaacataagcatattcccttagcttaacggagccactactcaccgctgtcccctactcatcactacgacgttgcaatcctgccaaccagtggagaagagctatgctatgataatgtgctgtaacccacctacgatgatccgccaagaagatcttgagatatttggtaggcttccccgccctgcaccatgtcagtcagacatgggaaagtcccgaggtcccactcctaggaccctgacatgaaccgcaacccgcatttacagacttggcatttacttttcaacatcacttcgtgaggacgctggtcactattcggaaggtccgtagtgcaaaatcgccggaatgggtccggaccttggactgagatcggatggtgtcggctcactcgcatcattgctgccggcttacgataagacgacatcacatatagacaacaagggccggcggcacaataagataaagatgcattccccagctttttcccgcttccctctcgcctacggggtcgtgtatcttattgtcgcttgtggcgctttaagctggaatttacggctacctttctctgacacaatcgccaaacttctggagatcagagatcattagaatggcaccttttcccacagaacttgcagctggcgtaggcctttcgactatcacacgcgccatctccacaatgcacgatgcaagcctgaattatacgacggcagaagccgggaacccattcgtcgatgggtggtacgcagacccggatacggaattctatgatgaaaaattttgggtatttcctacagcttcctatgattatgacgagcaaacgtatctcgacgccttctccagtagtgatttgatcaactgggaaaagcatccgaatgttctgacgacagacgatgtaagctgggcaacgagggcagtgtgggcgccggcaccaatttcgagaaatggaaaatattatctttacttcggagcaaacgacatacaagagggcgaacccgaagaggggctggtcggtggcatcggtgttggcgtcgcggaaaagccagacggtccttatattgatgccatagggaagccgttaattggagagtatttcaacggtgcccagcccattgaccaagatgtcttcattgatgatgacgggcaagcttacatattttatggtggccatggccactgtaatatggcgaagttgaacgatgacatgatttccattggcaaattcagtaatggctcgtcatacattgagatcacacccgaaaactacgtcgagggtcctcaaatgctgaagcggaacggcaaatactaccttatgtggtcagagggaggctggaccgggcccgactatagcgtgtcttacgccatgtccgactcgatcactggaccattcaaaaaagtggctaagattctcgagcaggattctgcagtagcaaaaggcagtggccacaatggagtcatcaagattccgggaacagatattttctacatcatataccatcggcgtccgctgagcgaaaccgacggcaatcaccgcgagctagcatatgaccgtatgtactttaacgacgacggcaccatcgtccccattaaaatgttggtcaaggacaattttgccgatggaaactcgatcggttggaaacaatacggtagcggaatgtcagtgacgagccaaaggcttacaagttctggtgcttccgccgctatgctcgatacgaattttggagatctgttgtatgacgccactatcgctttcccatcttcggccgaggcaggactcatattccgcgcagcgaatgtgacagatgattttgggcagttgaatggctattatgccaagctttcgacgttgggagacgtaacactggagaagttcattgatggagcttcgtcaatattaggccagggcagtgcagcggtcgtctcggacacggaataccatattagagtcaccgctttagactctacttttcaactatttgttgaagacatggagagccctgttctcactgccacagacaatacattttcgacaggtgcagatggcgttcgcgcatctgcagcaggaataaagtttggtgccatttccgtggcgaagccatgatgttatcaaaggtctcttacttgattgtatatacactggtgtagtgacaatagcgagatctgatttgtgacagtcttttgaatgctattcgagtagacatatcgttgaaatttggaaaattaaaagacgacgcgtgaagcctagccaatacatcatactccgaatggatcactatttgtcaagaattatcaatgtccaatgcatacctagtgatcaaatagcctacggtcacattgtccagagcccggt

SEQ ID NO: 33571 - DNA, 861 bp, Muscodor strobelii
  misc_feature: SGI cDNA ID NO. 571584
  misc_feature: Encodes the peptide sequence at SEQ ID NO 33572
atgccccagcggacagctctgataactgggtgcagcgacggtggcattggttctgctctagctgcagaatttcgtcttagaggcctgcgtgtctttgctacagcacgcgatgtttccaaaatggcatctctcgcgacccttggcattgagacaattgcgctggacgtgacgtcagatgaatcggtggcagctgcagtcgccctggtgcgcgagaaactcagcccaggggctgcaaggttggatttcctagtcaacaacgcggggatacatcacgttttacctttcacagactctaagatgacggacttgaggaggttaatggacaccaatgttgttggcacgctggcagtaacacaagctttcctgccactcatgatgcgacgaaaagaagatatcaatgtgcacggaaaggcaaccattgttatgctgggtagcgtcaacgagattttctgccctatttatcagtcagcatataatgcttcaaaagccgcagtccatacgattgcgcggacgctgcgcgtcgaactggcacccctgggcatcaactgtatcacgttgatgactgggagcgtgcaaacgaagctgttcgacaacgctccgtctagagtcccagaacacagtctttacgcgccagtggcaaacgaggtcgagagccgagagtttttgaagaatgcacagtttgtaagcgccgatgaattcgcaagacaagttatagatgatttgctcaaaccgaaaccgaaacttgatatatggcgtggtggcttagccacagtagcttcatggcttgcatggcttggttgggaaggaatgctggattcgtcagtgttcaaagcgaatcatttggacagaatacagctctag

SEQ ID NO: 33572 - protein, 286 aa, Muscodor strobelii
  misc_feature: SGI Peptide ID NO. 571584
  misc_feature (4)..(177): Pfam Id: PF00106 Pfam Desc: short chain dehydrogenase
  misc_feature (6)..(254): Pfam Id: PF01370 Pfam Desc: NAD dependent epimerase/dehydratase family
  misc_feature (1)..(265): NCBI GI: 154317593 Blast Desc: BC1G_03148 [Botryotinia fuckeliana B05.10] gi|150844322|gb|EDN19515.1| BC1G_03148 [Botryotinia fuckeliana B05.10]
  misc_feature (1)..(267): NCBI GI: 145254010 Blast Desc: An18g00230 [Aspergillus niger] gi|134084069|emb|CAK43099.1| protein product [Aspergillus niger]
  misc_feature (1)..(265): NCBI GI: 156049501 Blast Desc: SS1G_08457 [Sclerotinia sclerotiorum 1980] gi|154692856|gb|EDN92594.1| SS1G_08457 [Sclerotinia sclerotiorum 1980]
  misc_feature (1)..(272): NCBI GI: 119467458 Blast Desc: short-chain dehydrogenase/reductase, [Neosartorya fischeri NRRL 181] gi|119405687|gb|EAW15638.1| short-chain dehydrogenase/reductase, [Neosartorya fischeri NRRL 181]
  misc_feature (1)..(272): NCBI GI: 146324313 Blast Desc: short-chain dehydrogenase/reductase [Aspergillus fumigatus Af293] gi|129556254|gb|EAL85701.2| short-chain dehydrogenase/reductase, [Aspergillus fumigatus Af293] fumigatus
  misc_feature (2)..(285): NCBI GI: 242820004 Blast Desc: short-chain dehydrogenases/reductase, [Talaromyces stipitatus ATCC 10500] gi|218713894|gb|EED13318.1| short-chain dehydrogenases/reductase, [Talaromyces stipitatus ATCC 10500]
  misc_feature (3)..(284): NCBI GI: 121714305 Blast Desc: short chain dehydrogenase/reductase, [Aspergillus clavatus NRRL 1] gi|119402917|gb|EAW13337.1| short chain dehydrogenase/reductase, [Aspergillus clavatus NRRL 1]
  misc_feature (3)..(285): NCBI GI: 70982221 Blast Desc: short chain dehydrogenase/reductase (Ayr1) [Aspergillus fumigatus Af293] gi|66844262|gb|EAL84601.1| short chain dehydrogenase/reductase (Ayr1), [Aspergillus fumigatus
  misc_feature (3)..(242): NCBI GI: 145248640 Blast Desc: An14g00300 [Aspergillus niger] gi|134081326|emb|CAK41829.1| protein product [Aspergillus niger]
  misc_feature (1)..(284): NCBI GI: 67525637 Blast Desc: AN3276.2 [Aspergillus nidulans FGSC A4] gi|40744064|gb|EAA63244.1| AN3276.2 [Aspergillus nidulans FGSC A4] gi|259485757|tpe|CBF83048.1| TPA: oxidoreductase, short-chain
  misc_feature (2)..(285): SWISSPROT Homolog: EC 1.1.1.101 Acylglycerone-phosphate reductase
MPQRTALITGCSDGGIGSALAAEFRLRGLRVFATARDVSKMASLATLGIETIALDVTSDESVAAAVALVREKLSPGAARLDFLVNNAGIHHVLPFTDSKMTDLRRLMDTNVVGTLAVTQAFLPLMMRRKEDINVHGKATIVMLGSVNEIFCPIYQSAYNASKAAVHTIARTLRVELAPLGINCITLMTGSVQTKLFDNAPSRVPEHSLYAPVANEVESREFLKNAQFVSADEFARQVIDDLLKPKPKLDIWRGGLATVASWLAWLGWEGMLDSSVFKANHLDRIQL

SEQ ID NO: 33573 - DNA, 2262 bp, Muscodor strobelii
  misc_feature: SGI EST ID NO. CUFF.79351.0
  misc_feature: Variant of the nucleotide sequence at SEQ ID NO 33571
gacagttgacaccacggcatttcccggaaatgagacccctccatggagttgtaacacatgatatcaattgtttgtgtgcttgtgacaccggaacctaccggtaccgcatgataacagctcatgaagcccggcagtccgaaaaggagaaaaaagggagtcaacttgagtaacatatagcaggaataatgataagaaactaaggacagagctgcattttgaacataacggtactcgtcataatgacgagtcgttgaataaaactggaggacacgagtgaagcaattagggctagcacgtgctgtataaaatgaattccagtgcccgagagattgggtctccgggctgggcaataccccgatgccccgtcaccaccttgcaaaaccccacaaaaccgaggcctatctggaatgcagactaccatgctcgccatggtcccttgcaggtgttacgcattcgcagcccggaatgtgttgaaacctaaatatttgcaatgcagcgtgcaagcgaagtgaccaccgggttttgatagttcataagtccggcagttcgatttcaggcaccgtactcgtaatgctcgtatactcgggagtactgcgccgcaatcaaagttacagaatatccagtaacatcccgatccgaaaagttatgcaaatgtcaattgccatgtcacatctgccttaagacatcgaaaactcccagtcctatcattaaactcactgtataatcctggacacggaccctctcaccgaataatctcacatcgcagtagaatccattgagccagtccggagcatagcggaatatcgttactggagttaatactcccggaggacacccccgagatcccgagcaaatgccccagcggacagctctgataactgggtgcagcgacggtggcattggttctgctctagctgcagaatttcgtcttagaggcctgcgtgtctttgctacagcacgcgatgtttccaaaatggcatctctcgcgacccttggcattgagacaattgcgctggacgtgacgtcagatgaatcggtggcagctgcagtcgccctggtgcgcgagaaactcagcccaggggctgcaaggttggatttcctagtcaacaacgcggggatacatcacgttttacctttcacagactctaagatgacggacttgaggaggttaatggacaccaatgttgttggcacgctggcagtaacacaagctttcctgccactcatgatgcgacgaaaagaagatatcaatgtgcacggaaaggcaaccattgttatgctgggtagcgtcaacgagattttctgccctatttatcagtcagcatataatgcttcaaaagccgcagtccatacgattgcgcggacgctgcgcgtcgaactggcacccctgggcatcaactgtatcacgttgatgactgggagcgtgcaaacgaagctgttcgacaacgctccgtctagagtcccagaacacagtctttacgcgccagtggcaaacgaggtcgagagccgagagtttttgaagaatgcacagtttgtaagcgccgatgaattcgcaagacaagttatagatgatttgctcaaaccgaaaccgaaacttgatatatggcgtggtggcttagccacagtagcttcatggcttgcatggcttggttgggaaggaatgctggattcgtcagtgttcaaagcgaatcatttggacagaatacagctctagttgaggagttcgttcacagcaatgactcaatatgactggtgcagtgtacgaatagctggaaccatcaatgatggtgtttgcaaatacataatatctcgtcgccgttttgattctctgtgatatcactactacttttgacgtatcggctgcctgtctttctttttagcgaacttatcatccaccgttctgcttttcaagcaaatactcagaactgtggctgatgagagcaaggaatagtgcaaatctacataacacttcctgaacattgccccatattcaagccagtcgatccttgtttcttcgttgtctcgtccgacttctcagtacactcatcgtgggacgtgttgtcagatatcaggctacatgcttcgaatgcattctgttcgtcgttgatctgtagtgtatccttgtcgtggttgtcgtcattgctgatacaattcttcggatcgttgctgttcgtcttctctttatcgatctcgttaccaatctcactgcccttattgcgagcttcctcgttcttcagatctaattccaactgtcttgctctt

SEQ ID NO: 33574 - DNA, 1317 bp, Muscodor strobelii
  misc_feature: SGI cDNA ID NO. 571585
  misc_feature: Encodes the peptide sequence at SEQ ID NO 33575
atgggaggcttagacgctcaatctctttgcgatcctctgacaatcatctcctatgtttctacccgtaagctgcttgatattgccattctagagaaatggacttggaaggacaacagcgttcatggattcttggacgaaaagggtagaatcaccgccagcggcgaccaagcttacgaattctcaaagtgctgtctaccgactgacctatgggaagacaacctccccggtgcgtggtccgtatctaacgacacgtatatgtcacactcggtagagcccgtatggtattacgccatcaaaatagcccaagagtatggctgctcagacgagatgatgtcaatagcggctctttgcagcacttccaagcctattttcccccgagtacatcccaatttccgacacgttgtacatttgatacgtcagcaattcgcccatccgctgtcagatcatatgaccctgttgaataccttacacgccttccaccatgcacagaaagacaacaagattgacatcaaactgtggtgcaattatcacttcgtctcaatagagggtttggagcaagcattgtacatgcgcaacatacttgggagagccgtcgaaaaagtctggggaaaggagtggcttacatcaatgccatccacagatgataattatgatgtcaacatactcaaagccctggcacgtagtcacttcagcagagctgctataaaggccacaggccaggatacgtactgtttgttccgattaagaggcctcgcaacgaccgaacaatacatgacaccacgagaggagtgtacagcgcttctcgcagtagatagcgccctcgtcaatggtaattacgaatgggttgtatacaatcgaattgccttcgttaacccgtggctacgatatttcgagacggtcacagctgtcaagccagagtggtttgcagatcttgcatactttaagaaaaaagccgtcacgaagctcacatcgcgtaccggacaacagctcatacggttgtctttggaaggtgcaagagcaagacagttggaattagatctgaagaacgaggaagctcgcaataagggcagtgagattggtaacgagatcgataaagagaagacgaacagcaacgatccgaagaattgtatcagcaatgacgacaaccacgacaaggatacactacagatcaacgacgaacagaatgcattcgaagcatgtagcctgatatctgacaacacgtcccacgatgagtgtactgagaagtcggacgagacaacgaagaaacaaggatcgactggcttgaatatggggcaatgttcaggaagtgttatgtag

SEQ ID NO: 33575 - protein, 438 aa, Muscodor strobelii
  misc_feature: SGI Peptide ID NO. 571585
  misc_feature (101)..(153): Pfam Id: PF04408 Pfam Desc: Helicase associated domain (HA2)
  misc_feature (90)..(332): NCBI GI: 212529250 Blast Desc: pre-mRNA splicing factor RNA helicase (Prp43), [Penicillium marneffei ATCC 18224] gi|210074180|gb|EEA28267.1| pre-mRNA splicing factor RNA helicase (Prp43), [Penicillium ATCC
  misc_feature (90)..(390): NCBI GI: 164428057 Blast Desc: pre-mRNA splicing factor ATP-dependent RNA helicase PRP43 [Neurospora crassa OR74A] gi|157071993|gb|EAA27287.2| pre-mRNA splicing factor ATP-dependent RNA helicase PRP43 crassa
  misc_feature (90)..(329): NCBI GI: 16416013 Blast Desc: ATP-binding protein PRP16 [Neurospora crassa]
  misc_feature (90)..(312): NCBI GI: 46138485 Blast Desc: FG10757.1 [Gibberella zeae PH-1]
  misc_feature (90)..(312): NCBI GI: 256729171 Blast Desc: [Nectria haematococca mpVI 77-13-4]
  misc_feature (90)..(312): NCBI GI: 156047761 Blast Desc: SS1G_09570 [Sclerotinia sclerotiorum 1980] gi|154693965|gb|EDN93703.1| SS1G_09570 [Sclerotinia sclerotiorum 1980]
  misc_feature (90)..(339): NCBI GI: 169608347 Blast Desc: SNOG_07247 [Phaeosphaeria nodorum SN15] gi|160701626|gb|EAT85898.2| SNOG_07247 [Phaeosphaeria nodorum SN15]
  misc_feature (44)..(339): NCBI GI: 261353013 Blast Desc: pre-mRNA-splicing factor ATP-dependent RNA helicase PRP43 [Verticillium albo-atrum VaMs.102]
  misc_feature (90)..(346): NCBI GI: 121713694 Blast Desc: pre-mRNA splicing factor RNA helicase (Prp43), [Aspergillus clavatus NRRL 1] gi|119402611|gb|EAW13032.1| pre-mRNA splicing factor RNA helicase (Prp43), [Aspergillus NRRL
  misc_feature (90)..(343): NCBI GI: 242763946 Blast Desc: pre-mRNA splicing factor RNA helicase (Prp43), [Talaromyces stipitatus ATCC 10500] gi|218723871|gb|EED23288.1| pre-mRNA splicing factor RNA helicase (Prp43), [Talaromyces ATCC
MGGLDAQSLCDPLTIISYVSTRKLLDIAILEKWTWKDNSVHGFLDEKGRITASGDQAYEFSKCCLPTDLWEDNLPGAWSVSNDTYMSHSVEPVWYYAIKIAQEYGCSDEMMSIAALCSTSKPIFPRVHPNFRHVVHLIRQQFAHPLSDHMTLLNTLHAFHHAQKDNKIDIKLWCNYHFVSIEGLEQALYMRNILGRAVEKVWGKEWLTSMPSTDDNYDVNILKALARSHFSRAAIKATGQDTYCLFRLRGLATTEQYMTPREECTALLAVDSALVNGNYEWVVYNRIAFVNPWLRYFETVTAVKPEWFADLAYFKKKAVTKLTSRTGQQLIRLSLEGARARQLELDLKNEEARNKGSEIGNEIDKEKTNSNDPKNCISNDDNHDKDTLQINDEQNAFEACSLISDNTSHDECTEKSDETTKKQGSTGLNMGQCSGSVM

SEQ ID NO: 33576 - DNA, 1551 bp, Muscodor strobelii
  misc_feature: SGI cDNA ID NO. 571586
  misc_feature: Reduced expression when VOC is produced
  misc_feature: Encodes the peptide sequence at SEQ ID NO 33577
atggctaccgttctacccccacctagcaaaagacagaagcgcgaggccctggagcgctcccaggtccagcaagatgttactcccaaagctatagaagccggatccttcaaagcccgctttgttgaccccgatggcaactctcttgcagatacgatcgagattccacttgcagatgccactgagagaaatgtctcggctctattgaacacgctgctcgaaaaggaccgagagaacttcaccccctatcgattccgtatacgtataccaaattcgaacatagtcatcgaccaatatccaaccccctccgaatttctgaatgtgcttcgcaagcatggcgtggagaacccgttcgaaactaccatcactctcagcgccgagccacaggcagttttcaaagtccaagcggtgacgcgcatggcccacagaataccgggacatggacagccaattctatgtgctcagttttctccgagtactggggcattactcgcaactggatctggcgataacacggcgcgaatctggaacacagagactggcacgccaaaacataccttgccacattcgaaatgggtactcgctgtgagctgggatccgacaggaaaacaactggccacggcaggcatggataacgtcgtcaaactttgggacccgatcacggggaagcaagttggcaagtcatttaccggtcacagcaaatggatcacgagtctcgcatggcagccgatgtttctctggaaagaggatggcccacggctcgcaagtagttccaaagacggcactgtccgaatataccttgcgaactcgggcgtaacgcaacacgtcctctcaggtcacaagacaagtgtaacctgcgtgaagtggggcggacttgactacatctattctgcgagccaagacaaaacaatcaagatattcaatgcccgtgacggaacattaagaactactctgagcgcccacgctcactgggtcaaccatatctcattatcaagcgattccgtgctaagaactggattttatgatcacaccaaggaggttccagcgtcattagaagaacagaaagcaaaggcaaaagccaggtttgagaaagcttgcatgcaaggtggtaagattgtcgaaaggctagtttctgcctcagatgataccactgtatttttatgggacccagaaacgcaaggttcgaaacccgtggctcggctcattggtcaccaaaagcaagttaatgcagtcatcttctctcctgatggtagattgattgccacagccgcttgggacaatcaagtcaagatttgggaccgtgatgggaaatttttggcaacgctacgaggacatgttgcacccgttttccaaatggccttctcagcggattccaggcttctatgttcatgttctagagatacaactttgaaaatcttcgacatgcgcacattcaagttaaaaggagatcttcccggacacgaagatgaagtctacgcagtggactggtcaccagatggtacctgcgtcggctccggtgggaaagataaagctgtaagactttggcgtcattga

SEQ ID NO: 33577 - protein, 516 aa, Muscodor strobelii
  misc_feature: SGI Peptide ID NO. 571586
  misc_feature (394)..(432): Pfam Id: PF00400 Pfam Desc: WD domain, G-beta repeat
  misc_feature (477)..(515): Pfam Id: PF00400 Pfam Desc: WD domain, G-beta repeat
  misc_feature (180)..(217): Pfam Id: PF00400 Pfam Desc: WD domain, G-beta repeat
  misc_feature (435)..(473): Pfam Id: PF00400 Pfam Desc: WD domain, G-beta repeat
  misc_feature (222)..(266): Pfam Id: PF00400 Pfam Desc: WD domain, G-beta repeat
  misc_feature (137)..(176): Pfam Id: PF00400 Pfam Desc: WD domain, G-beta repeat
  misc_feature (270)..(307): Pfam Id: PF00400 Pfam Desc: WD domain, G-beta repeat
  misc_feature (311)..(388): Pfam Id: PF00400 Pfam Desc: WD domain, G-beta repeat
  misc_feature (1)..(516): NCBI GI: 85115850 Blast Desc: NCU00794 [Neurospora crassa OR74A] gi|28926748|gb|EAA35714.1| NCU00794 [Neurospora crassa OR74A]
  misc_feature (1)..(514): NCBI GI: 261353846 Blast Desc: WD repeat-containing protein [Verticillium albo-atrum VaMs.102]
  misc_feature (1)..(516): NCBI GI: 256727262 Blast Desc: [Nectria haematococca mpVI 77-13-4]
  misc_feature (1)..(516): NCBI GI: 116181204 Blast Desc: CHGG_01230 [Chaetomium globosum CBS 148.51] gi|88185527|gb|EAQ92995.1| CHGG_01230 [Chaetomium globosum CBS 148.51]
  misc_feature (1)..(516): NCBI GI: 46122641 Blast Desc: FG05698.1 [Gibberella zeae PH-1]
  misc_feature (1)..(516): NCBI GI: 39948719 Blast Desc: MGG_08708 [Magnaporthe grisea 70-15] gi|145009253|gb|EDJ93964.1| MGG_08708 [Magnaporthe grisea 70-15]
  misc_feature (1)..(514): NCBI GI: 171695704 Blast Desc: protein product [Podospora anserina] gi|170948094|emb|CAP60258.1| protein product [Podospora anserina]
  misc_feature (1)..(516): NCBI GI: 154295843 Blast Desc: BC1G_13291 [Botryotinia fuckeliana B05.10] gi|150843841|gb|EDN19034.1| BC1G_13291 [Botryotinia fuckeliana B05.10]
  misc_feature (1)..(516): NCBI GI: 225558128 Blast Desc: WD domain-containing protein [Ajellomyces capsulatus G186AR]
  misc_feature (1)..(516): NCBI GI: 240273367 Blast Desc: WD40 domain-containing protein [Ajellomyces capsulatus H143]
  misc_feature (169)..(476): SWISSPROT Homolog: EC 2.7.11.1 Non-specific serine/threonine protein kinase
  misc_feature: Useful for introducing or modulating the production of volatile compounds
MATVLPPPSKRQKREALERSQVQQDVTPKAIEAGSFKARFVDPDGNSLADTIEIPLADATERNVSALLNTLLEKDRENFTPYRFRIRIPNSNIVIDQYPTPSEFLNVLRKHGVENPFETTITLSAEPQAVFKVQAVTRMAHRIPGHGQPILCAQFSPSTGALLATGSGDNTARIWNTETGTPKHTLPHSKWVLAVSWDPTGKQLATAGMDNVVKLWDPITGKQVGKSFTGHSKWITSLAWQPMFLWKEDGPRLASSSKDGTVRIYLANSGVTQHVLSGHKTSVTCVKWGGLDYIYSASQDKTIKIFNARDGTLRTTLSAHAHWVNHISLSSDSVLRTGFYDHTKEVPASLEEQKAKAKARFEKACMQGGKIVERLVSASDDTTVFLWDPETQGSKPVARLIGHQKQVNAVIFSPDGRLIATAAWDNQVKIWDRDGKFLATLRGHVAPVFQMAFSADSRLLCSCSRDTTLKIFDMRTFKLKGDLPGHEDEVYAVDWSPDGTCVGSGGKDKAVRLWRH

SEQ ID NO: 33578 - DNA, 1888 bp, Muscodor strobelii
  misc_feature: SGI EST ID NO. CUFF.79361.0
  misc_feature: Variant of the nucleotide sequence at SEQ ID NO 33576
gtggggaagtcttgagcagtaggggatcgttcgattctcgagtttcgggattttctagataaaacttggcacatgacttccgctcattagtctgtcaatcgcctcaccagcgtctttgcaatggctaccgttctacccccacctagcaaaagacagaagcgcgaggccctggagcgctcccaggtccagcaagatgttactcccaaagctatagaagccggatccttcaaagcccgctttgttgaccccgatggcaactctcttgcagatacgatcgagattccacttgcagatgccactgagagaaatgtctcggctctattgaacacgctgctcgaaaaggaccgagagaacttcaccccctatcgattccgtatacgtataccaaattcgaacatagtcatcgaccaatatccaaccccctccgaatttctgaatgtgcttcgcaagcatggcgtggagaacccgttcgaaactaccatcactctcagcgccgagccacaggcagttttcaaagtccaagcggtgacgcgcatggcccacagaataccgggacatggacagccaattctatgtgctcagttttctccgagtactggggcattactcgcaactggatctggcgataacacggcgcgaatctggaacacagagactggcacgccaaaacataccttgccacattcgaaatgggtactcgctgtgagctgggatccgacaggaaaacaactggccacggcaggcatggataacgtcgtcaaactttgggacccgatcacggggaagcaagttggcaagtcatttaccggtcacagcaaatggatcacgagtctcgcatggcagccgatgtttctctggaaagaggatggcccacggctcgcaagtagttccaaagacggcactgtccgaatataccttgcgaactcgggcgtaacgcaacacgtcctctcaggtcacaagacaagtgtaacctgcgtgaagtggggcggacttgactacatctattctgcgagccaagacaaaacaatcaagatattcaatgcccgtgacggaacattaagaactactctgagcgcccacgctcactgggtcaaccatatctcattatcaagcgattccgtgctaagaactggattttatgatcacaccaaggaggttccagcgtcattagaagaacagaaagcaaaggcaaaagccaggtttgagaaagcttgcatgcaaggtggtaagattgtcgaaaggctagtttctgcctcagatgataccactgtatttttatgggacccagaaacgcaaggttcgaaacccgtggctcggctcattggtcaccaaaagcaagttaatgcagtcatcttctctcctgatggtagattgattgccacagccgcttgggacaatcaagtcaagatttgggaccgtgatgggaaatttttggcaacgctacgaggacatgttgcacccgttttccaaatggccttctcagcggattccaggcttctatgttcatgttctagagatacaactttgaaaatcttcgacatgcgcacattcaagttaaaaggagatcttcccggacacgaagatgaagtctacgcagtggactggtcaccagatggtacctgcgtcggctccggtgggaaagataaagctgtaagactttggcgtcattgaggtcatcctacgtgaactgcttggagcatttgcctgcgtctcaagcgtggtgtgtcgagactagcatggataggagcattcaaaactagggcgtaaatgttgtacttaagatacccttgaatatcacaaatggtcaactctggctgtcgtgttttcgtccctgcagcttggccattatgagttctagaccgatacttcaacaacacttctcgtgtat

SEQ ID NO: 33579 - DNA, 1554 bp, Muscodor strobelii
  misc_feature: SGI cDNA ID NO. 571587
  misc_feature: Encodes the peptide sequence at SEQ ID NO 33580
atggctaccgttctacccccacctagcaaaagacagaagcgcgaggccctggagcgctcccaggtccagcaagatgttactcccaaagctatagaagccggatccttcaaagcccgctttgttgaccccgatggcaactctcttgcagatacgatcgagattccacttgcagatgccactgagagaaatgtctcggctctattgaacacgctgctcgaaaaggaccgagagaacttcaccccctatcgattccgtatacgtataccaaattcgaacatagtcatcgaccaatatccaaccccctccgaatttctgaatgtgcttcgcaagcatggcgtggagaacccgttcgaaactaccatcactctcagcgccgagccacaggcagttttcaaagtccaagcggtgacgcgcatggcccacagaataccgggacatggacagccaattctatgtgctcagttttctccgagtactggggcattactcgcaactggatctggcgataacacggcgcgaatctggaacacagagactggcacgccaaaacataccttgccacattcgaaatgggtactcgctgtgagctgggatccgacaggaaaacaactggccacggcaggcatggataacgtcgtcaaactttgggacccgatcacggggaagcaagttggcaagtcatttaccggtcacagcaaatggatcacgagtctcgcatggcagccgatgtttctctggaaagaggatggcccacggctcgcaagtagttccaaagacggcactgtccgaatataccttgcgaactcgggcgtaacgcaacacgtcctctcaggtcacaagacaagtgtaacctgcgtgaagtggggcggacttgactacatctattctgcgagccaagacaaaacaatcaagatattcaatgcccgtgacggaacattaagaactactctgagcgcccacgctcactgggtcaaccatatctcattatcaagcgattccgtgctaagaactggattttatgatcacaccaaggaggttccagcgtcattagaagaacagaaagcaaaggcaaaagccaggtttgagaaagcttgcatgcaaggtggtaagattgtcgaaaggctagtttctgcctcagatgataccactgtatttttatgggacccagaaacgcaaggttcgaaacccgtggctcggctcattggtcaccaaaagcaagttaatgcagtcatcttctctcctgatggtagattgattgccacagccgcttgggacaatcaagtcaagatttgggaccgtagtgatgggaaatttttggcaacgctacgaggacatgttgcacccgttttccaaatggccttctcagcggattccaggcttctatgttcatgttctagagatacaactttgaaaatcttcgacatgcgcacattcaagttaaaaggagatcttcccggacacgaagatgaagtctacgcagtggactggtcaccagatggtacctgcgtcggctccggtgggaaagataaagctgtaagactttggcgtcattga

SEQ ID NO: 33580 - protein, 517 aa, Muscodor strobelii
  misc_feature: SGI Peptide ID NO. 571587
  misc_feature (394)..(432): Pfam Id: PF00400 Pfam Desc: WD domain, G-beta repeat
  misc_feature (478)..(516): Pfam Id: PF00400 Pfam Desc: WD domain, G-beta repeat
  misc_feature (180)..(217): Pfam Id: PF00400 Pfam Desc: WD domain, G-beta repeat
  misc_feature (436)..(474): Pfam Id: PF00400 Pfam Desc: WD domain, G-beta repeat
  misc_feature (222)..(266): Pfam Id: PF00400 Pfam Desc: WD domain, G-beta repeat
  misc_feature (137)..(176): Pfam Id: PF00400 Pfam Desc: WD domain, G-beta repeat
  misc_feature (270)..(307): Pfam Id: PF00400 Pfam Desc: WD domain, G-beta repeat
  misc_feature (311)..(388): Pfam Id: PF00400 Pfam Desc: WD domain, G-beta repeat
  misc_feature (1)..(517): NCBI GI: 85115850 Blast Desc: NCU00794 [Neurospora crassa OR74A] gi|28926748|gb|EAA35714.1| NCU00794 [Neurospora crassa OR74A]
  misc_feature (1)..(515): NCBI GI: 261353846 Blast Desc: WD repeat-containing protein [Verticillium albo-atrum VaMs.102]
  misc_feature (1)..(517): NCBI GI: 256727262 Blast Desc: [Nectria haematococca mpVI 77-13-4]
  misc_feature (1)..(517): NCBI GI: 116181204 Blast Desc: CHGG_01230 [Chaetomium globosum CBS 148.51] gi|88185527|gb|EAQ92995.1| CHGG_01230 [Chaetomium globosum CBS 148.51]
  misc_feature (1)..(517): NCBI GI: 46122641 Blast Desc: FG05698.1 [Gibberella zeae PH-1]
  misc_feature (1)..(517): NCBI GI: 39948719 Blast Desc: MGG_08708 [Magnaporthe grisea 70-15] gi|145009253|gb|EDJ93964.1| MGG_08708 [Magnaporthe grisea 70-15]
  misc_feature (1)..(515): NCBI GI: 171695704 Blast Desc: protein product [Podospora anserina] gi|170948094|emb|CAP60258.1| protein product [Podospora anserina]
  misc_feature (1)..(517): NCBI GI: 154295843 Blast Desc: BC1G_13291 [Botryotinia fuckeliana B05.10] gi|150843841|gb|EDN19034.1| BC1G_13291 [Botryotinia fuckeliana B05.10]
  misc_feature (1)..(517): NCBI GI: 225558128 Blast Desc: WD domain-containing protein [Ajellomyces capsulatus G186AR]
  misc_feature (1)..(517): NCBI GI: 240273367 Blast Desc: WD40 domain-containing protein [Ajellomyces capsulatus H143]
  misc_feature (169)..(477): SWISSPROT Homolog: EC 2.7.11.1 Non-specific serine/threonine protein kinase
MATVLPPPSKRQKREALERSQVQQDVTPKAIEAGSFKARFVDPDGNSLADTIEIPLADATERNVSALLNTLLEKDRENFTPYRFRIRIPNSNIVIDQYPTPSEFLNVLRKHGVENPFETTITLSAEPQAVFKVQAVTRMAHRIPGHGQPILCAQFSPSTGALLATGSGDNTARIWNTETGTPKHTLPHSKWVLAVSWDPTGKQLATAGMDNVVKLWDPITGKQVGKSFTGHSKWITSLAWQPMFLWKEDGPRLASSSKDGTVRIYLANSGVTQHVLSGHKTSVTCVKWGGLDYIYSASQDKTIKIFNARDGTLRTTLSAHAHWVNHISLSSDSVLRTGFYDHTKEVPASLEEQKAKAKARFEKACMQGGKIVERLVSASDDTTVFLWDPETQGSKPVARLIGHQKQVNAVIFSPDGRLIATAAWDNQVKIWDRSDGKFLATLRGHVAPVFQMAFSADSRLLCSCSRDTTLKIFDMRTFKLKGDLPGHEDEVYAVDWSPDGTCVGSGGKDKAVRLWRH

SEQ ID NO: 33581 - DNA, 1888 bp, Muscodor strobelii; identical to SEQ ID NO: 33578
  misc_feature: SGI EST ID NO. CUFF.79361.0
  misc_feature: Variant of the nucleotide sequence at SEQ ID NO 33579

SEQ ID NO: 33582 - DNA, 1572 bp, Muscodor strobelii
  misc_feature: SGI cDNA ID NO. 571588
  misc_feature: Encodes the peptide sequence at SEQ ID NO 33583
atggctaccgttctacccccacctagcaaaagacagaagcgcgaggccctggagcgctcccaggtccagcaagatgttactcccaaagctatagaagccggatccttcaaagcccgctttgttgaccccgatggcaactctcttgcagatacgatcgagattccacttgcagatgccactgagagaaatgtctcggctctattgaacacgctgctcgaaaaggaccgagagaacttcaccccctatcgattccgtatacgtataccaaattcgaacatagtcatcgaccaatatccaaccccctccgaatttctgaatgtgcttcgcaagcatggcgtggagaacccgttcgaaactaccatcactctcagcgccgagccacaggcagttttcaaagtccaagcggtgacgcgcatggcccacagaataccgggacatggacagccaattctatgtgctcagttttctccgagtactggggcattactcgcaactggatctggcgataacacggcgcgaatctggaacacagagactggcacgccaaaacataccttgccacattcgaaatgggtactcgctgtgagctgggatccgacaggaaaacaactggccacggcaggcatggataacgtcgtcaaactttgggacccgatcacggggaagcaagttggcaagtcatttaccggtcacagcaaatggatcacgagtctcgcatggcagccgatgtttctctggaaagaggatggcccacggctcgcaagtagttccaaagacggcactgtccgaatataccttgcgaactcgggcgtaacgcaacacgtcctctcaggtcacaagacaagtgtaacctgcgtgaagtggggcggacttgactacatctattctgcgagccaagacaaaacaatcaagatattcaatgcccgtgacggaacattaagaactactctgagcgcccacgctcactgggtcaaccatatctcattatcaagcgattccgtgctaagaactggattttatgatcacaccaaggaggttccagcgtcattagaagaacagaaagcaaaggcaaaagccaggtttgagaaagcttgcatgcaaggtggtaagattgtcgaaaggctagtttctgcctcagatgataccactgtatttttatgggacccagaaacgcaaggttcgaaacccgtggctcggctcattggtcaccaaaagcaagttaatgcagtcatcttctctcctgatggtagattgattgccacagccgcttgggacaatcaagtcaagatttgggaccgtagtgatgggaaatttttggcaacgctacgaggacatgttgcacccgttttccaaatggccttctcagcggattccaggcttctatgttcatgttctagagatacaactttgaaaatcttcgacatgcgcacattcaagttaaaaggagatcttcccggacacgaagatgaagtctacgcagtggactggtcaccagatggtacctgcgtcggctccggtgggaaagataaagtaagtgtaattcgtgacaagtgcaatacgaacggacactga

SEQ ID NO: 33583 - protein, 523 aa, Muscodor strobelii
  misc_feature: SGI Peptide ID NO. 571588
  misc_feature (394)..(432): Pfam Id: PF00400 Pfam Desc: WD domain, G-beta repeat
  misc_feature (180)..(217): Pfam Id: PF00400 Pfam Desc: WD domain, G-beta repeat
  misc_feature (436)..(474): Pfam Id: PF00400 Pfam Desc: WD domain, G-beta repeat
  misc_feature (222)..(266): Pfam Id: PF00400 Pfam Desc: WD domain, G-beta repeat
  misc_feature (137)..(176): Pfam Id: PF00400 Pfam Desc: WD domain, G-beta repeat
  misc_feature (270)..(307): Pfam Id: PF00400 Pfam Desc: WD domain, G-beta repeat
  misc_feature (478)..(516): Pfam Id: PF00400 Pfam Desc: WD domain, G-beta repeat
  misc_feature (311)..(388): Pfam Id: PF00400 Pfam Desc: WD domain, G-beta repeat
  misc_feature (1)..(510): NCBI GI: 85115850 Blast Desc: NCU00794 [Neurospora crassa OR74A] gi|28926748|gb|EAA35714.1| NCU00794 [Neurospora crassa OR74A]
  misc_feature (1)..(519): NCBI GI: 261353846 Blast Desc: WD repeat-containing protein [Verticillium albo-atrum VaMs.102]
  misc_feature (1)..(510): NCBI GI: 256727262 Blast Desc: [Nectria haematococca mpVI 77-13-4]
  misc_feature (1)..(510): NCBI GI: 116181204 Blast Desc: CHGG_01230 [Chaetomium globosum CBS 148.51] gi|88185527|gb|EAQ92995.1| CHGG_01230 [Chaetomium globosum CBS 148.51]
  misc_feature (1)..(510): NCBI GI: 46122641 Blast Desc: FG05698.1 [Gibberella zeae PH-1]
  misc_feature (1)..(510): NCBI GI: 39948719 Blast Desc: MGG_08708 [Magnaporthe grisea 70-15] gi|145009253|gb|EDJ93964.1| MGG_08708 [Magnaporthe grisea 70-15]
  misc_feature (1)..(510): NCBI GI: 171695704 Blast Desc: protein product [Podospora anserina] gi|170948094|emb|CAP60258.1| protein product [Podospora anserina]
  misc_feature (1)..(514): NCBI GI: 154295843 Blast Desc: BC1G_13291 [Botryotinia fuckeliana B05.10] gi|150843841|gb|EDN19034.1| BC1G_13291 [Botryotinia fuckeliana B05.10]
  misc_feature (1)..(514): NCBI GI: 225558128 Blast Desc: WD domain-containing protein [Ajellomyces capsulatus G186AR]
  misc_feature (1)..(514): NCBI GI: 240273367 Blast Desc: WD40 domain-containing protein [Ajellomyces capsulatus H143]
  misc_feature (169)..(477): SWISSPROT Homolog: EC 2.7.11.1 Non-specific serine/threonine protein kinase
MATVLPPPSKRQKREALERSQVQQDVTPKAIEAGSFKARFVDPDGNSLADTIEIPLADATERNVSALLNTLLEKDRENFTPYRFRIRIPNSNIVIDQYPTPSEFLNVLRKHGVENPFETTITLSAEPQAVFKVQAVTRMAHRIPGHGQPILCAQFSPSTGALLATGSGDNTARIWNTETGTPKHTLPHSKWVLAVSWDPTGKQLATAGMDNVVKLWDPITGKQVGKSFTGHSKWITSLAWQPMFLWKEDGPRLASSSKDGTVRIYLANSGVTQHVLSGHKTSVTCVKWGGLDYIYSASQDKTIKIFNARDGTLRTTLSAHAHWVNHISLSSDSVLRTGFYDHTKEVPASLEEQKAKAKARFEKACMQGGKIVERLVSASDDTTVFLWDPETQGSKPVARLIGHQKQVNAVIFSPDGRLIATAAWDNQVKIWDRSDGKFLATLRGHVAPVFQMAFSADSRLLCSCSRDTTLKIFDMRTFKLKGDLPGHEDEVYAVDWSPDGTCVGSGGKDKVSVIRDKCNTNGH

SEQ ID NO: 33584 - DNA, 1888 bp, Muscodor strobelii; identical to SEQ ID NO: 33578
  misc_feature: SGI EST ID NO. CUFF.79361.0
  misc_feature: Variant of the nucleotide sequence at SEQ ID NO 33582

SEQ ID NO: 33585 - DNA, 1344 bp, Muscodor strobelii
  misc_feature: SGI cDNA ID NO. 571589
  misc_feature: Encodes the peptide sequence at SEQ ID NO 33586
atggagtctggaatcgatggacttctagatgttgcacgtcaaacgtacaaggaggctacagaagacgtgtatactcatgtagatgacatcaatagagagcataacatggtcgctgaggtgaagttcgataaccgccgcaaattctggctacgcctgaaggaaagtgacttcgaagacaacgcactgcccgacatcttgatcaatgctgtgagaaagaatcattggattgagtgccagacattgcttttagtccagctaaataacagaatcactgattctcacaatgaggctatcatgggcagcgataaagtcgttcagcaacttctcaacaagatccgtgtccacgtccccgatctttttcgcgtgtgcgaaggcattgctctccttgatatgatagcttcttttgcacaatcagcgactactcgggattatgtacgacctgaaatcacagatactctcgctttgaaggcggcacgtcaccccgtctgcgagcggatcaatccagagaggttcgtaccaaatgatgtgtttgcgaacgagcagagtcggttccagatcatcactggatgtaatatgagtggcaaaagtacttacatcaggatgataccgcatctacaagttatggctcaaatcggatcctttgttcctgcgcaatatgccacttttccaatcatccatcaactattcgtacggatgtcaacagatgacagtattgaggcgaacatgtccacattctccctcgaaatgagagaaatggcttttatcttgagaaacatcaacgacaaaagcttggccattatcgatgagcttggccgtggaactagtccgagagacggtctagctatttcactcgccatttctgaggctctggtccagagcaattccatggtatggtttgcgacccactttgaagagattgctaaggttcttggccatcgtccgggcgtactgaatcttcatcttgcaaccgagatctcgcaattgaccgacaaccaagcccagatgactatgctttataaagttgaatcgggtccagtacgagagaagaactatggcttgaaccttgcgaaagcgatgggattgcctgaacacttcatccgcgttgccgaacaaatttccaagacaatggcaaacgatctcgagggcaaaagaaacatgtcggagtcacgccgacttcatcgacagcgcaaggttatcttgaatctccatgattctctgatgcaactgaaagattccgatatggatgatgctgcattaggaagctacatgaagcgactccaagacgaatttctattccgaatggatggggagaatgatgaccacgaggcgggtcaagcacagtga

SEQ ID NO: 33586 - protein, 447 aa, Muscodor strobelii
  misc_feature: SGI Peptide ID NO. 571589
  misc_feature (144)..(379): Pfam Id: PF00488 Pfam Desc: MutS domain V
  misc_feature (1)..(435): NCBI GI: 46122645 Blast Desc: FG05700.1 [Gibberella zeae PH-1]
  misc_feature (1)..(435): NCBI GI: 256726688 Blast Desc: NECHADRAFT_90667 [Nectria haematococca mpVI 77-13-4]
  misc_feature (1)..(434): NCBI GI: 119172807 Blast Desc: CIMG_09972 [Coccidioides immitis RS]
  misc_feature (3)..(434): NCBI GI: 225678197 Blast Desc: conserved [Paracoccidioides brasiliensis Pb03]
  misc_feature (1)..(434): NCBI GI: 240111684 Blast Desc: MutS domain III family protein [Coccidioides posadasii C735 delta SOWgp]
  misc_feature (10)..(438): NCBI GI: 258569212 Blast Desc: UREG_06039 [Uncinocarpus reesii 1704] gi|237906796|gb|EEP81197.1| UREG_06039 [Uncinocarpus reesii 1704]
  misc_feature (3)..(434): NCBI GI: 226287696 Blast Desc: MutS [Paracoccidioides brasiliensis Pb18]
  misc_feature (3)..(439): NCBI GI: 225558129 Blast Desc: DNA mismatch repair protein [Ajellomyces capsulatus G186AR]
  misc_feature (1)..(442): NCBI GI: 255950710 Blast Desc: Pc22g22270 [Penicillium chrysogenum Wisconsin 54-1255] gi|211593139|emb|CAP99515.1| Pc22g22270 [Penicillium chrysogenum Wisconsin 54-1255]
  misc_feature (1)..(446): NCBI GI: 238843012 Blast Desc: DNA mismatch repair protein [Microsporum canis CBS 113480]
MESGIDGLLDVARQTYKEATEDVYTHVDDINREHNMVAEVKFDNRRKFWLRLKESDFEDNALPDILINAVRKNHWIECQTLLLVQLNNRITDSHNEAIMGSDKVVQQLLNKIRVHVPDLFRVCEGIALLDMIASFAQSATTRDYVRPEITDTLALKAARHPVCERINPERFVPNDVFANEQSRFQIITGCNMSGKSTYIRMIPHLQVMAQIGSFVPAQYATFPIIHQLFVRMSTDDSIEANMSTFSLEMREMAFILRNINDKSLAIIDELGRGTSPRDGLAISLAISEALVQSNSMVWFATHFEEIAKVLGHRPGVLNLHLATEISQLTDNQAQMTMLYKVESGPVREKNYGLNLAKAMGLPEHFIRVAEQISKTMANDLEGKRNMSESRRLHRQRKVILNLHDSLMQLKDSDMDDAALGSYMKRLQDEFLFRMDGENDDHEAGQAQ

SEQ ID NO: 33587 - DNA, 1812 bp, Muscodor strobelii
  misc_feature: SGI EST ID NO. CUFF.79366.0
  misc_feature: Variant of the nucleotide sequence at SEQ ID NO 33585
ctgatctccgcctagcttgttatcgtacgaccgcaaaactcgatctacgccttagaatccgctgtcgacctggttctaagagtaaaagcgttcgtggttgcagtcccaccattacacgattcactaggtgctgctcgaacggatcttttgaaacggattcgcgaattatgtcgaccaggggtaacgcaaccagtggcggatctaatcgcagaaacaatcaacgaagacgtcactgcgatgaagacacccattgacatgcgcaatcagaggacctatgcggtaaaatctggaatcgatggacttctagatgttgcacgtcaaacgtacaaggaggctacagaagacgtgtatactcatgtagatgacatcaataagcataacatggtcgctgaggtgaagttcgataaccgccgcaaattctggctacgcctgaaggaaagtgacttcgaagacaacgcactgcccgacatcttgatcaatgctgtgagaaagaatcattggattgagtgccagacattgcttttagtccagctaaataacagaatcactgattctcacaatgaggctatcatgggcagcgataaagtcgttcagcaacttctcaacaagatccgtgtccacgtccccgatctttttcgcgtgtgcgaaggcattgctctccttgatatgatagcttcttttgcacaatcagcgactactcgggattatgtacgacctgaaatcacagatactctcgctttgaaggcggcacgtcaccccgtctgcgagcgggtaagtttaagggactgttccagtatgccagagacaccacatatgttgacagattatagatcaatccagagaggttcgtaccaaatgatgtgtttgcgaacgagcagagtcggttccagatcatcactggatgtaatatgagtggcaaaagtacttacatcaggatgataccgcatctacaagttatggctcaaatcggatcctttgttcctgcgcaatatgccacttttccaatcatccatcaactattcgtacggatgtcaacagatgacagtattgaggcgaacatgtccacattctccctcgaaatgagagaaatggcttttatcttgagaaacatcaacgacaaaagcttggccattatcgatgagcttggccgtggaactagtccgagagacggtctagctatttcactcgccatttctgaggctctggtccagagcaattccatggtatggtttgcgacccactttgaagagattgctaaggttcttggccatcgtccgggcgtactgaatcttcatcttgcaaccgagatctcgcaattgaccgacaaccaagcccagatgactatgctttataaagttgaatcgggtccagtacgagagaagaactatggcttgaaccttgcgaaagcgatgggattgcctgaacacttcatccgcgttgccgaacaaatttccaagacaatggcaaacgatctcgagggcaaaagaaacatgtcggagtcacgccgacttcatcgacagcgcaaggttatcttgaatctccatgattctctgatgcaactgaaagattccgatatggatgatgctgcattaggaagctacatgaagcgactccaagacgaatttctattccgaatggatggggagaatgatgaccacgaggcgggtcaagcacagtgagctatatggatgatcgtgtagtgataatctttgcaatcttgtattttggcatcgagtaagactccacaaaactctgtgctttgtccctaacatacaaatcgacctccttgagagatgataatgcttatacgag

SEQ ID NO: 33588 - DNA, 768 bp, Muscodor strobelii
  misc_feature: SGI cDNA ID NO. 571590
  misc_feature: Elevated expression when VOC is produced
  misc_feature: Encodes the peptide sequence at SEQ ID NO 33589
atggccgatggtttagtcgatggttcactcgagcgtggacagctccaagaactcatcgcaccccagcacgttcagttctttgacatggactggaactcattggggtcaaggcacaatttagaagatcttttgcatacaatcacccggatcgatcatgaactgttacgagatcgcatcatctccgatatctacttgctgaacagatattcagtacacagcaaaatggcatgggccagcaatcgaaagtcgacacggccggaagatacagcatatagcttgatagggcttttcaacgtgaacatgccattgctatacggggagggtgggcaacgcgcatttcagcgcttgcaagaggaaattgtgaaggagtcgaatgatcagtccatactcttgcaccaagggcagtcttggcccctggcgaattctccagctgattattcgccgtctctcatctttaagaagagccatattggcgccgattttccactggaaatgtccaagaccgggttctcagtgagcttactgctctgcccacttcactcggacccttcaataccggctgtatatggtataatcgaaagcctattcggtgatgacccatctgagttgtcacgaccgatagtagttcttcacaaaatcggacagaacgagtattgtcgtcgatttgggatggaaatatatcgagtacaatatggctttggcggtgaaggtgcgattactgccagtgctggtaagtcctcaatgtttgtattagccacatcgccctag

SEQ ID NO: 33589 - protein, 255 aa, Muscodor strobelii
  misc_feature: SGI Peptide ID NO. 571590
  misc_feature (15)..(182): NCBI GI: 238493477 Blast Desc: conserved [Aspergillus flavus NRRL3357] gi|220696469|gb|EED52811.1| conserved [Aspergillus flavus NRRL3357]
  misc_feature (10)..(178): NCBI GI: 258563992 Blast Desc: [Uncinocarpus reesii 1704] gi|237908248|gb|EEP82649.1| [Uncinocarpus reesii 1704]
  misc_feature (15)..(229): NCBI GI: 256733553 Blast Desc: [Nectria haematococca mpVI 77-13-4]
  misc_feature (15)..(176): NCBI GI: 145602171 Blast Desc: MGG_12935 [Magnaporthe grisea 70-15] gi|145010601|gb|EDJ95257.1| MGG_12935 [Magnaporthe grisea 70-15]
  misc_feature (15)..(220): NCBI GI: 85092369 Blast Desc: NCU04912 [Neurospora crassa OR74A] gi|28920765|gb|EAA30124.1| [Neurospora crassa OR74A]
  misc_feature (15)..(179): NCBI GI: 46128083 Blast Desc: FG08419.1 [Gibberella zeae PH-1]
  misc_feature (10)..(176): NCBI GI: 256721662 Blast Desc: NECHADRAFT_18017 [Nectria haematococca mpVI 77-13-4]
  misc_feature (15)..(176): NCBI GI: 169605897 Blast Desc: SNOG_05981 [Phaeosphaeria nodorum SN15] gi|111065925|gb|EAT87045.1| SNOG_05981 [Phaeosphaeria nodorum SN15]
  misc_feature (15)..(188): NCBI GI: 121715886 Blast Desc: HET domain protein [Aspergillus clavatus NRRL 1] gi|119403709|gb|EAW14126.1| HET domain protein [Aspergillus clavatus NRRL 1]
  misc_feature (10)..(181): NCBI GI: 169780438 Blast Desc: [Aspergillus oryzae RIB40] gi|83773423|dbj|BAE63550.1| protein product [Aspergillus oryzae]
  misc_feature: Useful for introducing or modulating the production of volatile compounds
MADGLVDGSLERGQLQELIAPQHVQFFDMDWNSLGSRHNLEDLLHTITRIDHELLRDRIISDIYLLNRYSVHSKMAWASNRKSTRPEDTAYSLIGLFNVNMPLLYGEGGQRAFQRLQEEIVKESNDQSILLHQGQSWPLANSPADYSPSLIFKKSHIGADFPLEMSKTGFSVSLLLCPLHSDPSIPAVYGIIESLFGDDPSELSRPIVVLHKIGQNEYCRRFGMEIYRVQYGFGGEGAITASAGKSSMFVLATSP

SEQ ID NO: 33590 - DNA, 2385 bp, Muscodor strobelii
  misc_feature: SGI EST ID NO. CUFF.79370.0
  misc_feature: Variant of the nucleotide sequence at SEQ ID NO 33588
ttcgcaaataagcttggcagcttgtgccatttcttttgttaatactccagctatgaggctggcaacctcaacatctcaattcactttgaacctacatttgcaatacatctagggtagtgcacatactaggtaattagatgtccaagcgcggattcgctgttcagcatcatcttccaatatccgatcattttctccacaacccacatagtattgagaaatttaacaacacgaagctttgagacaggggcatcgccagctgatagttgtgtatgtccgctgggtatctacacttcgaggttcgggtagtgattgatacttatccactaccatgcgcttgttaaataccaaaactttagagctggagcagtttctcggggaagataaaccccgttacgcaatactttcgcatacctgggggccagacgaacttgagttcgaggatatatttccgccaagggctgatacgccatgggttatcaagctaggtgccgttaaagtgaagagagcagcagagcttgctgcgagagagggttatgactacatatggattgatacttgctgttggtctttagcgacattatcctgagattctactgacagaacaataggtatagcgaaaagcagcagcgcagaactatcagaagccataaattccatgttccagtggtataataaatcaacaatatgctatgcgtacctctcagacgtaagcatcaatcttcagaagaaccgagacaacctgaaagactacgatggccgatggtttagtcgatggttcactcgagcgtggacagtacgttatacattttgtatcgacaataagcttcttccataattgccaaaaatacacacggttcatgatggaattcaatatcgacgtactgacaacttaactttaagctccaagaactcatcgcaccccagcacgttcagttctttgacatggactggaactcattggggtcaaggcacaatttagaagatcttttgcatacaatcacccggatcgatcatgaactgttacgagatcgcatcatctccgatatctacttgctgaacagatattcagtacacagcaaaatggcatgggccagcaatcgaaagtcgacacggccggaagatacagcatatagcttgatagggcttttcaacgtgaacatgccattgctatacggggagggtgggcaacgcgcatttcagcgcttgcaagaggaaattgtgaaggagtcgaatgatcagtccatactcttgcaccaagggcagtcttggcccctggcgaattctccagctgattattcgccgtctctcatctttaagaagagccatattggcgccgattttccactggaaatgtccaagaccgggttctcagtgagcttactgctctgcccacttcactcggacccttcaataccggctgtatatggtataatcgaaagcctattcggtgatgacccatctgagttgtcacgaccgatagtagttcttcacaaaatcggacagaacgagtattgtcgtcgatttgggatggaaatatatcgagtacaatatggctttggcggtgaaggtgcgattactgccagtgctggtaagtcctcaatgtttgtattagccacatcgccctagagtctcttttacatagccgtcaattcgaatcaatgcttatgatgccggggttacaaggaacctttgtcgaaaccaacattgcacatgataaattagagcgaaaagtaatcaaactacgcccaattacgtcgatgcaaacgctgggggctttggaattagatccgagtccaaaaccaaatactcgtttacgtctacaagcgattaataattcggcagctacctacaacttcgactatgacaattgctggccagaaaatcgtgcaagttgggttattctagacaactcacatgttgatgccatttcaaaggtaaagcttaccgcgatcatcttcctcaaatcgatcaaatgtggaggcacatctgctctcgttttgatcatgagagagccggggccgctcagcgagcacttcacgtttctagtcaacatacctgagttaactagatatactaaccccaatttgaataattcgttatgggcttacgactttgtgatcccaaggcttccaatgttcgaggatagtggtcgcaatgtctctgttgaaggtgcaatgattcggtggcgagaggagcatcgcatggcaaattcttgtgcgattatgcttcccgatggcgcccgcatgattgccagactgaaacaacatgtattcttagagagtccagtctatcagctaaacatcgatgttatcggctaggcattaggcatctatcaacgaactggaatatagcctaaccagtcatacatccggagttgacttcatt

SEQ ID NO: 33591 - DNA, 201 bp, Muscodor strobelii
  misc_feature: SGI cDNA ID NO. 571591
  misc_feature: Elevated expression when VOC is produced
  misc_feature: Encodes the peptide sequence at SEQ ID NO 33592
atgggtggacaagatcgcgctggcggcaaggccaagcccttgaaggccccaaagaagcagcagaaagaggtcgacgatgacgatgtcgccttccgtgagaagcaaaaagccgacgccaaagctcgagctgaaatggctcagaaggccgccggaaagggtcctctgacctcgggcggtatcaagaagagcggcaagaaatag

SEQ ID NO: 33592 - protein, 66 aa, Muscodor strobelii
  misc_feature: SGI Peptide ID NO. 571591
  misc_feature (4)..(66): Pfam Id: PF09072 Pfam Desc: Translation machinery associated TMA7
  misc_feature (1)..(66): NCBI GI: 67537534 Blast Desc: AN4937.2 [Aspergillus nidulans FGSC A4] gi|40741825|gb|EAA61015.1| AN4937.2 [Aspergillus nidulans FGSC A4] gi|259482192|tpe|CBF76439.1| TPA: conserved [Aspergillus FGSC
  misc_feature (1)..(66): NCBI GI: 119491825 Blast Desc: NFIA_066770 [Neosartorya fischeri NRRL 181] gi|119411567|gb|EAW21510.1| conserved [Neosartorya fischeri NRRL 181]
  misc_feature (1)..(66): NCBI GI: 46116420 Blast Desc: FG04052.1 [Gibberella zeae PH-1]
  misc_feature (1)..(66): NCBI GI: 258563728 Blast Desc: [Uncinocarpus reesii 1704] gi|237908116|gb|EEP82517.1| [Uncinocarpus reesii 1704]
  misc_feature (1)..(66): NCBI GI: 240281496 Blast Desc: HCDG_00578 [Ajellomyces capsulatus H143]
  misc_feature (1)..(66): NCBI GI: 238838216 Blast Desc: conserved [Microsporum canis CBS 113480]
  misc_feature (7)..(66): NCBI GI: 240108316 Blast Desc: CPC735_006620 [Coccidioides posadasii C735 delta SOWgp]
  misc_feature (1)..(66): NCBI GI: 145252486 Blast Desc: An16g04450 [Aspergillus niger] gi|134083307|emb|CAK46862.1| protein product [Aspergillus niger]
  misc_feature (1)..(66): NCBI GI: 238486984 Blast Desc: coiled-coil domain-containing protein, [Aspergillus flavus NRRL3357] gi|220699609|gb|EED55948.1| coiled-coil domain-containing protein, [Aspergillus flavus NRRL3357]
  misc_feature (1)..(66): NCBI GI: 149251388 Blast Desc: : similar to HSPC016 [Mus musculus] gi|149251652|ref|XP_001474376.1| : similar to HSPC016 [Mus musculus]
  misc_feature: Useful for introducing or modulating the production of volatile compounds
MGGQDRAGGKAKPLKAPKKQQKEVDDDDVAFREKQKADAKARAEMAQKAAGKGPLTSGGIKKSGKK

SEQ ID NO: 33593 - DNA, 1158 bp, Muscodor strobelii
  misc_feature: SGI EST ID NO. CUFF.79591.0
  misc_feature: Variant of the nucleotide sequence at SEQ ID NO 33591
gggtggctttaggctgctagtctgattggaccccagaagtgttgcagtccaggtcagcgtccgtctgactgtcgagtattttcccgcatttcagtccaaccttgaacaggctcgccctttgtcattcttgcgacacttaagcggccgaaatccgtacccgagcatttcgtgcgcgtcatctttgattttctcagaaacaggctcccacatccaaaaatgggtggacaagatcgcgctggcggcaaggccaagcccttgaaggccccaaagaagcagcagaaagaggtcgacgatgacgatgtcgccttccgtgagaagcaaaaagccgacgccaaagctcgagctgaaatggctcagaaggccgccggaaagggtcctctgacctcgggcggtatcaagaagagcggcaagaaatagaaatactttgcgccatttacgaatagacgatatgatacgatacgacagcatgacaacgacggtcgccgccccaggcctatcgtgctctaccaccatcacgagtcccatttgtcagagggcagtgtggcatttctctaggcgtacaagatgtgagataggagttatggttcataggttatccttgccatagcaagcaatagacatttccgttacgccgtacctatctggaagcagacctaggtgactgtctaaatttaaagccatacgctatgttccatcatagaatacactgtgctccctcgctgctgtgatggtaatcaaatgcaaccgtcatacctttgagatgagccgctgctgcaagaagaatgagcacgtgaaagagttggtgagagtgtccccagatgtcgaaagtgccgggtgaggtccgctcaggccagcgagcctatgacactatcagaacggaagtcttgtagtaacactataggggaaaatggataggcgaggttgacttacagcgtataagaaggctcctgagatgtaaagtgcgccttgaagcaaaacccagtttagccccatctgttgattgagcgattggtatccgtatatcatgaggctatggcaaacagggacaacgcccgagacgcccaaaccgacgaacattgcagctctatacggccgccattgaggtgtccggaacttgtcaacccatgacacaacgccacaacatatgccaagcatgca

SEQ ID NO: 33594 - DNA, 960 bp, Muscodor strobelii
  misc_feature: SGI cDNA ID NO. 571592
  misc_feature: Elevated expression when VOC is produced
  misc_feature: Encodes the peptide sequence at SEQ ID NO 33595
atggactcaaccaacgactccgtctcccggccccggcgccgacgtgcctcaaacacgacagctgcaatagccgatgcagcaataaaggtagagcgcaaagtgacctccgctatattgctgctatgggatgacctgccgcattggcgtagggataacgccttcatcttatccgggtatcgaccctcgacgaatagctacgtaagctcgctactaagcgcgttcagcgttcacaacgaaagcgtgaacatttggacccatgcaataggcgctctagtatttgtgccggtagcgatgtggtttctctacaccgagatagtcccccggtaccccagcgctgggcctgcagacgagttcgcgttttcgtgcttcttcagcggcgcggctctatgtctcggcatgagcgccacttttcatacgctctcaaaccattcagaggctgttgcgaaatgggggaataagctcgattattctgggattgtttgtctcattgttggcagttatgtaccggctcttcactatgggctgttctgcctcccagctttaaagaagatgtacctctacgctatatgcatgcttggcatatgttgtggcgttgtgtcatgggttgacaagttccggacacctcaatggcggccgtatagagctgcaatgttcgtcggtttgggcgtctcgggcgttgtccctgtttgccatagcctcatgatatacggataccaatcgctcaatcaacagatggggctaaactgggttttgcttcaaggcgcactttacatctcaggagccttcttatacgctgctcgctggcctgagcggacctcacccggcactttcgacatctggggacactctcaccaactctttcacgtgctcattcttcttgcagcagcggctcatctcaaaggtatgacggttgcatttgattaccatcacagcagcgagggagcacagtgtattctatga

SEQ ID NO: 33595 - protein, 319 aa, Muscodor strobelii
  misc_feature: SGI Peptide ID NO. 571592
  misc_feature (74)..(299): Pfam Id: PF03006 Pfam Desc: Haemolysin-III related
  misc_feature (20)..(315): NCBI GI: 261357754 Blast Desc: adiponectin receptor protein [Verticillium albo-atrum VaMs.102]
  misc_feature (8)..(317): NCBI GI: 39940336 Blast Desc: MGG_05072 [Magnaporthe grisea 70-15] gi|145010676|gb|EDJ95332.1| MGG_05072 [Magnaporthe grisea 70-15]
  misc_feature (13)..(317): NCBI GI: 171676938 Blast Desc: protein product [Podospora anserina] gi|170936536|emb|CAP61196.1| protein product [Podospora anserina]
  misc_feature (9)..(317): NCBI GI: 156053275 Blast Desc: SS1G_06805 [Sclerotinia sclerotiorum 1980] gi|154704583|gb|EDO04322.1| SS1G_06805 [Sclerotinia sclerotiorum 1980]
  misc_feature (9)..(317): NCBI GI: 154314660 Blast Desc: BC1G_04039 [Botryotinia fuckeliana B05.10] gi|150848661|gb|EDN23854.1| BC1G_04039 [Botryotinia fuckeliana B05.10]
  misc_feature (9)..(319): NCBI GI: 119491815 Blast Desc: haemolysin-III channel protein Izh2, [Neosartorya fischeri NRRL 181] gi|119411562|gb|EAW21505.1| haemolysin-III channel protein Izh2, [Neosartorya fischeri NRRL 181]
  misc_feature (17)..(319): NCBI GI: 70999690 Blast Desc: haemolysin-III channel protein Izh2 [Aspergillus fumigatus Af293] gi|66852199|gb|EAL92524.1| haemolysin-III channel protein Izh2, [Aspergillus fumigatus Af293] channel Izh2,
  misc_feature (1)..(317): NCBI GI: 169770593 Blast Desc: [Aspergillus oryzae RIB40] gi|83767625|dbj|BAE57764.1| protein product [Aspergillus oryzae]
  misc_feature (4)..(317): NCBI GI: 85089578 Blast Desc: NCU04987 [Neurospora crassa OR74A] gi|28919319|gb|EAA28777.1| NCU04987 [Neurospora crassa OR74A]
  misc_feature (5)..(317): NCBI GI: 121705596 Blast Desc: haemolysin-III channel protein Izh2, [Aspergillus clavatus NRRL 1] gi|119399207|gb|EAW09635.1| haemolysin-III channel protein Izh2, [Aspergillus clavatus NRRL 1]
  misc_feature: Useful for introducing or modulating the production of volatile compounds
MDSTNDSVSRPRRRRASNTTAAIADAAIKVERKVTSAILLLWDDLPHWRRDNAFILSGYRPSTNSYVSSLLSAFSVHNESVNIWTHAIGALVFVPVAMWFLYTEIVPRYPSAGPADEFAFSCFFSGAALCLGMSATFHTLSNHSEAVAKWGNKLDYSGIVCLIVGSYVPALHYGLFCLPALKKMYLYAICMLGICCGVVSWVDKFRTPQWRPYRAAMFVGLGVSGVVPVCHSLMIYGYQSLNQQMGLNWVLLQGALYISGAFLYAARWPERTSPGTFDIWGHSHQLFHVLILLAAAAHLKGMTVAFDYHHSSEGAQCIL

SEQ ID NO: 33596 - DNA, 2110 bp, Muscodor strobelii
  misc_feature: SGI EST ID NO. CUFF.79592.1
  misc_feature: Variant of the nucleotide sequence at SEQ ID NO 33594
gttcatttgtatgaacagtctctttttgatctctgtcaaaacttattaacagctttatagcggactgttcctgagaaatgttgtgcattcgaattgactacacagagataaactcagttcagtcaagatttatgcgctaatcccaatctggacatttctagagtcgacatagaaatggaagacttaaagtcttccatttccaccgtcgactataactaacgtcttacatcttataaaagtgtcaaaaactgatgctttgaagcaactggatgtatctttgtgatattatcgagatattgacatctccccggtcatcctctcattacccatccaaatcgatggactcaaccaacgactccgtctcccggccccggcgccgacgtgcctcaaacacgacagctgcaatagccgatgcagcaataaaggtagagcgcaaagtgacctccgctatattgctgctatgggatgacctgccgcattggcgtagggataacgccttcatcttatccgggtatcgaccctcgacgaatagctacgtaagctcgctactaagcgcgttcagcgttcacaacgaaagcgtgaacatttggacccatgcaataggcgctctagtatttgtgccggtagcgatgtggtttctctacaccgagatagtcccccggtaccccagcgctgggcctgcagacgagttcgcgttttcgtgcttcttcagcggcgcggctctatgtctcggcatgagcgccacttttcatacgctctcaaaccattcagaggctgttgcgaaatgggggaataagctcgattattctgggattgtttgtctcattgttggcagttatgtaccggctcttcactatgggctgttctgcctcccagctttaaagaagatgtacctctacgctatatgcatgcttggcatatgttgtggcgttgtgtcatgggttgacaagttccggacacctcaatggcggccgtatagagctgcaatgttcgtcggtttgggcgtctcgggcgttgtccctgtttgccatagcctcatgatatacggataccaatcgctcaatcaacagatggggctaaactgggttttgcttcaaggcgcactttacatctcaggagccttcttatacgctgctcgctggcctgagcggacctcacccggcactttcgacatctggggacactctcaccaactctttcacgtgctcattcttcttgcagcagcggctcatctcaaaggtatgacggttgcatttgattaccatcacagcagcgagggagcacagtgtattctatgatggaacatagcgtatggctttaaatttagacagtcacctaggtctgcttccagataggtacggcgtaacggaaatgtctattgcttgctatggcaaggataacctatgaaccataactcctatctcacatcttgtacgcctagagaaatgccacactgccctctgacaaatgggactcgtgatggtggtagagcacgataggcctggggcggcgaccgtcgttgtcatgctgtcgtatcgtatcatatcgtctattcgtaaatggcgcaaagtatttctatttcttgccgctcttcttgataccgcccgaggtcagaggaccctttccggcggccttctgagccatttcagctcgagctttggcgtctagcgatactgttaggtcggattctgattctgatcaagattgaacggcgtcctaaccggctttttgcttctcacggaaggcgacatcgtcatcgtcgacctctttctgctgcttctttggggccttcaagggcttggccttgccgcctgtaggcaaaatttggttagttccaggctcgactaatcggtggcggggtcgtcgacgtaccagcgcgatcttgtccacccatttttggatgtgggagcctgtttctgagaaaatcaaagatgacgcgcacgaaatgctcgggtacggatttcggccgcttaagtgtcgcaagaatgacaaagggcgagcctgttcaaggttggactgaaatgcgggaaaatactcgacagtcagacggacgctgacctggactgcaacacttctggggtccaatcagactagcagcctaaagccaccc

SEQ ID NO: 33597 - DNA, 2367 bp, Muscodor strobelii
  misc_feature: SGI cDNA ID NO. 571593
  misc_feature: Encodes the peptide sequence at SEQ ID NO 33598
atgaggctacgtcaatcaaatcagcagaagcggtttgcgcttgaaccggacgcttcagacccaaacgaagctgtgcccgacgccgcatcttctgaggatgagtttatcgataaaatcgcgtctgacgaaataacgggagatgaagacgaacagggccatgacacacacctgaacggtaacgcgggccccagctttttcggagccacaacaactgcacgacagcgtgcgtctcagcgcaaacagcgagctgatcaaccaaggtgcgctgtcggtgaagaggtacctgcgtacccatcagatccaggtcaacgatggactagagcctatcatggaccattgaaaagatggactcgactctatgaattaatagattggtggtatggagataattccgaccggaggctgatcgttgatgaattcatgagaatctggtggcagcaccagctcttgccgcccagactgtctgtaccagcccacctctggcgggctcagcatggatggatgaacgagaacttcgccgctgagcagcgatcaagatatcgagaattgcacgaatatcgtcttatgaatcagacttcacaacaaagctcaacaataattgacaaggagaaagtttttcacgaattccttcctcaaactgggggggacctgaaagtgctcttgggccctatctcagaccagaggaaatatacaattcagtatggcgaaagtatatcatgctcggactctggtgttccaatcgacagtggggaaagtaacgacatcactatcggaggttggcttcttgatgttggaggcattattgtgtccatggcttgggcgcctactgtaggcgaggttgaccaacttatagccattgctgttgctccattttccgatcaggccttctacagaaacctaagcgagttgcctcagtcctcagaccagaaacaaggaactgtccaaatcctacgtttcgaagcaatgaaggatgaaatgaacgtcattcgaccttcgcggcgcgcaccgaggcttgctcatttattatgcttctcatggggccgagtatcgaagatacattggtgtcctatagcactaacagtcgaagattctgctcgacttcttggtgttctttgtggagacggaaaactcagaatattgagtgttcggaattcctcagggcaggacatcaatgaagttttcgaggaaatagaaaatcctttggtcacatttgaaccaccgaatgaggcttcccttgaaatcacttgtttcacgtggatcaatatgaatcgtgtggccgcgggtttgtcagatggctctgtgggcgtttggtcagtttcgccccctcgattcctccagcggcatcccatccactctgccgccattatggagattacatcaggatatccatctgatccctggattgttgcaacaataccaatcggcggcttaatgaccatgaccgatctgagacttcctagtgcggaggtgacatatcatcccagtgccatggtttctctacaacccaaccttctagcctggagtccactcatcagaggctttgcctcgatttggccctctgcatttgctggcaatcccaatatctcttttcttccacttaaatcctttcctctttgccgtcacctaattaccgtagacgggcaacccacgtgtgttggcgtaagcgcatgtcatgcgtatgctcttgtcggcacgaatgatgggtcggtttgggcgttcagcatgctacacaaactctcaacatacagaaagatcactcacaaggtgaaagtatttcaacatgagtttagaggtacccttcggtcaaaagctgcagactgtgaagatggaccagccaacagtcgtggaacaagccgaattgtgcatggttttcttccaaggccaaatcagcatccagttagtgtaaagatggctgagacccagcgacagaatcgcaagagaggaaagaaaggaaaacccaaggataaggggaaatctacagcaaaacctaagcgcccttctggcccagctgaggaagagggagacgaagaagctgccatgacttcaggccccggaccgatcattctcaatgatcctcaaaccagaattactgtcactgcatggaatccgaacgccgaatatagctggtgggcagctgtggccatgggttctggcttattaagggttgtcgatctgggggtagacccgcgcggggaagatgagttgttagagataaaacttcaagatgaagacagtgctgatgagagtgacgctgacgacacaatggagcccattggcgatgaggacattgatgaaacaaatgagcacgattattatgatgacggagagcaggagcaggatcaatcggacacagaaatggttttgtga

SEQ ID NO: 33598 - protein, 788 aa, Muscodor strobelii
  misc_feature: SGI Peptide ID NO. 571593
  misc_feature (93)..(727): NCBI GI: 164425832 Blast Desc: NCU04986 [Neurospora crassa OR74A] gi|157071082|gb|EAA28776.2| NCU04986 [Neurospora crassa OR74A]
  misc_feature (93)..(728): NCBI GI: 171676936 Blast Desc: protein product [Podospora anserina] gi|170936535|emb|CAP61195.1| protein product [Podospora anserina]
  misc_feature (97)..(728): NCBI GI: 39940338 Blast Desc: MGG_05071 [Magnaporthe grisea 70-15] gi|145010677|gb|EDJ95333.1| MGG_05071 [Magnaporthe grisea 70-15]
  misc_feature (1)..(727): NCBI GI: 256723094 Blast Desc: [Nectria haematococca mpVI 77-13-4]
  misc_feature (104)..(727): NCBI GI: 46116416 Blast Desc: FG04050.1 [Gibberella zeae PH-1]
  misc_feature (68)..(728): NCBI GI: 116196676 Blast Desc: CHGG_04936 [Chaetomium globosum CBS 148.51] gi|88180849|gb|EAQ88317.1| CHGG_04936 [Chaetomium globosum CBS 148.51]
  misc_feature (200)..(727): NCBI GI: 121705560 Blast Desc: transcription factor TFIIIC complex subunit Tfc6, [Aspergillus clavatus NRRL 1] gi|119399189|gb|EAW09617.1| transcription factor TFIIIC complex subunit Tfc6, [Aspergillus 1]
  misc_feature (1)..(383): NCBI GI: 261357756 Blast Desc: conserved [Verticillium albo-atrum VaMs.102]
  misc_feature (157)..(728): NCBI GI: 115396222 Blast Desc: conserved [Aspergillus terreus NIH2624] gi|114193319|gb|EAU35019.1| conserved [Aspergillus terreus NIH2624]
  misc_feature (200)..(727): NCBI GI: 119491849 Blast Desc: transcription factor TFIIIC complex subunit Tfc6, [Neosartorya fischeri NRRL 181] gi|119411579|gb|EAW21522.1| transcription factor TFIIIC complex subunit Tfc6, [Neosartorya
MRLRQSNQQKRFALEPDASDPNEAVPDAASSEDEFIDKIASDEITGDEDEQGHDTHLNGNAGPSFFGATTTARQRASQRKQRADQPRCAVGEEVPAYPSDPGQRWTRAYHGPLKRWTRLYELIDWWYGDNSDRRLIVDEFMRIWWQHQLLPPRLSVPAHLWRAQHGWMNENFAAEQRSRYRELHEYRLMNQTSQQSSTIIDKEKVFHEFLPQTGGDLKVLLGPISDQRKYTIQYGESISCSDSGVPIDSGESNDITIGGWLLDVGGIIVSMAWAPTVGEVDQLIAIAVAPFSDQAFYRNLSELPQSSDQKQGTVQILRFEAMKDEMNVIRPSRRAPRLAHLLCFSWGRVSKIHWCPIALTVEDSARLLGVLCGDGKLRILSVRNSSGQDINEVFEEIENPLVTFEPPNEASLEITCFTWINMNRVAAGLSDGSVGVWSVSPPRFLQRHPIHSAAIMEITSGYPSDPWIVATIPIGGLMTMTDLRLPSAEVTYHPSAMVSLQPNLLAWSPLIRGFASIWPSAFAGNPNISFLPLKSFPLCRHLITVDGQPTCVGVSACHAYALVGTNDGSVWAFSMLHKLSTYRKITHKVKVFQHEFRGTLRSKAADCEDGPANSRGTSRIVHGFLPRPNQHPVSVKMAETQRQNRKRGKKGKPKDKGKSTAKPKRPSGPAEEEGDEEAAMTSGPGPIILNDPQTRITVTAWNPNAEYSWWAAVAMGSGLLRVVDLGVDPRGEDELLEIKLQDEDSADESDADDTMEPIGDEDIDETNEHDYYDDGEQEQDQSDTEMVL

SEQ ID NO: 33599 - DNA, 3291 bp, Muscodor strobelii
  misc_feature: SGI EST ID NO. CUFF.79376.0
  misc_feature: Variant of the nucleotide sequence at SEQ ID NO 33597
cacgaagtcctgaggtgggacgcggtggaaacagcacaatggttgttaatccgtgacaagcctgaatctagaaatgtgtacccagaggtgtgatggctgtcatgcaagtttaccggaatcgacctgtccgaattttgatgtttatgtagattatttgttcaaagctgaccttggcgcattgtatcctgagaactcttgaagtggattacgaaagtttccaaaatgtgaataagagaggtatatgaaaaggcgcatcacatccacaagatccatccgtgattctaatggaagttgctgctgaggcatttcgccaaaccccaccatagatgtaggtacctctaaggaccctacctaggtacgtagctaaggtagcctgtaattgacaagcactgcctacatgtacctagccttcgctaccacttattagggtatccagcattcaaggtacatttcaatgaaccactgcatgccaggtcaatcttacggacattacagacctttgccactccctaaagaagcacagctgcaatgtagttgcatccgcaatgaggctacgtcaatcaaatcagcagaagcggtttgcgcttgaaccggacgcttcagacccaaacgaagctgtgcccgacgccgcatcttctgaggatgagtttatcgataaaatcgcgtctgacgaaataacgggagatgaagacgaacagggccatgacacacacctgaacggtaacgcgggccccagctttttcggagccacaacaactgcacgacagcgtgcgtctcagcgcaaacagcgagctgatcaaccaaggtgcgctgtcggtgaagaggtacctgcgtacccatcagatccaggtcaacgatggactagagcctatcatggaccattgaaaagatggactcgactctatgaattaatagattggtggtatggagataattccgaccggaggctgatcgttgatgaattcatgagaatctggtggcagcaccagctcttgccgcccagactgtctgtaccagcccacctctggcgggctcagcatggatggatgaacgagaacttcgccgctgagcagcgatcaagatatcgagaattgcacgaatatcgtcttatgaatcagacttcacaacaaagctcaacaataattgacaaggagaaagtttttcacgaattccttcctcaaactgggggggacctgaaagtgctcttgggccctatctcagaccagaggaaatatacaattcagtatggcgaaagtatatcatgctcggactctggtgttccaatcgacagtggggaaagtaacgacatcactatcggaggttggcttcttgatgttggaggcattattgtgtccatggcttgggcgcctactgtaggcgaggttgaccaacttatagccattgctgttgctccattttccgatcaggccttctacagaaacctaagcgagttgcctcagtcctcagaccagaaacaaggaactgtccaaatcctacgtttcgaagcaatgaaggatgaaatgaacgtcattcgaccttcgcggcgcgcaccgaggcttgctcatttattatgcttctcatggggccgagtatcgaagatacattggtgtcctatagcactaacagtcgaagattctgctcgacttcttggtgttctttgtggagacggaaaactcagaatattgagtgttcggaattcctcagggcaggacatcaatgaagttttcgaggaaatagaaaatcctttggtcacatttgaaccaccgaatgaggcttcccttgaaatcacttgtttcacgtggatcaatatgaatcgtgtggccgcgggtttgtcagatggctctgtgggcgtttggtcagtttcgccccctcgattcctccagcggcatcccatccactctgccgccattatggagattacatcaggatatccatctgatccctggattgttgcaacaataccaatcggcggcttaatgaccatgaccgatctgagacttcctagtgcggaggtgacatatcatcccagtgccatggtttctctacaacccaaccttctagcctggagtccactcatcagaggctttgcctcgatttggccctctgcatttgctggcaatcccaatatctcttttcttccacttaaatcctttcctctttgccgtcacctaattaccgtagacgggcaacccacgtgtgttggcgtaagcgcatgtcatgcgtatgctcttgtcggcacgaatgatgggtcggtttgggcgttcagcatgctacacaaactctcaacatacagaaagatcactcacaaggtgaaagtatttcaacatgagtttagaggtacccttcggtcaaaagctgcagactgtgaagatggaccagccaacagtcgtggaacaagccgaattgtgcatggttttcttccaaggccaaatcagcatccagttagtgtaaagatggctgagacccagcgacagaatcgcaagagaggaaagaaaggaaaacccaaggataaggggaaatctacagcaaaacctaagcgcccttctggcccagctgaggaagagggagacgaagaagctgccatgacttcaggccccggaccgatcattctcaatgatcctcaaaccagaattactgtcactgcatggaatccgaacgccgaatatagctggtgggcagctgtggccatgggttctggcttattaagggttgtcgatctgggggtagacccgcgcggggaagatgagttgttagagataaaacttcaagatgaagacagtgctgatgagagtgacgctgacgacacaatggagcccattggcgatgaggacattgatgaaacaaatgagcacgattattatgatgacggagagcaggagcaggatcaatcggacacagaaatggttttgtgaagcttgtcagatcaatagcctagaatatacaagtagattactaaaagctgattctatgacccctcgtgcttgattctctacgataacgaatgtagcttgttcccccgaatcagacgacatggcgacttgtttgacctagaatatatctcaacgtgagcgaatgctgtgagcctggaatatttgcgattaatttaagcaccacttggtatgagtttgcttagacctatttcctaacttattacgtctcattacggagagaatttgaagggaacctgaagtaatatttgttgattgattgcctctgtgaacctgcacttttctcatcgtctcagctttcgaagacacgagatcgatcgatcatggtccatggagactcact

SEQ ID NO: 33600 - DNA, 1044 bp, Muscodor strobelii
  misc_feature: SGI cDNA ID NO. 571594
  misc_feature: Elevated expression when VOC is produced
  misc_feature: Encodes the peptide sequence at SEQ ID NO 33601
atggaagaagctgccgccgtcggcgatctcgacgctgttgagaagttattacccagcctattactaagccccgaccattctataccccttcatgagagggctgcgccgggggcgagcaccattcttgaccgttccattcgatccgcagctgcacatggctattccgatatcacacgattctttatcgccaaaggcgcggtgatcgatgatggtcttgtctgtgctgtgctcaactcaggttccatcgagcaatgtgaaatactgctgaagcacggttgggatgtcaatcgtagctacggtgtgtgggaaacagtcctattattttctatcattcactatactacagaaggatttatgctaatgatatgcgtcacaataagtgcatccggcgattggcatttttggacgcccttgcgtgctgctctcggaaatccttcattatgcttgtggttacttgagaacggcgccgaccccaatctttctgaatacgggttcactccaatcgtcaagctgctgatagaccatggcgccgacccgaaaacacagatgttactccatgcaaccgccagtgcctccagcagggcgaccgctgaactgtatccagacagggaagatccggacagaattggggtgatgcagatacttcttgatcacggtgcagatgttaatgagatggagccagacccaaaagcacggccacgagatgaccagagacgacgacggactgtagatacaggaacaccactccattatgcaattgcagcagacaatgccattgctgtcagctttctgttggcccatggagcggacccaaaaatccccagctggtcagggcatacggctcttcaggcagcagaagtcatggagatgcgatatattgcgcatatgtacgttgttcatctgctctttcaagcacatatagcatcatatccgagcacgggtaaaggaatagaagtacccatgtctgaacgggtattcgatcattcaagcgtacagctgatggacgtccacgaagtcactcgcgatttatgccccacgacctga

SEQ ID NO: 33601 - protein, 347 aa, Muscodor strobelii
  misc_feature: SGI Peptide ID NO. 571594
  misc_feature (244)..(276): Pfam Id: PF00023 Pfam Desc: Ankyrin repeat
  misc_feature (10)..(300): NCBI GI: 154415531 Blast Desc: ankyrin repeat protein [Trichomonas vaginalis G3] gi|121915011|gb|EAY19804.1| ankyrin repeat protein, [Trichomonas vaginalis G3]
  misc_feature (10)..(300): NCBI GI: 154415531 Blast Desc: ankyrin repeat protein [Trichomonas vaginalis G3] gi|121915011|gb|EAY19804.1| ankyrin repeat protein, [Trichomonas vaginalis G3]
  misc_feature (25)..(302): NCBI GI: 115877252 Blast Desc: : similar to ankyrin 2,3/unc44 [Strongylocentrotus purpuratus] gi|115970264|ref|XP_001190424.1| : similar to ankyrin 2,3/unc44 [Strongylocentrotus purpuratus]
  misc_feature (15)..(300): NCBI GI: 123492828 Blast Desc: ankyrin repeat protein [Trichomonas vaginalis G3] gi|121909065|gb|EAY13932.1| ankyrin repeat protein, [Trichomonas vaginalis G3]
  misc_feature (79)..(285): NCBI GI: 123506862 Blast Desc: ankyrin repeat protein [Trichomonas vaginalis G3] gi|121912250|gb|EAY17074.1| ankyrin repeat protein, [Trichomonas vaginalis G3]
  misc_feature (68)..(340): NCBI GI: 123474861 Blast Desc: ankyrin repeat protein [Trichomonas vaginalis G3] gi|121903420|gb|EAY08388.1| ankyrin repeat protein, [Trichomonas vaginalis G3]
  misc_feature (20)..(300): NCBI GI: 123425100 Blast Desc: ankyrin repeat protein [Trichomonas vaginalis G3] gi|121888320|gb|EAX93800.1| ankyrin repeat protein, [Trichomonas vaginalis G3]
  misc_feature (20)..(300): NCBI GI: 123425100 Blast Desc: ankyrin repeat protein [Trichomonas vaginalis G3] gi|121888320|gb|EAX93800.1| ankyrin repeat protein, [Trichomonas vaginalis G3]
  misc_feature (4)..(298): NCBI GI: 123479150 Blast Desc: ankyrin repeat protein [Trichomonas vaginalis G3] gi|121905586|gb|EAY10511.1| ankyrin repeat protein, [Trichomonas vaginalis G3]
  misc_feature (48)..(285): NCBI GI: 123476538 Blast Desc: ankyrin repeat protein [Trichomonas vaginalis G3] gi|121904267|gb|EAY09218.1| ankyrin repeat protein, [Trichomonas vaginalis G3]
  misc_feature: Useful for introducing or modulating the production of volatile compounds
MEEAAAVGDLDAVEKLLPSLLLSPDHSIPLHERAAPGASTILDRSIRSAAAHGYSDITRFFIAKGAVIDDGLVCAVLNSGSIEQCEILLKHGWDVNRSYGVWETVLLFSIIHYTTEGFMLMICVTISASGDWHFWTPLRAALGNPSLCLWLLENGADPNLSEYGFTPIVKLLIDHGADPKTQMLLHATASASSRATAELYPDREDPDRIGVMQILLDHGADVNEMEPDPKARPRDDQRRRRTVDTGTPLHYAIAADNAIAVSFLLAHGADPKIPSWSGHTALQAAEVMEMRYIAHMYVVHLLFQAHIASYPSTGKGIEVPMSERVFDHSSVQLMDVHEVTRDLCPTT

SEQ ID NO: 33602 - DNA, 2309 bp, Muscodor strobelii
  misc_feature: SGI EST ID NO. CUFF.79455.0
  misc_feature: Variant of the nucleotide sequence at SEQ ID NO 33600
ccaacatgttttggatcaggggaatgtcgaatctcactggcgctatgccgctgaatgattgacgggtcagctcgacgttacattattctgcgccaccattgttctccggttcccttcgtatctttctccaaagtccacaccctccacgccacaggctatccgccctgtctgtggtttccgccatttctatcggcgccagtcggggtagtcaggccaaatgtgatgttcacttggcggctgtgaggtgctgacggcatatcgtccttttcaagctacctgccctgcgcgaccgcgtagtcttgctctctacttgcccctcttcagatagaacaaccagatccgtatatgtatgcccgcacattgagatttcctggactgatgccaaaagatattacgcaatggaagaagctgccgccgtcggcgatctcgacgctgttgagaagttattacccagcctattactaagccccgaccattctataccccttcatgagagggctgcgccgggggcgagcaccattcttgaccgttccattcgatccgcagctgcacatggctattccgatatcacacgattctttatcgccaaaggcgcggtgatcgatgatggtcttgtctgtgctgtgctcaactcaggttccatcgagcaatgtgaaatactgctgaagcacggttgggatgtcaatcgtagctacgtaagtcgtatttgcccgattgaaagactcgacatcaaccggggaaatctagaatacaacacttcggttccaaaccatagcgaatgaaaagcggactaacatgattcaatacaccagataagtgcatccggcgattggcatttttggacgcccttgcgtgctgctctcggaaatccttcattatgcttgtggttacttgagaacggcgccgaccccaatctttctgaatacgggttcactccaatcggtacgtgtagaatccttcatgccggtcgcagatcacgagaattgttggctctttaacaccaaccaatttaactcttgctgcaatggtcgccgtacgattgcactcacctgaagtagtcaagctgctgatagaccatggcgccgacccgaaaacacagatgttactccatgcaaccgccagtgcctccagcagggcgaccgctgaactgtatccagacagggaagatccggacagaattggggtgatgcagatacttcttgatcacggtgcagatgttaatgagatggagccagacccaaaagcacggccacgagatgaccagagacgacgacggactgtagatacaggaacaccactccattatgcaattgcagcagacaatgccattgctgtcagctttctgttggcccatggagcggacccaaaaatccccagctggtcagggcatacggctcttcaggcagcagaagtcatggagatgcgatatattgcgcatatggtatgtacccacagatcccttgcccacgggctacttctccggggcacttttggacttagcgaacaaaacgtttgtgctcattcatctctagtgagtagctagcccacttggcacctacataccgatgatatttgtcccaaatcaagtctttaatgatgaaatcaaatatttcaactaacgggagatattttcaaccaatagactaagattatgtacgttgttcatctgctctttcaagcacatatagcatcatatccgagcgtaagtcatgatgtaagactagacggctaatacagcagtactcctcgaccagacgggtaaaggaatagaagtacccatgtctgaacgggtattcgatcattcaagcgtacagctgatggacgtccacgaagtcactcgcgatttatgccccacgacctgatatctgctggcgttgctggcatggatcgcatgctcgatataagtggtgcaagtgagattgaaagctgctcaatgcgattacgcaatctcgaaatgaatcattgagttcgcacaataagcagaggaagaggcagcctgtagatgaatctgtttccagcttgttacatatgaccattgggttaccagggactggccatggattatttacagcatcatcccaattgatgcgtctatgtactttacgcttacgataaataactacgatatctgatggctctgtttctctaagtagaactgagaaatcgtaacgctaagatgggaaaagatgcaccgacaagtatctacggttattctgatgtaactatcctcccaagcacatacttactatttccctatcagatcaaggctttcatggagatagcgattccgaaacagaatccgagtgttg

SEQ ID NO: 33603 - DNA, 1038 bp, Muscodor strobelii
  misc_feature: SGI cDNA ID NO. 571595
  misc_feature: Encodes the peptide sequence at SEQ ID NO 33604
atgtcgaaacccatcgtactccatatcggcgagccgatcaagtataaccacgagttctacaacaatgaattctgcaaacgttttgaagtcattcgcaacaccgagcccgatagagagtctttcctcaaggcactcaaagataaaaagtttggtgatttctctgctatttatcgtcctcatttccaaacagggggtgagatgggccagtgggacgatgaacttatatccttactgccgtcgtccctccgtatctttgcttcggctggagcgggcttcaattgggccgatgttgatgcgctcgggaggcggaaaatatggtatgcaaatggcgctggcgcgtctgacgaggccgtttctgataccggcttatatatggtgttgtcggtcttccgtaacgccaggaccgcagatcccgaaatattcaatgcgacgcacaaactcattgcgaccatttcaacaaatccaagagaccatattcttggaatcattggtttgggcaatatcagcaagaaacttgctttcaaagccaaagccgcgctcggaatgaaagtccactattacgatgtcgtaagagcaaccccagaagtcgaacaagagctcgaagcaactttccacacaagtttggatgaccttctagctcaagctgattgtatcagtatccacacacctcttaataaacacacacaagacctcatagatgctgcggcatttgaaaaaatgaagcacggtgcaaggattatcaacactgctcgggggccagtcgtgaatgaggaggctctcataaaaaatctcaaaagtggcaagatttcggcggcaggtttagatgttcattattacgagcctcaagtttcgaaagagctggcgcagatggaaaacgttaccttgacgacacacatagctggtggtgctttgaacactcggatcaatttcgaacttaatgcgatgaagaacattctcgctgtggtaggagaaaaaggagaatttattgggaaaccattaacgcctgttaacacgaaaacatttgaagcggcttcatag

SEQ ID NO: 33604 - protein, 345 aa, Muscodor strobelii
  misc_feature: SGI Peptide ID NO. 571595
  misc_feature (6)..(337): Pfam Id: PF00389 Pfam Desc: D-isomer specific 2-hydroxyacid dehydrogenase, catalytic domain
  misc_feature (123)..(300): Pfam Id: PF02826 Pfam Desc: D-isomer specific 2-hydroxyacid dehydrogenase, NAD binding domain
  misc_feature (71)..(337): Pfam Id: PF00389 Pfam Desc: D-isomer specific 2-hydroxyacid dehydrogenase, catalytic domain
  misc_feature (3)..(344): NCBI GI: 256722334 Blast Desc: NECHADRAFT_97907 [Nectria haematococca mpVI 77-13-4]
  misc_feature (2)..(344): NCBI GI: 261353683 Blast Desc: glyoxylate reductase [Verticillium albo-atrum VaMs.102]
  misc_feature (1)..(339): NCBI GI: 145248327 Blast Desc: An13g02770 [Aspergillus niger] gi|134081163|emb|CAK41673.1| protein product [Aspergillus niger]
  misc_feature (2)..(337): NCBI GI: 119497863 Blast Desc: D-mandelate dehydrogenase, [Neosartorya fischeri NRRL 181] gi|119413853|gb|EAW23792.1| D-mandelate dehydrogenase, [Neosartorya fischeri NRRL 181]
  misc_feature (2)..(337): NCBI GI: 70988821 Blast Desc: D-mandelate dehydrogenase [Aspergillus fumigatus Af293] gi|66846895|gb|EAL87226.1| D-mandelate dehydrogenase, [Aspergillus fumigatus Af293] gi|159128678|gb|EDP53792.1| A1163]
  misc_feature (3)..(337): NCBI GI: 46138331 Blast Desc: FG10680.1 [Gibberella zeae PH-1]
  misc_feature (1)..(337): NCBI GI: 212545380 Blast Desc: D-mandelate dehydrogenase, [Penicillium marneffei ATCC 18224] gi|210065813|gb|EEA19907.1| D-mandelate dehydrogenase, [Penicillium marneffei ATCC 18224]
  misc_feature (6)..(337): NCBI GI: 121711138 Blast Desc: D-mandelate dehydrogenase, [Aspergillus clavatus NRRL 1] gi|119401335|gb|EAW11759.1| D-mandelate dehydrogenase, [Aspergillus clavatus NRRL 1]
  misc_feature (1)..(338): NCBI GI: 256726305 Blast Desc: [Nectria haematococca mpVI 77-13-4]
  misc_feature (1)..(345): NCBI GI: 268612119 Blast Desc: A Chain A, Crystal Structure Of The Apo Forms Of Rhodotorula Graminis D-Mandelate Dehydrogenase At 1.8a. gi|268612121|pdb|2W2L|A Chain A, Crystal Structure Of The Holo Of
  misc_feature (32)..(328): SWISSPROT Homolog: EC 1.1.1.26 Glyoxylate reductase
MSKPIVLHIGEPIKYNHEFYNNEFCKRFEVIRNTEPDRESFLKALKDKKFGDFSAIYRPHFQTGGEMGQWDDELISLLPSSLRIFASAGAGFNWADVDALGRRKIWYANGAGASDEAVSDTGLYMVLSVFRNARTADPEIFNATHKLIATISTNPRDHILGIIGLGNISKKLAFKAKAALGMKVHYYDVVRATPEVEQELEATFHTSLDDLLAQADCISIHTPLNKHTQDLIDAAAFEKMKHGARIINTARGPVVNEEALIKNLKSGKISAAGLDVHYYEPQVSKELAQMENVTLTTHIAGGALNTRINFELNAMKNILAVVGEKGEFIGKPLTPVNTKTFEAAS

SEQ ID NO: 33605 - DNA, 1794 bp, Muscodor strobelii
  misc_feature: SGI cDNA ID NO. 571596
  misc_feature: Encodes the peptide sequence at SEQ ID NO 33606
atggacaacaatgccccaccatgtcgcagatgtgctgaaaagggccttgggtgtgtgctcaataagagcctacagacactcatcagcgagagatcacagtccaacgaagccatgattcgggacttggaatcattacatgcaagcattcaatctattacccaggctttacaacttccaccaccaggacctcttagctcaaagcacataccacacacgccgacatctgaagaacataatcatttcgacgagcgtggacttggaccgtcttgtgataactcaccaaagatatcgcctgccgacgagaacgacttaccaaaggtcccgattcagagtgtctatcaccttaccaaactgagcgctctgagatcacccgatgtgtctgaagttgatgtcgcgtcaaagcaaacccagcatccaattgaagatttcatatcgagaggagcgttatcactcggcgatgcagagcgacttttcaggctatacatggactacctagatcattacatgtaccgcataggtggacgatataaaactcttgacgagcttcgccggaatagccgcatactaaccgtgagtttgttgactgtggcgtcactacacgataaagacagcaacgatgtgtacggcgtatgcagcaaggagttccgacgccttatggccagctcgatcttcagccgtcgcatagatcgcgattatatccgcgccatgtgtatcgcgtcatactggttaagcgatgtgaattggacattgtctggttatgcaatccgtcgagcggctgagttcaatttaacaagccactataagcgcgccattagtgagggaaacgaagaagcggccgattttgtcaggctttggtacatcctttacatctgcgatcaacacctgagcactctgtttggacgccaagcaatcatcagggaagatacagctattcagggctgggaggcagtattgcaaatgccaaatgcaaccgaatctgacaagcgtttgatcagccaagttgcgctgcttaatattatgaacagaatccgcgaattattcggccaagattctggagagcccgttccacaagtttatctcatgcaaatcgaaggttttgctcgacagcttgatcagtgggtaggccactggtccgttgctctcgcagaaagccatgagtacattggaaactttccacgtaaaggcgttttgctccactatcattttgcaaggctccatttgtactcccacgtctttagaggccttcgcaatgctccgatacctgcatactttcaaacttctgccgcttcggcaatcgtcgctgcaacctctattatgaatctcctagtaacagattctgttttatcctccagcttggtcggaatgccgtcctactttcactctatgacggcatttgcctgcatgtttctggccaagtctgccacgatacatggcgacgaattgattgagcgtggcattgtgattgatctcacgtccaatctgatacagctctatcgatccgctccggtaggcaaatggcatctggttaaattgatggctgatggtctcgataagatcatgcaaaccctgtccacttcttcatcaatcagccaaccccaacatttcccactcgcctaccacgacgatagtactcagaacttccccaattttgacggtatcggtctaccagacgatacgtcactcaatttagaccctagttttctcatggactacaacttaggtgcttcgcaattgatgtcccttagtcaggggccaacaatatttgactcttcggatctaagcccgcctttttag

SEQ ID NO: 33606 - protein, 597 aa, Muscodor strobelii
  misc_feature: SGI Peptide ID NO. 571596
  misc_feature (229)..(311): Pfam Id: PF04082 Pfam Desc: Fungal specific transcription factor domain
  misc_feature (1)..(523): NCBI GI: 261360567 Blast Desc: conserved [Verticillium albo-atrum VaMs.102]
  misc_feature (22)..(596): NCBI GI: 46121217 Blast Desc: FG04987.1 [Gibberella zeae PH-1]
  misc_feature (38)..(525): NCBI GI: 256728086 Blast Desc: [Nectria haematococca mpVI 77-13-4]
  misc_feature (1)..(566): NCBI GI: 256720649 Blast Desc: [Nectria haematococca mpVI 77-13-4]
  misc_feature (1)..(589): NCBI GI: 169621893 Blast Desc: SNOG_14159 [Phaeosphaeria nodorum SN15] gi|160704642|gb|EAT78396.2| SNOG_14159 [Phaeosphaeria nodorum SN15]
  misc_feature (1)..(524): NCBI GI: 46134015 Blast Desc: FG09147.1 [Gibberella zeae PH-1]
  misc_feature (1)..(521): NCBI GI: 242795436 Blast Desc: conserved [Talaromyces stipitatus ATCC 10500] gi|218719177|gb|EED18597.1| conserved [Talaromyces stipitatus ATCC 10500]
  misc_feature (1)..(494): NCBI GI: 145601729 Blast Desc: MGG_08618 [Magnaporthe grisea 70-15] gi|145010240|gb|EDJ94896.1| MGG_08618 [Magnaporthe grisea 70-15]
  misc_feature (1)..(520): NCBI GI: 212536348 Blast Desc: conserved [Penicillium marneffei ATCC 18224] gi|210070729|gb|EEA24819.1| conserved [Penicillium marneffei ATCC 18224]
  misc_feature (1)..(381): NCBI GI: 256721035 Blast Desc: NECHADRAFT_44528 [Nectria haematococca mpVI 77-13-4]
MDNNAPPCRRCAEKGLGCVLNKSLQTLISERSQSNEAMIRDLESLHASIQSITQALQLPPPGPLSSKHIPHTPTSEEHNHFDERGLGPSCDNSPKISPADENDLPKVPIQSVYHLTKLSALRSPDVSEVDVASKQTQHPIEDFISRGALSLGDAERLFRLYMDYLDHYMYRIGGRYKTLDELRRNSRILTVSLLTVASLHDKDSNDVYGVCSKEFRRLMASSIFSRRIDRDYIRAMCIASYWLSDVNWTLSGYAIRRAAEFNLTSHYKRAISEGNEEAADFVRLWYILYICDQHLSTLFGRQAIIREDTAIQGWEAVLQMPNATESDKRLISQVALLNIMNRIRELFGQDSGEPVPQVYLMQIEGFARQLDQWVGHWSVALAESHEYIGNFPRKGVLLHYHFARLHLYSHVFRGLRNAPIPAYFQTSAASAIVAATSIMNLLVTDSVLSSSLVGMPSYFHSMTAFACMFLAKSATIHGDELIERGIVIDLTSNLIQLYRSAPVGKWHLVKLMADGLDKIMQTLSTSSSISQPQHFPLAYHDDSTQNFPNFDGIGLPDDTSLNLDPSFLMDYNLGASQLMSLSQGPTIFDSSDLSPPF

SEQ ID NO: 33607 - DNA, 772 bp, Muscodor strobelii
  misc_feature: SGI EST ID NO. CUFF.79396.0
  misc_feature: Variant of the nucleotide sequence at SEQ ID NO 33605
atcatggacaacaatgccccaccatgtcgcagatgtgctgaaaagggccttgggtgtgtgctcaataagagcctacagacactcatcagcgagagatcacagtccaacgaagccatgattcgggacttggaatcattacatgcaagcattcaatctattacccaggctttacaacttccaccaccaggacctcttagctcaaagcacataccacacacgccgacatctgaagaacataatcatttcgacgagcgtggacttggaccgtcttgtgataactcaccaaagatatcgcctgccgacgagaacgacttaccaaaggtcccgattcagagtgtctatcaccttaccaaactgagcgctctgagatcacccgatgtgtctgaagttgatgtcgcgtcaaagcaaacccagcatccaattgaagatttcatatcgagaggagcgttatcactcggcgatgcagagcgacttttcaggctatacatggactacctagatcattacatgtaccgcataggtggacgatataaaactcttgacgagcttcgccggaatagccgcatactaaccgtgagtttgttgactgtggcgtcactacacgataaagacagcaacgatgtgtacggcgtatgcagcaaggagttccgacgccttatggccagctcgatcttcagccgtcgcatagatcgcgattatatccgcgccatgtgtatcgcgtcatactggttaagcgatgtgaattggacattgtctggttatgcaatccgtc

SEQ ID NO: 33608 - DNA, 972 bp, Muscodor strobelii
  misc_feature: SGI cDNA ID NO. 571597
  misc_feature: Encodes the peptide sequence at SEQ ID NO 33609
atggaatctgatctaaacatcttgatcacaggcggcgctgggttcattggtcaacttttaacgagcgctttgatcaaatcttcgcctaacgtcagattgactattaccgatgtcattgaaccttcaataccaagcgatgtctcggtagagagtggtcgtatcatggcagtaaagagtgatctaacgaatccatctgcaatcgaatctcttatatcaacttcgtttacgacagtttatctcctgcatggactaatgagcggcggtgccgaagcgaacctcgaactcggatggcgcgtcaacttcgatagccacaaagccattatcgaccagctccgaaccaagtttcccaacactatcactattttcccaagcagtcttgccgtctatggaccttcaaaaccaggcagtgttacaagcgaagacacgtgtccactgccacaatctagctatggtgctcaaaaactaatggttgagacatatctcaatgatttctcacggcgcggccttttaaacggtcgaatagtccgactaccaacggtcattgtgagacccggtgctccttcggcagccgcgagctctttcgcaagtggtatcgtccgcgaaccacttaaaggggagaaaagcacactacccgttgcacgtagcctagagatgtgggtttgcagtccacagaccgttgtggagaatttagtacgtctcaaagacgttcccaaggaaaagtttgggctatcgagggtcgtaaatcttccaggtatcaccgttactgtggagcagattttacaggctctcgaggctgttggtggtactaaagcaacggcgctcattgaggaagctcgggatccaaagattgaggcaattgttggtagttggcctgcaagattcaatatcgatagagctacatcatttggaatgaaaagtgatggacgcttgatagaaactgttcaagcatttgcaaagacactcagctcttga

SEQ ID NO: 33609 - protein, 323 aa, Muscodor strobelii
  misc_feature: SGI Peptide ID NO. 571597
  misc_feature (7)..(250): Pfam Id: PF01370 Pfam Desc: NAD dependent epimerase/dehydratase family
  misc_feature (9)..(231): Pfam Id: PF07993 Pfam Desc: Male sterility protein
  misc_feature (7)..(181): Pfam Id: PF01370 Pfam Desc: NAD dependent epimerase/dehydratase family
  misc_feature (6)..(323): NCBI GI: 261360569 Blast Desc: NAD-dependent epimerase/dehydratase [Verticillium albo-atrum VaMs.102]
  misc_feature (6)..(322): NCBI GI: 256721037 Blast Desc: NECHADRAFT_44493 [Nectria haematococca mpVI 77-13-4]
  misc_feature (6)..(320): NCBI GI: 145601731 Blast Desc: MGG_14265 [Magnaporthe grisea 70-15] gi|145010241|gb|EDJ94897.1| MGG_14265 [Magnaporthe grisea 70-15]
  misc_feature (6)..(322): NCBI GI: 46109858 Blast Desc: FG01811.1 [Gibberella zeae PH-1]
  misc_feature (1)..(321): NCBI GI: 256728085 Blast Desc: NECHADRAFT_83531 [Nectria haematococca mpVI 77-13-4]
  misc_feature (5)..(323): NCBI GI: 145230730 Blast Desc: An01g12220 [Aspergillus niger] gi|134055748|emb|CAK44121.1| protein product [Aspergillus niger]
  misc_feature (5)..(318): NCBI GI: 67516929 Blast Desc: AN0746.2 [Aspergillus nidulans FGSC A4] gi|40746232|gb|EAA65388.1| AN0746.2 [Aspergillus nidulans FGSC A4] gi|259488975|tpe|CBF88864.1| TPA: epimerase, (AFU_orthologue;
  misc_feature (5)..(318): NCBI GI: 119495084 Blast Desc: nucleoside-diphosphate-sugar epimerase, [Neosartorya fischeri NRRL 181] gi|119412497|gb|EAW22438.1| nucleoside-diphosphate-sugar epimerase, [Neosartorya fischeri
  misc_feature (6)..(317): NCBI GI: 238844095 Blast Desc: conserved [Microsporum canis CBS 113480]
  misc_feature (5)..(318): NCBI GI: 70996072 Blast Desc: nucleoside-diphosphate-sugar epimerase [Aspergillus fumigatus Af293] gi|66850426|gb|EAL90753.1| nucleoside-diphosphate-sugar epimerase, [Aspergillus fumigatus
  misc_feature (6)..(181): SWISSPROT Homolog: EC 5.1.3.5 UDP-arabinose 4-epimerase
MESDLNILITGGAGFIGQLLTSALIKSSPNVRLTITDVIEPSIPSDVSVESGRIMAVKSDLTNPSAIESLISTSFTTVYLLHGLMSGGAEANLELGWRVNFDSHKAIIDQLRTKFPNTITIFPSSLAVYGPSKPGSVTSEDTCPLPQSSYGAQKLMVETYLNDFSRRGLLNGRIVRLPTVIVRPGAPSAAASSFASGIVREPLKGEKSTLPVARSLEMWVCSPQTVVENLVRLKDVPKEKFGLSRVVNLPGITVTVEQILQALEAVGGTKATALIEEARDPKIEAIVGSWPARFNIDRATSFGMKSDGRLIETVQAFAKTLSS

SEQ ID NO: 33610 - DNA, 960 bp, Muscodor strobelii
  misc_feature: SGI cDNA ID NO. 571598
  misc_feature: Encodes the peptide sequence at SEQ ID NO 33611
atggagcctcgtgttgcaacgtccaaggcgaagcctctactgcacggtgtttacacgcctgtgatcacaatggcaatcagccttgaggctatgtataaacatgctcagtacttagtaaaggccggtatgcatggcttggtatatttgggcacaaacggtgagctggcattgctttcgcatgccgagcgcgccgctatcgttgagaatgcgcgaaaggctgtcacagatctaggaatgcaagactatcctatagttgctggtatctcggcacagagcactgtagagaccattcaattggctaaggatgcgggcgaggctggagctggatggggactcttactgccacctagttactgggccaagtctcttagcagtgatgctgtattagcatactaccgggaggtcgcggatgctagccccattcctatcgtcgtctataactttcctggtgttacttctggcatcgatctcgattccgatcaactctcagcgctcgcctcgcacccgaatattgtagcgacgaaactgacatgcggtaacgtcggcaaactcactcgagtcgcttccaaatttgagccacagtactttggagtctatggtggaagcagtgatttccttttgccgacgctccacgctggaggtgttggctgcgtcacgggcctgggcaacgtattccccaaatcgacctcgaagatcttcgacttgtggattgagggcaaactggaagaggctcgcgcattgcagaatgtggttgcagctgctgagtgggcttgcaaaaagtcgctagcttgcacgaaatatggcgcctgggtgtacacgggcaagccgatcgggttggacaaccctaagatgttcaacatgagaaagccgtatactgaattggcggagggcatgaagcagtggacattagaaacactcaagatattagagagcaccgagaaggagttgttagggcgatga

SEQ ID NO: 33611 - protein, 319 aa, Muscodor strobelii
  misc_feature: SGI Peptide ID NO. 571598
  misc_feature (13)..(310): Pfam Id: PF00701 Pfam Desc: Dihydrodipicolinate synthetase family
  misc_feature (25)..(250): Pfam Id: PF00701 Pfam Desc: Dihydrodipicolinate synthetase family
  misc_feature (8)..(315): NCBI GI: 261360571 Blast Desc: dihydrodipicolinate synthase [Verticillium albo-atrum VaMs.102]
  misc_feature (9)..(315): NCBI GI: 256721038 Blast Desc: NECHADRAFT_82289 [Nectria haematococca mpVI 77-13-4]
  misc_feature (8)..(316): NCBI GI: 39947658 Blast Desc: MGG_08615 [Magnaporthe grisea 70-15] gi|145010237|gb|EDJ94893.1| MGG_08615 [Magnaporthe grisea 70-15]
  misc_feature (1)..(315): NCBI GI: 46109862 Blast Desc: FG01813.1 [Gibberella zeae PH-1]
  misc_feature (9)..(319): NCBI GI: 255954995 Blast Desc: Pc21g12190 [Penicillium chrysogenum Wisconsin 54-1255] gi|211589961|emb|CAP96116.1| Pc21g12190 [Penicillium chrysogenum Wisconsin 54-1255]
  misc_feature (9)..(316): NCBI GI: 145250889 Blast Desc: An15g04230 [Aspergillus niger] gi|134082483|emb|CAK97290.1| protein product [Aspergillus niger]
  misc_feature (8)..(316): NCBI GI: 115398205 Blast Desc: conserved [Aspergillus terreus NIH2624] gi|114192885|gb|EAU34585.1| conserved [Aspergillus terreus NIH2624]
  misc_feature (8)..(319): NCBI GI: 67901884 Blast Desc: AN7929.2 [Aspergillus nidulans FGSC A4] gi|40740393|gb|EAA59583.1| AN7929.2 [Aspergillus nidulans FGSC A4] gi|259480677|tpe|CBF73541.1| TPA: conserved [Aspergillus FGSC
  misc_feature (9)..(316): NCBI GI: 238482241 Blast Desc: dihydrodipicolinate synthase, [Aspergillus flavus NRRL3357] gi|220700409|gb|EED56747.1| dihydrodipicolinate synthase, [Aspergillus flavus NRRL3357]
  misc_feature (9)..(316): NCBI GI: 169765658 Blast Desc: [Aspergillus oryzae RIB40] gi|83765155|dbj|BAE55298.1| protein product [Aspergillus oryzae]
  misc_feature (14)..(315): SWISSPROT Homolog: EC 4.2.1.52 Dihydrodipicolinate synthase
MEPRVATSKAKPLLHGVYTPVITMAISLEAMYKHAQYLVKAGMHGLVYLGTNGELALLSHAERAAIVENARKAVTDLGMQDYPIVAGISAQSTVETIQLAKDAGEAGAGWGLLLPPSYWAKSLSSDAVLAYYREVADASPIPIVVYNFPGVTSGIDLDSDQLSALASHPNIVATKLTCGNVGKLTRVASKFEPQYFGVYGGSSDFLLPTLHAGGVGCVTGLGNVFPKSTSKIFDLWIEGKLEEARALQNVVAAAEWACKKSLACTKYGAWVYTGKPIGLDNPKMFNMRKPYTELAEGMKQWTLETLKILESTEKELLGR

SEQ ID NO: 33612 - DNA, 1435 bp, Muscodor strobelii
  misc_feature: SGI EST ID NO. CUFF.79408.0
  misc_feature: Variant of the nucleotide sequence at SEQ ID NO 33610
aactcgatacctttctggctcccagatacgaggacacagctgagcaggcaatcagccttgaggctatgtataaacatgctcagtacttagtaaaggccggtatgcatggcttggtatatttgggcacaaacggtgagctggcattgctttcgcatgccgagcgcgccgctatcgttgagaatgcgcgaaaggctgtcacagatctaggaatgcaagactatcctatagttgctggtatctcggcacagagcactgtagagaccattcaattggctaaggatgcgggcgaggctggagctggatggggactcttactgccacctagttactgggccaagtctcttagcagtgatgctgtattagcatactaccgggaggtcgcggatgctagccccattcctatcgtcgtctataactttcctggtgttacttctggcatcgatctcgattccgatcaactctcagcgctcgcctcgcacccgaatattgtagcgacgaaactgacatgcggtaacgtcggcaaactcactcgagtcgcttccaaatttgagccacagtactttggagtctatggtggaagcagtgatttccttttgccgacgctccacgctggaggtgttggctgcgtcacgggcctgggcaacgtattccccaaatcgacctcgaagatcttcgacttgtggattgagggcaaactggaagaggctcgcgcattgcagaatgtggttgcagctgctgagtgggcttgcaaaaagtcgctagcttgcacgaaatatggcgcctgggtgtacacgggcaagccgatcgggttggacaaccctaagatgttcaacatgagaaagccgtatactgaattggcggagggcatgaagcagtggacattagaaacactcaagatattagagagcaccgagaaggagttgttagggcgatgacaccttggctagatttccaagaatgagattcgatacgaatatagacattatcttctactacacagaatcggctgaatcctatgacgctcgtcccaaatggagaagtatcacgttgaaaccgtctgtaagctggcaataaatctcatctggagatgcgtatctgaagctgtctcacatgcgtacgatggcaacaataccgagttccgtgattcatgtttcttctgtttatggctattagtgtgggccacaggagcaaaatccagaccgccatgcagcagttccagattcgaggccaatcacaatgggcggtactttccagactgagccgacatcgcagcgttttgcagagagcccagcccgtgctagatgcagcccaccaaaagttagcggaggacccttgtgccactgcacaacgggcagggggttgcgacaggcaaaggcttgacaggcgaatggtcactgctggattatccccgggatctctatatgcacgagcttcc

SEQ ID NO: 33613 - DNA, 2088 bp, Muscodor strobelii
  misc_feature: SGI cDNA ID NO. 571599
  misc_feature: Reduced expression when VOC is produced
  misc_feature: Encodes the peptide sequence at SEQ ID NO 33614
atgattcgatcacgacaggccgccatggccgcgcgggccttggcgcagacctcgagacagcagcagctccccttcattgccacgtccacagcgtccgccatcaagtcaaattccaggtcgcctgccgccatcagaagccagactacctctgcccaagccacgcctcagacgagagctaccccagcaccgtcgttcaacactgcggatacgaaggagcgcagccatgtccaaccgcttgtacagtctcgtactccagagttagacgagtctttcattggaaaaactggtggtgaaattatccacgagatgatgctcagacacaacgtcaagcacgtctttggataccccggcggcgctatccttccagtgtacgacgccttctacaattcgaaatacctcgatttcatcctccccaagcatgagcagggtgccggccacatggctgaaggctacgctcgcgccaccggcaagcctggcgttgtcctggtcacgtccggtcctggcgccaccaacgtcgtcacccccatgcaggatgctctcttggacggaactcccatggtcgtcttcactggccaggtcgtcacgagtgccatcggcagcgatgctttccaggaagccgacatgattggcatctcaagagcctgcacgaagtggaacgttatggtcaagaatgttgctgaactgcctcgccggatcaacgaagcttttgagatcgcaacctccggccgccccgggcccgtgcttgttgatctccccaaggatatcactgccgccgtgctgaggaaagccatcccaacgacaaccgccttgcctgccttacctagcgccgcatcccgcgctgccatcgagaccacccagaggcagctgaagtcttccataacccgtgttgtggatctcatcaacatggccaagaaacctgtcatttatgctggtcagggtatcatctcttcggagaacggcgtcagtctcctgaaggagcttgctgacaaggcgtctatccccgttacaaccactttacaggctctcggtgccttcgacgagttggatgagaagtcgctctatatgctgggcatgcacggatctgcatttgccaatatggccatgcaagaggctgatctcattattgctcttggcgccaggttcgacgatcgggtgaccggtgccattggcaagttcgctcctgctgccaaagcagctgcggccgaaggccgtggaggtattgtccatttcgagattatgcccaagaacatcaataaggtcgtccaagccaccgaagctatcgagggtgacgttgcagaaaacctcgcacagttgattcctggcgtcaatataacaagcatggcagatcgaaaggagtggttcgacacgatcaactcttggaagaagaagtggcctatggacagtttcgagcgcacagagcgcccagggaaaatcaagccgcaggttctcatcgagcagctcagcaacttgactgccaaccgaaagcaagagacgattatcacgaccggagttgggcagcaccaaatgtgggcggctcagcattaccggtggcgccatcccagaaccatgatcacttcgggtggtcttggtactatgggtttcggtctgcctgcagccattggcgccaaggtcgggcgaccggatgccttggtcgttgacatcgatggggatgcttcatttaatatgactttgaccgagctctcctgtgctgcgcaattcaacattggcgttaaggtcatcgtgctaaataatgaggagcagggaatggtcacacaatggcagaatctcttctacgaggatcgttacgcgcacacgcaccaacagaaccccgatttcatgaagctcgctgatgccatgggggtccagcaccgccgcctcatcaatcctgacgaaaccaccgaagccctccaatggctgatagactccgatggtcctgcccttctcgaagttttcacagataagaaagttcccgtgttaccgatggttcccgccggccatggattacacgagttcctcgtttgggatcccgcagaagataagaaacgccgagatctaatgaagcagaggacaggaggcgtacatgaatag

SEQ ID NO: 33614 - protein, 695 aa, Muscodor strobelii
  misc_feature: SGI Peptide ID NO. 571599
  misc_feature (503)..(650): Pfam Id: PF02775 Pfam Desc: Thiamine pyrophosphate enzyme, C-terminal TPP binding domain
  misc_feature (293)..(438): Pfam Id: PF00205 Pfam Desc: Thiamine pyrophosphate enzyme, central domain
  misc_feature (94)..(264): Pfam Id: PF02776 Pfam Desc: Thiamine pyrophosphate enzyme, N-terminal TPP binding domain
  misc_feature (5)..(694): NCBI GI: 171688324 Blast Desc: protein product [Podospora anserina] gi|170944124|emb|CAP70234.1| protein product [Podospora anserina]
  misc_feature (1)..(694): NCBI GI: 164423635 Blast Desc: acetolactate synthase, mitochondrial precursor [Neurospora crassa OR74A] gi|157070176|gb|EAA33416.2| acetolactate synthase, mitochondrial precursor [Neurospora crassa
  misc_feature (58)..(694): NCBI GI: 39977967 Blast Desc: MGG_06868 [Magnaporthe grisea 70-15] gi|145013573|gb|EDJ98214.1| MGG_06868 [Magnaporthe grisea 70-15]
  misc_feature (1)..(694): NCBI GI: 156052767 Blast Desc: SS1G_06550 [Sclerotinia sclerotiorum 1980] gi|154704329|gb|EDO04068.1| SS1G_06550 [Sclerotinia sclerotiorum 1980]
  misc_feature (58)..(694): NCBI GI: 154314975 Blast Desc: conserved [Botryotinia fuckeliana B05.10] gi|150848367|gb|EDN23560.1| conserved [Botryotinia fuckeliana B05.10]
  misc_feature (58)..(694): NCBI GI: 2547090 Blast Desc: acetolactate synthase [Magnaporthe grisea]
  misc_feature (5)..(694): NCBI GI: 116196836 Blast Desc: conserved [Chaetomium globosum CBS 148.51] gi|88180929|gb|EAQ88397.1| conserved [Chaetomium globosum CBS 148.51]
  misc_feature (87)..(694): NCBI GI: 256721986 Blast Desc: [Nectria haematococca mpVI 77-13-4]
  misc_feature (58)..(693): NCBI GI: 1072104 Blast Desc: acetolactate synthase [Magnaporthe grisea]
  misc_feature (2)..(689): NCBI GI: 212527024 Blast Desc: acetolactate synthase, large subunit, [Penicillium marneffei ATCC 18224] gi|210073067|gb|EEA27154.1| acetolactate synthase, large subunit, [Penicillium marneffei ATCC 18224]
  misc_feature (85)..(694): SWISSPROT Homolog: EC 2.2.1.6 Acetolactate synthase
  misc_feature: Useful for introducing or modulating the production of volatile compounds
MIRSRQAAMAARALAQTSRQQQLPFIATSTASAIKSNSRSPAAIRSQTTSAQATPQTRATPAPSFNTADTKERSHVQPLVQSRTPELDESFIGKTGGEIIHEMMLRHNVKHVFGYPGGAILPVYDAFYNSKYLDFILPKHEQGAGHMAEGYARATGKPGVVLVTSGPGATNVVTPMQDALLDGTPMVVFTGQVVTSAIGSDAFQEADMIGISRACTKWNVMVKNVAELPRRINEAFEIATSGRPGPVLVDLPKDITAAVLRKAIPTTTALPALPSAASRAAIETTQRQLKSSITRVVDLINMAKKPVIYAGQGIISSENGVSLLKELADKASIPVTTTLQALGAFDELDEKSLYMLGMHGSAFANMAMQEADLIIALGARFDDRVTGAIGKFAPAAKAAAAEGRGGIVHFEIMPKNINKVVQATEAIEGDVAENLAQLIPGVNITSMADRKEWFDTINSWKKKWPMDSFERTERPGKIKPQVLIEQLSNLTANRKQETIITTGVGQHQMWAAQHYRWRHPRTMITSGGLGTMGFGLPAAIGAKVGRPDALVVDIDGDASFNMTLTELSCAAQFNIGVKVIVLNNEEQGMVTQWQNLFYEDRYAHTHQQNPDFMKLADAMGVQHRRLINPDETTEALQWLIDSDGPALLEVFTDKKVPVLPMVPAGHGLHEFLVWDPAEDKKRRDLMKQRTGGVHE

SEQ ID NO: 33615 - DNA, 2783 bp, Muscodor strobelii
  misc_feature: SGI EST ID NO. CUFF.79412.0
  misc_feature: Variant of the nucleotide sequence at SEQ ID NO 33613
ctgccaccgtctcgtcctctcccctctgtcacttgccaccccgtccacctccattgtctccgataggcgtttgcgacacttgcgaggactgtcgtgctgctcaattgagcgacgcatcatcatctccgacgagcatctataagccaggcacgtcgactgtctcggccccatcaccctcgtcgtcttcccgcttcccgccgcctcgacctcgacaaatctcccctcaactcgtcccaccatgattcgatcacgacaggccgccatggccgcgcgggccttggcgcagacctcgagacagcagcagctccccttcattgccacgtccacagcgtccgccatcaagtcaaattccaggtcgcctgccgccatcagaagccagactacctctgcccaagccacgcctcagacgagagctaccccagcaccgtcgttcaacactgcggatacgaaggagcgcagccatgtccaaccgcttgtacagtctcgtactccagagttagacgagtctttcattggaaaaactggtggtgaaattatccacgagatgatgctcagacacaacgtcaagcacgtctttggataccccggcggcgctatccttccagtgtacgacgccttctacaattcgaaatacctcgatttcatcctccccaagcatgagcagggtgccggccacatggctgaaggctacgctcgcgccaccggcaagcctggcgttgtcctggtcacgtccggtcctggcgccaccaacgtcgtcacccccatgcaggatgctctcttggacggaactcccatggtcgtcttcactggccaggtcgtcacgagtgccatcggcagcgatgctttccaggaagccgacatgattggcatctcaagagcctgcacgaagtggaacgttatggtcaagaatgttgctgaactgcctcgccggatcaacgaagcttttgagatcgcaacctccggccgccccgggcccgtgcttgttgatctccccaaggatatcactgccgccgtgctgaggaaagccatcccaacgacaaccgccttgcctgccttacctagcgccgcatcccgcgctgccatcgagaccacccagaggcagctgaagtcttccataacccgtgttgtggatctcatcaacatggccaagaaacctgtcatttatgctggtcagggtatcatctcttcggagaacggcgtcagtctcctgaaggagcttgctgacaaggcgtctatccccgttacaaccactttacaggctctcggtgccttcgacgagttggatgagaagtcgctctatatgctgggcatgcacggatctgcatttgccaatatggccatgcaagaggctgatctcattattgctcttggcgccaggttcgacgatcgggtgaccggtgccattggcaagttcgctcctgctgccaaagcagctgcggccgaaggccgtggaggtattgtccatttcgagattatgcccaagaacatcaataaggtcgtccaagccaccgaagctatcgagggtgacgttgcagaaaacctcgcacagttgattcctggcgtcaatataacaagcatggcagatcgaaaggagtggttcgacacgatcaactcttggaagaagaagtggcctatggacagtttcgagcgcacagagcgcccagggaaaatcaagccgcaggttctcatcgagcagctcagcaacttgactgccaaccgaaagcaagagacgattatcacgaccggagttgggcagcaccaaatgtgggcggctcagcattaccggtggcgccatcccagaaccatgatcacttcgggtggtcttggtactatgggtttcggtctgcctgcagccattggcgccaaggtcgggcgaccggatgccttggtcgttgacatcgatggggatgcttcatttaatatgactttgaccgagctctcctgtgctgcgcaattcaacattggcgttaaggtcatcgtgctaaataatgaggagcagggaatggtcacacaatggcagaatctcttctacgaggatcgttacgcgcacacgcaccaacagaaccccgatttcatgaagctcgctgatgccatgggggtccagcaccgccgcctcatcaatcctgacgaaaccaccgaagccctccaatggctgatagactccgatggtcctgcccttctcgaagttttcacagataagaaagttcccgtgttaccgatggttcccgccggccatggattacacgagttcctcgtttgggatcccgcagaagataagaaacgccgagatctaatgaagcagaggacaggaggcgtacatgaatagtgtgtatgtgtctgggagttgcatatgtattcggcgttcatgattttaggagtataccaattcgacacgaggtgaagatgcaaatagtaaaacatcgagggacatgaagggtttcaaaagtgttcggttcaatcggtatttggtccatcccggcgcagttatccgccatcaggtgtatcttgctgtatatcaaatgatcatgggacgatttcaacacatggttcttcgtattgcaggatcacgagtgttttgcctccatattcgcagagaaaccaatttgcgatacacggtacagaagaggtactatcaattcaggtcttagaacataaccgtaagcctcatcgttacatatgacgtgacttaatccgtccttctgtcttcctctcttcattctgttatcccgaacgacgcgcacgaagattcatgtttcttgctgccccaaatgctgcaatgccgg

SEQ ID NO: 33616 - DNA, 405 bp, Muscodor strobelii
  misc_feature: SGI cDNA ID NO. 571600
  misc_feature: Encodes the peptide sequence at SEQ ID NO 33617
atggaactaacaaaaatacttacgctattcatcttggcgacactatccgccgcctatcactccttaacagcccacgagttcaccgaattggaatgcaaaggtcatactatcaaggcctggattgacggcaagcatatccagatccccatgagtaacaaaacaaagagcgttgcactatcgcttccaaacaagggcatactgcgctggtatggtttcgccgaagctacggaggacggcaccgcgtgctacggtgatatcgtgacccgtctcaatgcctcatcttgtttcgacttgaccgctctgacttcaatcggcaagccgaaggtcaattgtatccggcattgcagcatttggggcagcaagaaacatgaatcttcgtgcgcgtcgttcgggataacagaatga

SEQ ID NO: 33617 - protein, 134 aa, Muscodor strobelii
  misc_feature: SGI Peptide ID NO. 571600
MELTKILTLFILATLSAAYHSLTAHEFTELECKGHTIKAWIDGKHIQIPMSNKTKSVALSLPNKGILRWYGFAEATEDGTACYGDIVTRLNASSCFDLTALTSIGKPKVNCIRHCSIWGSKKHESSCASFGITE

SEQ ID NO: 33618 - DNA, 1551 bp, Muscodor strobelii
  misc_feature: SGI cDNA ID NO. 571601
  misc_feature: Encodes the peptide sequence at SEQ ID NO 33619
atgtctggcgtcgttccgaccgtcactgcattgcaggacatctatacaaagcaggctctcgcggaccaaggtgtacgatggaacaagctgttagaaaagttccaagccacttatggcagtcaagcgcaattcattgcgcgatcaccaggtcgcgtgaacatcatcggcgagcatatcgactactctctttactcatgcctacccatgggcattacgcctgatgtcatcatcgctgtttcgactgacgtggagtctgccgccgagggaacttacaaaatccaggtcgcaaacgtcgatgaacagcgatttcctacacgaaacttcgatgtctcatattctggcatcgatattgacgcgacacagcatgagtggacaaattacttcaaatgcggattgcgaggagccttggaattactcaggaaaaagcatggcgcggacttcaaacccaagggtatgaaggtgcttatggatggcactgtacccgctggtggaggtctcagctcaagtgctgccttcgtcagcacaagtgcgctcgccgtcatggtcgcgaacggtgaaaaggatgtcgataagaaggatctaacggaggtcgctattgtcagtgagcgagccgtaggcgtaaattcgggaggtatggaccagtctgcatcagttttctcggaacgagggtccgctcttctcgtgtcttttacgccttcgctatccgcaagaccggtcttcttcccagagacggatcccgaactatgcttcatggtggttcagtcctttgtcacctccaacaagcaggtgaccgggcccattcactacaaccttcgggtggtggaatgcagcatggctgccgattacctgaacgccaagctttgcctacctggtacacagctcccgaaagacgcaggtcctctgggggtctctctacgtggtttccatgataactacttcaagaacacccaaaagtcgatgccagagcagctgactgagttgattgagctgacaaagaagactttgcccaaagagcaaggctacacgattgaggaggttgcttcaggtatcgggatttctgtcggtgagctcaagactcgatatatgtcgagctttcctgttcgaggcgaatacttcaagcttcgtcagcgagcgttgcatgtgttcaccgaggctctccgcgtgttgcaattcttatctttacttgaagacccagcccaagctccttcttccgccaatacggccgaatacaatgagcgactcggcagtctaatgaaccagactcaggactcgtgccgcgagctatacgagtgcagttgctccgagattgacgatatttgcaagatcgctcgtgaagctggtagttatggaagtcggctgactggtgccggctggggtggttgtagcgttcacttaattccggccaataagattgaccagatcaaagcggctttagtagagaaatactactcaaagaaacagatcagcgaagaggatatggagggcgcgatcattgtcagccggccaatgaacggaagtgctgtgtataaggttgatggaggaaagatataa

SEQ ID NO: 33619 - protein, 516 aa, Muscodor strobelii
  misc_feature: SGI Peptide ID NO. 571601
  misc_feature (407)..(484): Pfam Id: PF08544 Pfam Desc: GHMP kinases C terminal
  misc_feature (153)..(221): Pfam Id: PF00288 Pfam Desc: GHMP kinases N terminal domain
  misc_feature (1)..(515): NCBI GI: 164426369 Blast Desc: NCU08687 [Neurospora crassa OR74A] gi|157071309|gb|EAA32530.2| NCU08687 [Neurospora crassa OR74A]
  misc_feature (1)..(512): NCBI GI: 171688314 Blast Desc: protein product [Podospora anserina] gi|170944119|emb|CAP70229.1| protein product [Podospora anserina]
  misc_feature (1)..(516): NCBI GI: 154314971 Blast Desc: BC1G_04827 [Botryotinia fuckeliana B05.10] gi|150848365|gb|EDN23558.1| BC1G_04827 [Botryotinia fuckeliana B05.10]
  misc_feature (1)..(516): NCBI GI: 156052763 Blast Desc: SS1G_06548 [Sclerotinia sclerotiorum 1980] gi|154704327|gb|EDO04066.1| SS1G_06548 [Sclerotinia sclerotiorum 1980]
  misc_feature (1)..(516): NCBI GI: 37955148 Blast Desc: galactokinase [Hypocrea jecorina]
  misc_feature (1)..(516): NCBI GI: 261357869 Blast Desc: GAL3 [Verticillium albo-atrum VaMs.102]
  misc_feature (1)..(514): NCBI GI: 256721990 Blast Desc: [Nectria haematococca mpVI 77-13-4]
  misc_feature (1)..(498): NCBI GI: 116196834 Blast Desc: CHGG_05015 [Chaetomium globosum CBS 148.51] gi|88180928|gb|EAQ88396.1| CHGG_05015 [Chaetomium globosum CBS 148.51]
  misc_feature (1)..(514): NCBI GI: 46116486 Blast Desc: FG04085.1 [Gibberella zeae PH-1]
  misc_feature (5)..(516): NCBI GI: 189205224 Blast Desc: galactokinase [Pyrenophora tritici-repentis Pt-1C-BFP] gi|187986046|gb|EDU51534.1| galactokinase [Pyrenophora tritici-repentis Pt-1C-BFP]
  misc_feature (5)..(508): SWISSPROT Homolog: EC 2.7.1.6 Galactokinase
MSGVVPTVTALQDIYTKQALADQGVRWNKLLEKFQATYGSQAQFIARSPGRVNIIGEHIDYSLYSCLPMGITPDVIIAVSTDVESAAEGTYKIQVANVDEQRFPTRNFDVSYSGIDIDATQHEWTNYFKCGLRGALELLRKKHGADFKPKGMKVLMDGTVPAGGGLSSSAAFVSTSALAVMVANGEKDVDKKDLTEVAIVSERAVGVNSGGMDQSASVFSERGSALLVSFTPSLSARPVFFPETDPELCFMVVQSFVTSNKQVTGPIHYNLRVVECSMAADYLNAKLCLPGTQLPKDAGPLGVSLRGFHDNYFKNTQKSMPEQLTELIELTKKTLPKEQGYTIEEVASGIGISVGELKTRYMSSFPVRGEYFKLRQRALHVFTEALRVLQFLSLLEDPAQAPSSANTAEYNERLGSLMNQTQDSCRELYECSCSEIDDICKIAREAGSYGSRLTGAGWGGCSVHLIPANKIDQIKAALVEKYYSKKQISEEDMEGAIIVSRPMNGSAVYKVDGGKI

SEQ ID NO: 33620 - DNA, 2043 bp, Muscodor strobelii
  misc_feature: SGI EST ID NO. CUFF.79415.0
  misc_feature: Variant of the nucleotide sequence at SEQ ID NO 33618
ctgtgattgaatttccatctgatacgcttgcttcataaatttttttcacggtgattaattgaatagcagttgtacgtcacagatcaaaaaagcgaccaaatccgtgagaccccacgatacaaacctactccatagcggagagcttgattttgagcgaagcggggtgatatcggtcctttagactcggcgagcgcaagcacgcgtgcatcaacgagagggaaaaagactgcaggttgcaaaagagctcgatttgaagccgatcaaacacgacttttgtttattccggatttccctagatttcaagatgtctggcgtcgttccgaccgtcactgcattgcaggacatctatacaaagcaggctctcgcggaccaaggtgtacgatggaacaagctgttagaaaagttccaagccacttatggcagtcaagcgcaattcattgcgcgatcaccaggtcgcgtgaacatcatcggcgagcatatcgactactctctttactcatgcctacccatgggcattacgcctgatgtcatcatcgctgtttcgactgacgtggagtctgccgccgagggaacttacaaaatccaggtcgcaaacgtcgatgaacagcgatttcctacacgaaacttcgatgtctcatattctggcatcgatattgacgcgacacagcatgagtggacaaattacttcaaatgcggattgcgaggagccttggaattactcaggaaaaagcatggcgcggacttcaaacccaagggtatgaaggtgcttatggatggcactgtacccgctggtggaggtctcagctcaagtgctgccttcgtcagcacaagtgcgctcgccgtcatggtcgcgaacggtgaaaaggatgtcgataagaaggatctaacggaggtcgctattgtcagtgagcgagccgtaggcgtaaattcgggaggtatggaccagtctgcatcagttttctcggaacgagggtccgctcttctcgtgtcttttacgccttcgctatccgcaagaccggtcttcttcccagagacggatcccgaactatgcttcatggtggttcagtcctttgtcacctccaacaagcaggtgaccgggcccattcactacaaccttcgggtggtggaatgcagcatggctgccgattacctgaacgccaagctttgcctacctggtacacagctcccgaaagacgcaggtcctctgggggtctctctacgtggtttccatgataactacttcaagaacacccaaaagtcgatgccagagcagctgactgagttgattgagctgacaaagaagactttgcccaaagagcaaggctacacgattgaggaggttgcttcaggtatcgggatttctgtcggtgagctcaagactcgatatatgtcgagctttcctgttcgaggcgaatacttcaagcttcgtcagcgagcgttgcatgtgttcaccgaggctctccgcgtgttgcaattcttatctttacttgaagacccagcccaagctccttcttccgccaatacggccgaatacaatgagcgactcggcagtctaatgaaccagactcaggactcgtgccgcgagctatacgagtgcagttgctccgagattgacgatatttgcaagatcgctcgtgaagctggtagttatggaagtcggctgactggtgccggctggggtggttgtagcgttcacttaattccggccaataagattgaccagatcaaagcggctttagtagagaaatactactcaaagaaacagatcagcgaagaggatatggagggcgcgatcattgtcagccggccaatgaacggaagtgctgtgtataaggttgatggaggaaagatataaaattcgccgaagacctgcataagctgcaaattatcatgctcaggtaacatatggcttgcttgtcgcgcgatgtgtaacaaatagcttcctacctaacgcctcactagatggttttaaggaccctcttctgtttcagcgacttcttcggtagcatcatcaataaaatctcagtaatgggccacttcttc

SEQ ID NO: 33621 - DNA, 3651 bp, Muscodor strobelii
  misc_feature: SGI cDNA ID NO. 571602
  misc_feature: Encodes the peptide sequence at SEQ ID NO 33622
atggcgactaaactatctctgtcccacgatacagcattgtgcattatacccccgggggacacagatatttggcagtcaatagacagccttcgcgcgatttatgatggcgctcatgggcggtggccaccacacatcaacttggtatatccatttgttccaatagagacgttatcttcggcatcagatttaattacgtctcacttggggtcttccgcggttgaacaaaccccatcaaaggttcggctggatgcggctgatttcttcacacatcgacatgacaatacaatatttgtgcacgatagcgatgacgaccgtgtctcgagattaaagaaacttcgaagccacatcttgagggcattgggacgcgccgagaccgagtatcgtatgcatcttaccatcggacaaagccaaaatgtcaactcttcatctcacaagtttctcttggaaaaagcttccctacttccagggatagagtggtctgttgacaaactgttcattttggttcgagaacgcatggagatcgatgataatgcttttagtgaaatgaagatatgggggacaatcgacttgacaacgtttgctgtcgatcatcttgataagccgattgcattttacaataacaggactatatccagcactcaagaggggaaatctgaagctctccacacccaaatcccgtatacatactcgactgaagagaggaaatggataatttctcataacgccactacagagtcacttcgggataaccttgagacaatatctctcgcctcgtacaatgtgttagcagaattcgaatatccagcttcgagagctaggtacaatattattattgataatatcttacaagaatcgatctccgcagatgttcttgtcttacaggaagttacagacgattttcttgaatatatctgcgaaaattctcgagttcgagaatattacaagttcgcgactcatgccaatccctttcaagccgatatcgatccacttcccagtcatataaacactgtggtcttcagccggttggccttttcttggaattggctgtcgttttcaagacgccacaaaggttcagttatcattcagtttaaggatcttgggaagacagtcgatggtgtcttcctgccgacgattctctcgacagttcacttgacttgtggtctggcagatgggtcggtgaccgctaagaagcaagagttgaaatcgatcttcaaccacttatcattgaggtttccagccaatccttggatccttgcaggtgatttcaacatcacgacaagttcctatacaattgaagcagcccttaagaaaaagacgattacccctcaaactgtcacaactttgaaagcacttgagaccatgttatccgaggctggactaatagatacatggttatccgctcgaattcagtatggcgaagaatcggggtttctgcatgatttgcagcaagacatcgatgtcttcgaaggcgaacaaggtgctacctttgaccctggggtaaatcagcttgccgccgagattgtaggcagcggtttcaacaatcggccacagagatacgatcgaattctcgtgaaaagtgaagatgccttcacgatttcgggtttcacgtcgtttggccgaagacaatgttatttgagtgatgaatcccatgagacacggagtgaaaatattcctacgcctcagctctcatatggcagcgatcactggggggttaaatgcgcactcaaactgaagactgttgatgatgagcaagccaatcacgacataatggtacccatgttaccaactcaagtaccacctgctctaaatgtgagcactgcagagatacacgattgcttattcaagcaaggcgtctttccgtctgacgctgatactctaaaacgaaaggaggttcttgagttgttagaggcggtggtcatagagaatgacaacgcaacagaacgaggcagttcgacttttgtgatgatacccgtgggatcttacgggatgggcacatggactccatcgtcagacatcgattgtcttttcattggcccaattagctccaaagtattctttgctctcgcttcgcagaggatccgcaaagctactgcccgaggcatgaaacttctaagaagagtgaacgcgaactctgggactatgcttgagcttgatgttcttgggatcaaggttgatcttcagtactgtccctcttcactcattgcatcaacgtggccaagcgcaatgaaactacctcccacggatcctgtattctcattgtcaacacaaattctagcaaaattgaagccagtcagagacatgtattacatacgtcgcacaatccccgattatgcctcttatcggatggcgttccacctgatcaagcaatgggctaagcaaagaggtctatactcggcgaaatttggcctactaggtggaatacacatcgctgtactattaacgcgcgtatgcaaactattatcccggaacggagagaatgtaccgctagcctcagtgctctgcacatttttcgacacatacgcatccttcgattggggatcagaacttgtctttgatccattcttccacaaaaagctacgctatgtgcgaacacccagagagcccctagccatcctaggttaccatcctccagctctaaatgtagcccataacgcaacaaaggcctcagtcaggacgatctctggggaattcagacgggcatctacattgttatcacagcgtgatgcaacttgggcgtcatttctgagcgcaagtcgaggatacaaggattttttgacgactttcaagagctatatcaagatatcggttcaattctggggcggttcgctcgcaaaaggtacagggtttgttggttgggtcgagtctcgaactcccatgattctgacagatctgagccgtcgcattccgaacattcatgcaaggatttggccagcgagatttgttgatggccaagttcccgatgacgccaatgacaatgcggaatcggattaccaaggatattacttaatcggtttggaccgatgggagaccaacgaagagactatgtctaaagaagacagaaaggtcgcagtgaattccttgcaaaccgcacttcagaaatttgagacctcaatccgaggcgatgagaagtatttcgattcaaccacatcatggatgagcgcgtccctcgtcagtcaatcggaggtcaagggctcacggcttgaccatcgcgagtggggtgatttcacaattggcgaagacgaagaggacgaggaagaagaagaggaggaagaactactattggacgaagaggatgctttcgagacgcacattaaaaagtcaaaatccaagagagctttagctgccaagttaccaattcggcctgcttatagcggtaagttccggtcgtctgccgatgtcatcaatcgacttcggtgggatcagagcatggatagcaacgattacatcgtcggctacgaggatcgatttttgggcgtgaaagaacgagcactagatgcgtggaagtcggagcaaaccgacgaagagttcattccacaacatagaattctgtacttcaagagagcgagcgacggcgaggtggtctgggaccgtaaagagaggatagataagatttttgggagcggtgttagtagtctcgatgccgacagatag

SEQ ID NO: 33622 - protein, 1216 aa, Muscodor strobelii
  misc_feature: SGI Peptide ID NO. 571602
  misc_feature (254)..(575): Pfam Id: PF03372 Pfam Desc: Endonuclease/Exonuclease/phosphatase family
  misc_feature (775)..(819): Pfam Id: PF04928 Pfam Desc: Poly(A) polymerase central domain
  misc_feature (8)..(1211): NCBI GI: 256720980 Blast Desc: NECHADRAFT_50338 [Nectria haematococca mpVI 77-13-4]
  misc_feature (8)..(1208): NCBI GI: 39975905 Blast Desc: MGG_06121 [Magnaporthe grisea 70-15] gi|145011582|gb|EDJ96238.1| MGG_06121 [Magnaporthe grisea 70-15]
  misc_feature (8)..(1215): NCBI GI: 46110072 Blast Desc: FG01918.1 [Gibberella zeae PH-1]
  misc_feature (8)..(1210): NCBI GI: 242810869 Blast Desc: DUF455 domain protein [Talaromyces stipitatus ATCC 10500] gi|218716296|gb|EED15718.1| DUF455 domain protein [Talaromyces stipitatus ATCC 10500]
  misc_feature (11)..(1215): NCBI GI: 240108632 Blast Desc: Endonuclease/Exonuclease/phosphatase family protein [Coccidioides posadasii C735 delta SOWgp]
  misc_feature (3)..(1209): NCBI GI: 261191320 Blast Desc: DUF455 domain-containing protein [Ajellomyces dermatitidis SLH14081] gi|239589834|gb|EEQ72477.1| DUF455 domain-containing protein [Ajellomyces dermatitidis SLH14081]
  misc_feature (5)..(1209): NCBI GI: 212536855 Blast Desc: DUF455 domain protein [Penicillium marneffei ATCC 18224] gi|210068325|gb|EEA22416.1| DUF455 domain protein [Penicillium marneffei ATCC 18224]
  misc_feature (3)..(1209): NCBI GI: 239612757 Blast Desc: DUF455 domain-containing protein [Ajellomyces dermatitidis ER-3]
  misc_feature (8)..(1209): NCBI GI: 164429482 Blast Desc: NCU11050 [Neurospora crassa OR74A] gi|157073494|gb|EDO65454.1| [Neurospora crassa OR74A]
  misc_feature (2)..(1209): NCBI GI: 226278747 Blast Desc: conserved [Paracoccidioides brasiliensis Pb01]
MATKLSLSHDTALCIIPPGDTDIWQSIDSLRAIYDGAHGRWPPHINLVYPFVPIETLSSASDLITSHLGSSAVEQTPSKVRLDAADFFTHRHDNTIFVHDSDDDRVSRLKKLRSHILRALGRAETEYRMHLTIGQSQNVNSSSHKFLLEKASLLPGIEWSVDKLFILVRERMEIDDNAFSEMKIWGTIDLTTFAVDHLDKPIAFYNNRTISSTQEGKSEALHTQIPYTYSTEERKWIISHNATTESLRDNLETISLASYNVLAEFEYPASRARYNIIIDNILQESISADVLVLQEVTDDFLEYICENSRVREYYKFATHANPFQADIDPLPSHINTVVFSRLAFSWNWLSFSRRHKGSVIIQFKDLGKTVDGVFLPTILSTVHLTCGLADGSVTAKKQELKSIFNHLSLRFPANPWILAGDFNITTSSYTIEAALKKKTITPQTVTTLKALETMLSEAGLIDTWLSARIQYGEESGFLHDLQQDIDVFEGEQGATFDPGVNQLAAEIVGSGFNNRPQRYDRILVKSEDAFTISGFTSFGRRQCYLSDESHETRSENIPTPQLSYGSDHWGVKCALKLKTVDDEQANHDIMVPMLPTQVPPALNVSTAEIHDCLFKQGVFPSDADTLKRKEVLELLEAVVIENDNATERGSSTFVMIPVGSYGMGTWTPSSDIDCLFIGPISSKVFFALASQRIRKATARGMKLLRRVNANSGTMLELDVLGIKVDLQYCPSSLIASTWPSAMKLPPTDPVFSLSTQILAKLKPVRDMYYIRRTIPDYASYRMAFHLIKQWAKQRGLYSAKFGLLGGIHIAVLLTRVCKLLSRNGENVPLASVLCTFFDTYASFDWGSELVFDPFFHKKLRYVRTPREPLAILGYHPPALNVAHNATKASVRTISGEFRRASTLLSQRDATWASFLSASRGYKDFLTTFKSYIKISVQFWGGSLAKGTGFVGWVESRTPMILTDLSRRIPNIHARIWPARFVDGQVPDDANDNAESDYQGYYLIGLDRWETNEETMSKEDRKVAVNSLQTALQKFETSIRGDEKYFDSTTSWMSASLVSQSEVKGSRLDHREWGDFTIGEDEEDEEEEEEEELLLDEEDAFETHIKKSKSKRALAAKLPIRPAYSGKFRSSADVINRLRWDQSMDSNDYIVGYEDRFLGVKERALDAWKSEQTDEEFIPQHRILYFKRASDGEVVWDRKERIDKIFGSGVSSLDADR

SEQ ID NO: 33623 - DNA, 4707 bp, Muscodor strobelii
  misc_feature: SGI EST ID NO. CUFF.79418.0
  misc_feature: Variant of the nucleotide sequence at SEQ ID NO 33621
gtcccaggggcacataatgtgcgcattgaaaatgatacgatgctgttttgcggtgcaatctatctcctggctcgccttgactaacaagcatacctatgctaccatcgagtggggtgcattaggtaccgtcgaactccacttccactgggacagtacgagaaagggtacgagaaatttccccgtggatcttccaaggttggatctcacctcttgatttaaatgtgaccagtagatttgaccaaatcttctctttcctacttctcgcagcggattgtattgaagaattaaaaaggccttatggcaaattttctatccatagctaatttctcccttcattgtatcgctcgctgagcgatgtgactcaccggcaaagcttgaagtgaactagaaaagtatggcgtagtatggctcatagcactgcccccttctgcaaaggagccagtcgtattttttgtagccaagctgtgagggaacttcatcataaagagagacttctttattgaaagtcataagatttaaacatccaattcagttgtctataccatatagcttttatttcctcgcctagacatcgttcttgttcgaatttctaactcccagattctgcatttaattgcttgccttgttagcttcgcgcctcgtcggcatacgagatatcatcaacgagatacgttaacttatttgaggaaaggttcattcaccccaaccatggcgactaaactatctctgtcccacgatacagcattgtgcattatacccccgggggacacagatatttggcagtcaatagacagccttcgcgcgatttatgatggcgctcatgggcggtggccaccacacatcaacttggtatatccatttgttccaatagagacgttatcttcggcatcagatttaattacgtctcacttggggtcttccgcggttgaacaaaccccatcaaaggttcggctggatgcggctgatttcttcacacatcgacatgacaatacaatatttgtgcacgatagcgatgacgaccgtgtctcgagattaaagaaacttcgaagccacatcttgagggcattgggacgcgccgagaccgagtatcgtatgcatcttaccatcggacaaagccaaaatgtcaactcttcatctcacaagtttctcttggaaaaagcttccctacttccagggatagagtggtctgttgacaaactgttcattttggttcgagaacgcatggagatcgatgataatgcttttagtgaaatgaagatatgggggacaatcgacttgacaacgtttgctgtcgatcatcttgataagccgattgcattttacaataacaggactatatccagcactcaagaggggaaatctgaagctctccacacccaaatcccgtatacatactcgactgaagagaggaaatggataatttctcataacgccactacagagtcacttcgggataaccttgagacaatatctctcgcctcgtacaatgtgttagcagaattcgaatatccagcttcgagagctaggtacaatattattattgataatatcttacaagaatcgatctccgcagatgttcttgtcttacaggaagttacagacgattttcttgaatatatctgcgaaaattctcgagttcgagaatattacaagttcgcgactcatgccaatccctttcaagccgatatcgatccacttcccagtcatataaacactgtggtcttcagccggttggccttttcttggaattggctgtcgttttcaagacgccacaaaggttcagttatcattcagtttaaggatcttgggaagacagtcgatggtgtcttcctgccgacgattctctcgacagttcacttgacttgtggtctggcagatgggtcggtgaccgctaagaagcaagagttgaaatcgatcttcaaccacttatcattgaggtttccagccaatccttggatccttgcaggtgatttcaacatcacgacaagttcctatacaattgaagcagcccttaagaaaaagacgattacccctcaaactgtcacaactttgaaagcacttgagaccatgttatccgaggctggactaatagatacatggttatccgctcgaattcagtatggcgaagaatcggggtttctgcatgatttgcagcaagacatcgatgtcttcgaaggcgaacaaggtgctacctttgaccctggggtaaatcagcttgccgccgagattgtaggcagcggtttcaacaatcggccacagagatacgatcgaattctcgtgaaaagtgaagatgccttcacgatttcgggtttcacgtcgtttggccgaagacaatgttatttgagtgatgaatcccatgagacacggagtgaaaatattcctacgcctcagctctcatatggcagcgatcactggggggttaaatgcgcactcaaactgaagactgttgatgatgagcaagccaatcacgacataatggtacccatgttaccaactcaagtaccacctgctctaaatgtgagcactgcagagatacacgattgcttattcaagcaaggcgtctttccgtctgacgctgatactctaaaacgaaaggaggttcttgagttgttagaggcggtggtcatagagaatgacaacgcaacagaacgaggcagttcgacttttgtgatgatacccgtgggatcttacgggatgggcacatggactccatcgtcagacatcgattgtcttttcattggcccaattagctccaaagtattctttgctctcgcttcgcagaggatccgcaaagctactgcccgaggcatgaaacttctaagaagagtgaacgcgaactctgggactatgcttgagcttgatgttcttgggatcaaggttgatcttcagtactgtccctcttcactcattgcatcaacgtggccaagcgcaatgaaactacctcccacggatcctgtattctcattgtcaacacaaattctagcaaaattgaagccagtcagagacatgtattacatacgtcgcacaatccccgattatgcctcttatcggatggcgttccacctgatcaagcaatgggctaagcaaagaggtctatactcggcgaaatttggcctactaggtggaatacacatcgctgtactattaacgcgcgtatgcaaactattatcccggaacggagagaatgtaccgctagcctcagtgctctgcacatttttcgacacatacgcatccttcgattggggatcagaacttgtctttgatccattcttccacaaaaagctacgctatgtgcgaacacccagagagcccctagccatcctaggttaccatcctccagctctaaatgtagcccataacgcaacaaaggcctcagtcaggacgatctctggggaattcagacgggcatctacattgttatcacagcgtgatgcaacttgggcgtcatttctgagcgcaagtcgaggatacaaggattttttgacgactttcaagagctatatcaagatatcggttcaattctggggcggttcgctcgcaaaaggtacagggtttgttggttgggtcgagtctcgaactcccatgattctgacagatctgagccgtcgcattccgaacattcatgcaaggatttggccagcgagatttgttgatggccaagttcccgatgacgccaatgacaatgcggaatcggattaccaaggatattacttaatcggtttggaccgatgggagaccaacgaagagactatgtctaaagaagacagaaaggtcgcagtgaattccttgcaaaccgcacttcagaaatttgagacctcaatccgaggcgatgagaagtatttcgattcaaccacatcatggatgagcgcgtccctcgtcagtcaatcggaggtcaagggctcacggcttgaccatcgcgagtggggtgatttcacaattggcgaagacgaagaggacgaggaagaagaagaggaggaagaactactattggacgaagaggatgctttcgagacgcacattaaaaagtcaaaatccaagagagctttagctgccaagttaccaattcggcctgcttatagcggtaagttccggtcgtctgccgatgtcatcaatcgacttcggtgggatcagagcatggatagcaacgattacatcgtcggctacgaggatcgatttttgggcgtgaaagaacgagcactagatgcgtggaagtcggagcaaaccgacgaagagttcattccacaacatagaattctgtacttcaagagagcgagcgacggcgaggtggtctgggaccgtaaagagaggatagataagatttttgggagcggtgttagtagtctcgatgccgacagataggctcggaatcatttgtcagaaaactctacgcgaagtacgtggaatcaagaaagtatcctaagtcggatctttgggcgcaatgacgacgaatgaagagatggacaaatgcgaagcatgagttagccgagtattcatgaaacattcatcgtgatagcatatcaagtaggcatcgtgtagggtcccagagatcaagacaggtcatgcgcaacattagtggtataccgaatcgcttgaacatcaaatcaccaacactggggtgccgctattggagcactctcctattccggcaggtaaaaataagtggcaaaagatttaaggttcagccagcttaatttcatcaaaagccaa

SEQ ID NO: 33624 - DNA, 609 bp, Muscodor strobelii
  misc_feature: SGI cDNA ID NO. 571603
  misc_feature: Encodes the peptide sequence at SEQ ID NO 33625
atgtctaaagaagacagaaaggtcgcagtgaattccttgcaaaccgcacttcagaaatttgagacctcaatccgaggcgatgagaagtatttcgattcaaccacatcatggatgagcgcgtccctcgtcagtcaatcggaggtcaagggctcacggcttgaccatcgcgagtggggtgatttcacaattggcgaagacgaagaggacgaggaagaagaagaggaggaagaactactattggacgaagaggatgctttcgagacgcacattaaaaagtcaaaatccaagagagctttagctgccaagttaccaattcggcctgcttatagcggtaagttccggtcgtctgccgatgtcatcaatcgacttcggtgggatcagagcatggatagcaacgattacatcgtcggctacgaggatcgatttttgggcgtgaaagaacgagcactagatgcgtggaagtcggagcaaaccgacgaagagttcattccacaacatagaattctgtacttcaagagagcgagcgacggcgaggtggtctgggaccgtaaagagaggatagataagatttttgggagcggtgttagtagtctcgatgccgacagatag

SEQ ID NO: 33625 - protein, 202 aa, Muscodor strobelii
  misc_feature: SGI Peptide ID NO. 571603
  misc_feature (2)..(197): NCBI GI: 226295206 Blast Desc: conserved [Paracoccidioides brasiliensis Pb18]
  misc_feature (2)..(195): NCBI GI: 164429482 Blast Desc: NCU11050 [Neurospora crassa OR74A] gi|157073494|gb|EDO65454.1| [Neurospora crassa OR74A]
  misc_feature (1)..(195): NCBI GI: 226278747 Blast Desc: conserved [Paracoccidioides brasiliensis Pb01]
  misc_feature (4)..(194): NCBI GI: 39975905 Blast Desc: MGG_06121 [Magnaporthe grisea 70-15] gi|145011582|gb|EDJ96238.1| MGG_06121 [Magnaporthe grisea 70-15]
  misc_feature (2)..(197): NCBI GI: 256720980 Blast Desc: NECHADRAFT_50338 [Nectria haematococca mpVI 77-13-4]
  misc_feature (1)..(195): NCBI GI: 261191320 Blast Desc: DUF455 domain-containing protein [Ajellomyces dermatitidis SLH14081] gi|239589834|gb|EEQ72477.1| DUF455 domain-containing protein [Ajellomyces dermatitidis SLH14081]
  misc_feature (1)..(195): NCBI GI: 46110072 Blast Desc: FG01918.1 [Gibberella zeae PH-1]
  misc_feature (1)..(195): NCBI GI: 239612757 Blast Desc: DUF455 domain-containing protein [Ajellomyces dermatitidis ER-3]
  misc_feature (1)..(194): NCBI GI: 240274573 Blast Desc: DUF455 domain-containing protein [Ajellomyces capsulatus H143]
  misc_feature (2)..(197): NCBI GI: 189194681 Blast Desc: Poly(A) polymerase type 3 [Pyrenophora tritici-repentis Pt-1C-BFP] gi|187979243|gb|EDU45869.1| Poly(A) polymerase type 3 [Pyrenophora tritici-repentis Pt-1C-BFP]
MSKEDRKVAVNSLQTALQKFETSIRGDEKYFDSTTSWMSASLVSQSEVKGSRLDHREWGDFTIGEDEEDEEEEEEEELLLDEEDAFETHIKKSKSKRALAAKLPIRPAYSGKFRSSADVINRLRWDQSMDSNDYIVGYEDRFLGVKERALDAWKSEQTDEEFIPQHRILYFKRASDGEVVWDRKERIDKIFGSGVSSLDADR

SEQ ID NO: 33626 - DNA, 4707 bp, Muscodor strobelii; identical to SEQ ID NO: 33623
  misc_feature: SGI EST ID NO. CUFF.79418.0
  misc_feature: Variant of the nucleotide sequence at SEQ ID NO 33624

SEQ ID NO: 33627 - DNA, 2292 bp, Muscodor strobelii
  misc_feature: SGI cDNA ID NO. 571604
  misc_feature: Encodes the peptide sequence at SEQ ID NO 33628
atgttatccgaggctggactaatagatacatggttatccgctcgaattcagtatggcgaagaatcggggtttctgcatgatttgcagcaagacatcgatgtcttcgaaggcgaacaaggtgctacctttgaccctggggtaaatcagcttgccgccgagattgtaggcagcggtttcaacaatcggccacagagatacgatcgaattctcgtgaaaagtgaagatgccttcacgatttcgggtttcacgtcgtttggccgaagacaatgttatttgagtgatgaatcccatgagacacggagtgaaaatattcctacgcctcagctctcatatggcagcgatcactggggggttaaatgcgcactcaaactgaagactgttgatgatgagcaagccaatcacgacataatggtacccatgttaccaactcaagtaccacctgctctaaatgtgagcactgcagagatacacgattgcttattcaagcaaggcgtctttccgtctgacgctgatactctaaaacgaaaggaggttcttgagttgttagaggcggtggtcatagagaatgacaacgcaacagaacgaggcagttcgacttttgtgatgatacccgtgggatcttacgggatgggcacatggactccatcgtcagacatcgattgtcttttcattggcccaattagctccaaagtattctttgctctcgcttcgcagaggatccgcaaagctactgcccgaggcatgaaacttctaagaagagtgaacgcgaactctgggactatgcttgagcttgatgttcttgggatcaaggttgatcttcagtactgtccctcttcactcattgcatcaacgtggccaagcgcaatgaaactacctcccacggatcctgtattctcattgtcaacacaaattctagcaaaattgaagccagtcagagacatgtattacatacgtcgcacaatccccgattatgcctcttatcggatggcgttccacctgatcaagcaatgggctaagcaaagaggtctatactcggcgaaatttggcctactaggtggaatacacatcgctgtactattaacgcgcgtatgcaaactattatcccggaacggagagaatgtaccgctagcctcagtgctctgcacatttttcgacacatacgcatccttcgattggggatcagaacttgtctttgatccattcttccacaaaaagctacgctatgtgcgaacacccagagagcccctagccatcctaggttaccatcctccagctctaaatgtagcccataacgcaacaaaggcctcagtcaggacgatctctggggaattcagacgggcatctacattgttatcacagcgtgatgcaacttgggcgtcatttctgagcgcaagtcgaggatacaaggattttttgacgactttcaagagctatatcaagatatcggttcaattctggggcggttcgctcgcaaaaggtacagggtttgttggttgggtcgagtctcgaactcccatgattctgacagatctgagccgtcgcattccgaacattcatgcaaggatttggccagcgagatttgttgatggccaagttcccgatgacgccaatgacaatgcggaatcggattaccaaggatattacttaatcggtttggaccgatgggagaccaacgaagagactatgtctaaagaagacagaaaggtcgcagtgaattccttgcaaaccgcacttcagaaatttgagacctcaatccgaggcgatgagaagtatttcgattcaaccacatcatggatgagcgcgtccctcgtcagtcaatcggaggtcaagggctcacggcttgaccatcgcgagtggggtgatttcacaattggcgaagacgaagaggacgaggaagaagaagaggaggaagaactactattggacgaagaggatgctttcgagacgcacattaaaaagtcaaaatccaagagagctttagctgccaagttaccaattcggcctgcttatagcggtaagttccggtcgtctgccgatgtcatcaatcgacttcggtgggatcagagcatggatagcaacgattacatcgtcggctacgaggatcgatttttgggcgtgaaagaacgagcactagatgcgtggaagtcggagcaaaccgacgaagagttcattccacaacatagaattctgtacttcaagagagcgagcgacggcgaggtggtctgggaccgtaaagagaggatagataagatttttgggagcggtgttagtagtctcgatgccgacagatag

SEQ ID NO: 33628 - protein, 763 aa, Muscodor strobelii
  misc_feature: SGI Peptide ID NO. 571604
  misc_feature (322)..(366): Pfam Id: PF04928 Pfam Desc: Poly(A) polymerase central domain
  misc_feature (1)..(758): NCBI GI: 256720980 Blast Desc: NECHADRAFT_50338 [Nectria haematococca mpVI 77-13-4]
  misc_feature (2)..(762): NCBI GI: 46110072 Blast Desc: FG01918.1 [Gibberella zeae PH-1]
  misc_feature (1)..(755): NCBI GI: 39975905 Blast Desc: MGG_06121 [Magnaporthe grisea 70-15] gi|145011582|gb|EDJ96238.1| MGG_06121 [Magnaporthe grisea 70-15]
  misc_feature (1)..(762): NCBI GI: 240108632 Blast Desc: Endonuclease/Exonuclease/phosphatase family protein [Coccidioides posadasii C735 delta SOWgp]
  misc_feature (1)..(756): NCBI GI: 261191320 Blast Desc: DUF455 domain-containing protein [Ajellomyces dermatitidis SLH14081] gi|239589834|gb|EEQ72477.1| DUF455 domain-containing protein [Ajellomyces dermatitidis SLH14081]
  misc_feature (2)..(758): NCBI GI: 189194681 Blast Desc: Poly(A) polymerase type 3 [Pyrenophora tritici-repentis Pt-1C-BFP] gi|187979243|gb|EDU45869.1| Poly(A) polymerase type 3 [Pyrenophora tritici-repentis Pt-1C-BFP]
  misc_feature (1)..(757): NCBI GI: 242810869 Blast Desc: DUF455 domain protein [Talaromyces stipitatus ATCC 10500] gi|218716296|gb|EED15718.1| DUF455 domain protein [Talaromyces stipitatus ATCC 10500]
  misc_feature (1)..(756): NCBI GI: 226278747 Blast Desc: conserved [Paracoccidioides brasiliensis Pb01]
  misc_feature (1)..(756): NCBI GI: 239612757 Blast Desc: DUF455 domain-containing protein [Ajellomyces dermatitidis ER-3]
  misc_feature (6)..(756): NCBI GI: 164429482 Blast Desc: NCU11050 [Neurospora crassa OR74A] gi|157073494|gb|EDO65454.1| [Neurospora crassa OR74A]
MLSEAGLIDTWLSARIQYGEESGFLHDLQQDIDVFEGEQGATFDPGVNQLAAEIVGSGFNNRPQRYDRILVKSEDAFTISGFTSFGRRQCYLSDESHETRSENIPTPQLSYGSDHWGVKCALKLKTVDDEQANHDIMVPMLPTQVPPALNVSTAEIHDCLFKQGVFPSDADTLKRKEVLELLEAVVIENDNATERGSSTFVMIPVGSYGMGTWTPSSDIDCLFIGPISSKVFFALASQRIRKATARGMKLLRRVNANSGTMLELDVLGIKVDLQYCPSSLIASTWPSAMKLPPTDPVFSLSTQILAKLKPVRDMYYIRRTIPDYASYRMAFHLIKQWAKQRGLYSAKFGLLGGIHIAVLLTRVCKLLSRNGENVPLASVLCTFFDTYASFDWGSELVFDPFFHKKLRYVRTPREPLAILGYHPPALNVAHNATKASVRTISGEFRRASTLLSQRDATWASFLSASRGYKDFLTTFKSYIKISVQFWGGSLAKGTGFVGWVESRTPMILTDLSRRIPNIHARIWPARFVDGQVPDDANDNAESDYQGYYLIGLDRWETNEETMSKEDRKVAVNSLQTALQKFETSIRGDEKYFDSTTSWMSASLVSQSEVKGSRLDHREWGDFTIGEDEEDEEEEEEEELLLDEEDAFETHIKKSKSKRALAAKLPIRPAYSGKFRSSADVINRLRWDQSMDSNDYIVGYEDRFLGVKERALDAWKSEQTDEEFIPQHRILYFKRASDGEVVWDRKERIDKIFGSGVSSLDADR

SEQ ID NO: 33629 - DNA, 4707 bp, Muscodor strobelii; identical to SEQ ID NO: 33623
  misc_feature: SGI EST ID NO. CUFF.79418.0
  misc_feature: Variant of the nucleotide sequence at SEQ ID NO 33627

SEQ ID NO: 33630 - DNA, 2691 bp, Muscodor strobelii
  misc_feature: SGI cDNA ID NO. 571605
  misc_feature: Encodes the peptide sequence at SEQ ID NO 33631
atggacactttcatgctgcaagatgaggccgccaaagagcgagtccgccaggccgtcgagttcctagaccctcacgaccagcatgccaagagctatcgccccgacatcctactcatgctccagaagaaccagaagcgcctcgtcgtcaacctcgaccatgtccgcgaccacagcgccgagctggcagagggcctgctgtttgatcctttcgacttcaccttggccttcaaccaggcgctcaaggagatcgtcgccaccatcccccaggcccgtcccgaccagaccgaccgagacatgctctactactgcgcctgggccggtagcttcggcctgaacgcctgcaacccacggactctgtcgtccaaccatctcaaccacatggtctccattgagggcatcgtaacacgctgctccctcatcagacccaaggtcgtcaagagtgtccattacaatgagaagaagaacatcttccacttccgcgagtatcgcgaccagaccatgaccaacggcgtcaccacatccagcgtttacccccaggaggacgacgcaggcaaccctcttctgacagagtatggcttctgcacataccgagaccaccagaccatctccatccaggagatgcccgaacgagcgcctgctggccagttgccccgcggtgtcgacgtggtgcttgacgatgatcttgtcgataaagtaaagccaggcgacagagtgcagcttgtcggtatcttcaggacgcttggtaacagaaacacgaaccacaacagcgcgctgttcaaaaccgtcattctagcgaacaacatcgtcctgctctcttccaaagcaagcggcggacttgccactgccactatcaccgacactgacatccgcaacatcaacaagatctcaaagaagaagaacttatttgagctactctctcagtcccttgcgcccagtatatacggtcacgactacgttaaaaaagcaatactactcatgttactgggaggtatggagaagaacctggagaatggtacgcacttgagaggtgatatcaatatcctcatggtcggcgatccttcgaccgccaagtcgcagcttcttcgtttcgttctcaacactgctcccctcgccatcgccaccacgggtcgaggctcgtcgggtgtcggtttgacggctgccgttacctcagacaaagagacgggcgagaggagactggaagcaggtgccatggtcatggcagatcgcggtgttgtctgtatcgatgaattcgacaagatgtccgacattgaccgtgtcgccatccacgaagtcatggagcagcagacagttaccatagcgaaggctggcatccatacgtcgctcaatgcccgatgcagtgtgatcgctgctgccaatcccattttcggccagtacgacacgcacaaagacccgcacaagaatatcgcgctcccggactcccttctgtcacgttttgatttgttgtttgttgtgacggatgatattgaaaacagccgggatcggcagatatctgaacatgtcttgcgcatgcatcgctatcgccagccgggaactgacgaaggtgcaccaattcgcgagaacacatcacaagctctcggtgtcgccttgcaaagccaggacgccacacagaagccgacagatgtgtttgagaaatatgatgctatgctacatgccggcgtgactatcactactggtcgtggcgccaacaagcgccacgaggttctaagcattcccttcatgaagaaatacatccagtactgcaaaacgcgagtcaagcccattctcactcagagcgcatctgaccgaatcgccgagatctacgtcggcttgcgcaatgacgagatggaaggcaaccaaaggagaacatcaccgttgactgttcgtacactggagacgctgattcgtctggccactgcacatgctaagtctcggctttccaatcgggtagaggacagagatgcgtcagcggcagaagcaatcttgcgatttgcgctcttcaaagaaattgtcgaagacgagtcaagaaagaagcgcaggcggacgcgacaggtggactcggactcgtccagtgaggagagttccgacgacgaggacggtggagatacatcatatagggggtcaacggcccgcatcagcgcagcacgctctacgcgacaaactcaacggagtcaaccatcggcaagcgcttctcgtacctctgcgcgtggtgctccagatacacctgaacgtgaagaggaggagcaagaggaggtagacctctatgatgcaacaccccgccggagtaatcgtacaacccgtggcggtgttgcgtcgtcatcaaatgccccttcaacatcacagctctcctttgcctcttctatacctgcgtcgcaattggaaacgcaggaagaagaggacgaagacacccaggaagatgccgctctagctgccggagctgctgatctcagtatcaatgcaccaataacacccgagcgactggcgacattccgcacagcacttggacagcttctgaataccgacctttttgaagacgattcggcagacgtcaacgccatcattcaagctgtcaacggacgattgggagctcgtggtactgcattctcgcgcgaggaggctattaaggcgctcaagaaaatggacgaagccaatcaaattatgtatacggatggcgagctagtatataagatttga

SEQ ID NO: 33631 - protein, 896 aa, Muscodor strobelii
  misc_feature: SGI Peptide ID NO. 571605
  misc_feature (288)..(666): Pfam Id: PF00493 Pfam Desc: MCM2/3/5 family
  misc_feature (1)..(896): NCBI GI: 85108961 Blast Desc: DNA replication licensing factor mcm3 [Neurospora crassa OR74A] gi|28924290|gb|EAA33443.1| DNA replication licensing factor mcm3 [Neurospora crassa OR74A] subunit of
  misc_feature (39)..(886): NCBI GI: 261355789 Blast Desc: DNA replication licensing factor mcm3 [Verticillium albo-atrum VaMs.102]
  misc_feature (1)..(896): NCBI GI: 154293112 Blast Desc: conserved [Botryotinia fuckeliana B05.10] gi|150845654|gb|EDN20847.1| conserved [Botryotinia fuckeliana B05.10]
  misc_feature (1)..(860): NCBI GI: 156034789 Blast Desc: conserved [Sclerotinia sclerotiorum 1980] gi|154698733|gb|EDN98471.1| conserved [Sclerotinia sclerotiorum 1980]
  misc_feature (12)..(896): NCBI GI: 225557640 Blast Desc: DNA replication licensing factor MCM3 [Ajellomyces capsulatus G186AR]
  misc_feature (12)..(896): NCBI GI: 239615412 Blast Desc: DNA replication licensing factor MCM3 [Ajellomyces dermatitidis ER-3]
  misc_feature (12)..(896): NCBI GI: 261199278 Blast Desc: DNA replication licensing factor mcm3 [Ajellomyces dermatitidis SLH14081] gi|239594248|gb|EEQ76829.1| DNA replication licensing factor mcm3 [Ajellomyces dermatitidis
  misc_feature (1)..(886): NCBI GI: 240111043 Blast Desc: DNA replication licensing factor mcm3, [Coccidioides posadasii C735 delta SOWgp]
  misc_feature (12)..(896): NCBI GI: 226287568 Blast Desc: DNA replication licensing factor mcm3 [Paracoccidioides brasiliensis Pb18]
  misc_feature (1)..(896): NCBI GI: 258565663 Blast Desc: DNA replication licensing factor mcm3 [Uncinocarpus reesii 1704] gi|237907277|gb|EEP81678.1| DNA replication licensing factor mcm3 [Uncinocarpus reesii 1704]
MDTFMLQDEAAKERVRQAVEFLDPHDQHAKSYRPDILLMLQKNQKRLVVNLDHVRDHSAELAEGLLFDPFDFTLAFNQALKEIVATIPQARPDQTDRDMLYYCAWAGSFGLNACNPRTLSSNHLNHMVSIEGIVTRCSLIRPKVVKSVHYNEKKNIFHFREYRDQTMTNGVTTSSVYPQEDDAGNPLLTEYGFCTYRDHQTISIQEMPERAPAGQLPRGVDVVLDDDLVDKVKPGDRVQLVGIFRTLGNRNTNHNSALFKTVILANNIVLLSSKASGGLATATITDTDIRNINKISKKKNLFELLSQSLAPSIYGHDYVKKAILLMLLGGMEKNLENGTHLRGDINILMVGDPSTAKSQLLRFVLNTAPLAIATTGRGSSGVGLTAAVTSDKETGERRLEAGAMVMADRGVVCIDEFDKMSDIDRVAIHEVMEQQTVTIAKAGIHTSLNARCSVIAAANPIFGQYDTHKDPHKNIALPDSLLSRFDLLFVVTDDIENSRDRQISEHVLRMHRYRQPGTDEGAPIRENTSQALGVALQSQDATQKPTDVFEKYDAMLHAGVTITTGRGANKRHEVLSIPFMKKYIQYCKTRVKPILTQSASDRIAEIYVGLRNDEMEGNQRRTSPLTVRTLETLIRLATAHAKSRLSNRVEDRDASAAEAILRFALFKEIVEDESRKKRRRTRQVDSDSSSEESSDDEDGGDTSYRGSTARISAARSTRQTQRSQPSASASRTSARGAPDTPEREEEEQEEVDLYDATPRRSNRTTRGGVASSSNAPSTSQLSFASSIPASQLETQEEEDEDTQEDAALAAGAADLSINAPITPERLATFRTALGQLLNTDLFEDDSADVNAIIQAVNGRLGARGTAFSREEAIKALKKMDEANQIMYTDGELVYKI

SEQ ID NO: 33632 - DNA, 3611 bp, Muscodor strobelii
  misc_feature: SGI EST ID NO. CUFF.79424.0
  misc_feature: Variant of the nucleotide sequence at SEQ ID NO 33630
gcgaacccttaacgcgttctcgcgcgtctcttgccccgcgtgtggatacccaatacatccattttcgactttcaagtgcgcaaggcaattgcgataccatttgcatgtcctcagcacagtgatccaaagataccccctaatttcactccccacgatttcctttttgcagtcctggcccgttatacagtgccacgatagtttttcctctggtacagatgcgtatgaacagctaaccacctccgccatcatggacactttcatgctgcaagatgaggccgccaaagagcgagtccgccaggccgtcgagttcctagaccctcacgaccagcatgccaagagctatcgccccgacatcctactcatgctccagaagaaccagaagcgcctcgtcgtcaacctcgaccatgtccgcgaccacagcgccgagctggcagagggcctgctgtttgatcctttcgacttcaccttggccttcaaccaggcgctcaaggagatcgtcgccaccatcccccaggcccgtcccgaccagaccgaccgagacatgctctactactgcgcctgggccggtagcttcggcctgaacgcctgcaacccacggactctgtcgtccaaccatctcaaccacatggtctccattgagggcatcgtaacacgctgctccctcatcagacccaaggtcgtcaagagtgtccattacaatgagaagaagaacatcttccacttccgcgagtatcgcgaccagaccatgaccaacggcgtcaccacatccagcgtttacccccaggaggacgacgcaggcaaccctcttctgacagagtatggcttctgcacataccgagaccaccagaccatctccatccaggagatgcccgaacgagcgcctgctggccagttgccccgcggtgtcgacgtggtgcttgacgatgatcttgtcgataaagtaaagccaggcgacagagtgcagcttgtcggtatcttcaggacgcttggtaacagaaacacgaaccacaacagcgcgctgttcaaaaccgtcattctagcgaacaacatcgtcctgctctcttccaaagcaagcggcggacttgccactgccactatcaccgacactgacatccgcaacatcaacaagatctcaaagaagaagaacttatttgagctactctctcagtcccttgcgcccagtatatacggtcacgactacgttaaaaaagcaatactactcatgttactgggaggtatggagaagaacctggagaatggtacgcacttgagaggtgatatcaatatcctcatggtcggcgatccttcgaccgccaagtcgcagcttcttcgtttcgttctcaacactgctcccctcgccatcgccaccacgggtcgaggctcgtcgggtgtcggtttgacggctgccgttacctcagacaaagagacgggcgagaggagactggaagcaggtgccatggtcatggcagatcgcggtgttgtctgtatcgatgaattcgacaagatgtccgacattgaccgtgtcgccatccacgaagtcatggagcagcagacagttaccatagcgaaggctggcatccatacgtcgctcaatgcccgatgcagtgtgatcgctgctgccaatcccattttcggccagtacgacacgcacaaagacccgcacaagaatatcgcgctcccggactcccttctgtcacgttttgatttgttgtttgttgtgacggatgatattgaaaacagccgggatcggcagatatctgaacatgtcttgcgcatgcatcgctatcgccagccgggaactgacgaaggtgcaccaattcgcgagaacacatcacaagctctcggtgtcgccttgcaaagccaggacgccacacagaagccgacagatgtgtttgagaaatatgatgctatgctacatgccggcgtgactatcactactggtcgtggcgccaacaagcgccacgaggttctaagcattcccttcatgaagaaatacatccagtactgcaaaacgcgagtcaagcccattctcactcagagcgcatctgaccgaatcgccgagatctacgtcggcttgcgcaatgacgagatggaaggcaaccaaaggagaacatcaccgttgactgttcgtacactggagacgctgattcgtctggccactgcacatgctaagtctcggctttccaatcgggtagaggacagagatgcgtcagcggcagaagcaatcttgcgatttgcgctcttcaaagaaattgtcgaagacgagtcaagaaagaagcgcaggcggacgcgacaggtggactcggactcgtccagtgaggagagttccgacgacgaggacggtggagatacatcatatagggggtcaacggcccgcatcagcgcagcacgctctacgcgacaaactcaacggagtcaaccatcggcaagcgcttctcgtacctctgcgcgtggtgctccagatacacctgaacgtgaagaggaggagcaagaggaggtagacctctatgatgcaacaccccgccggagtaatcgtacaacccgtggcggtgttgcgtcgtcatcaaatgccccttcaacatcacagctctcctttgcctcttctatacctgcgtcgcaattggaaacgcaggaagaagaggacgaagacacccaggaagatgccgctctagctgccggagctgctgatctcagtatcaatgcaccaataacacccgagcgactggcgacattccgcacagcacttggacagcttctgaataccgacctttttgaagacgattcggcagacgtcaacgccatcattcaagctgtcaacggacgattgggagctcgtggtactgcattctcgcgcgaggaggctattaaggcgctcaagaaaatggacgaagccaatcaaattatgtatacggatggcgagctagtatataagatttgagatattcaaccagaggaatgtcgcagcttgtgaaacgaataaagagatatggtgctagggcaatgacatgagtgatttataccgcgacggctggtcctttgtctcgggatgggtaaacatgtggttctggaatgagtcgataatgagatgaaaagatggcatggcgttagagatgagacacgtgttagccgagaattgtttttatttgagagcagagaaaactcatccctgactaatgtacataatctcgccggttgtaatggtatccaagaataccgcctatgaagtcttccataatgttcttgtaaggatgaccctgtgtcgatgtcaatgttgcttgtatggccattgcattagacgtctccgttcctattccttggtcaccgtcaccccaatctttccccttctgatattcatagccatgtctggaccattcagatttccatcctcacgatcaagagctgacacgaagcagtgggccaaaaattctgtcatccggaaacagggcccgagggctttgcggtccggatccaacttgaatttggtcttatgatgatcccacagcatgaacgcataccacagagcgcaacataggaccgtccgtgggcagtaaacgcagaacagcacctaaaatgggagatcgatgccgatgggatgctctggtacgaaaatg

SEQ ID NO: 33633 - DNA, 2313 bp, Muscodor strobelii
  misc_feature: SGI cDNA ID NO. 571606
  misc_feature: Encodes the peptide sequence at SEQ ID NO 33634
atgagtgcaagggcagaggcagccccgcgagtagaggccggcgacaatgactgtcggccgatacatactaagacagaaatagacagcacagaagagcttagtagtctcgacatgaagcatcagcccaagaaagctacagtcggcatggcacagggtacaggcacgtccgccgcggtgaatgacgctcatcacgccggaatgaagcggaagcatgaggagacacaggccaatatcgataccggacggaacaaggccagaaatggcagaataacactgaagaccgcagccctgcgacggctcaaggcgaatcaaacgcctgaagatctaatggcatcctttgctccagctggccctcctgcatacacaagcccaaagaaagcagaggagaaacgacaacaggatgaaaaggagatgaagaaaacaattgagtatctagaaggtttcatcaatgagaagggaaaagaggatgattaccccaatgagacgtatcagctacagggaatgacaacattcttaagagactatcaactagacacagtaggtaagatgcgaaagatcgagttatcgagacaccttcccaaccgcggaggtatcttggcggacgacatgggcgttgggaaaacggttcagacaattggctgcatgtcggtaaacctgcccacgaaaaaggacttgcgaaatgggacgggagccactctaatagtcgggccaacgcaaagtctcatcaagcagtggaaggacgagctcatcacgcacacgagcggaaataccaagaattctatcttgatatactcggtcaagagtaacactccagcagtctccgtacgtggcgcgacatacgtgcttgcaacgtatagcgcagtcttagcagactatgcgaatttcgtcaacggggatgagacaaagaccggtgccttatttgaagttgaattccatcgcattgtgttggacgaaggagacagcatcaagaatatttccggcaaatggtcaaaagcatgtagggcactcaagggaagattgaagtgggttctaacgggaacaccccttcaggctatcccatactttcgttttatcggcattgaaatcaaccagacgcgaaaggagtttgagaagacattcgatgcgctgccagataaggatacgattgaagaaagaatcagacgcttgttgtggctcctaatgccacgaagaatgaaaggcgatatgttcatgggccgaccgatatgtaagctgcctgactccactgaaatggttctgaagtttccgctttcgaaagaggagaacatgatctacgatacacagcgaagcgccatgtttgatgaggcgaaaatggcggcggacgatgcagagctcggcttggacattctccaagggttctgtctcaaactaagacaggcaagcgatcatgctttccatctagagtcgacgcttagaacagaggctcttttgccgaaactatcggaactcatacaaaacatcaacggcataaaccctcgagtatcgttatatcatcaactgatggcaaattggagtggagctgatcagctggaacctcgtgacagagataatgaagatcacggcattcaagccctagggtttgacattactcaatatctagctgatctggtggaccaagaagatcgcgatgtctgtgtggaatgtggagaggcagacgctgataaactccaatttatcattgcgagtaccaagatcatactcgcttcggaactcatcagaacatggaccactcaagcgccagatgataaggtagtcgtctttgttgaatggaatctctcagcatgcgtgctaggtcgcgttctagacaagactgggcttaaatatgtctattactggggggatatgtcggacactacacaggcaaaagccctcgaaactttcagaagtgagcctgaagccaaagttatgatcaccagtgtaaaagccggcagcgttggtttgaacatcacctgcgctaacaaagcaattatcatggccccgtggtttaactccgctgtagagctacaagccttcggaaggatcaagcgacacggccaagaaaaagaaactcttatggtccgactcattgctgaggggactcttgacgaagatttgcttgagttgcaaagcgagaaaaacattgcgcttgccccagcgctgaaccaagactcgtcaaatacaggattgacaagagacgaccatttccgccttctattcggtagactcgacccgaaatctattattgaagagacagacgaggactctgatcatttgacgacagttgactcagaggatgatacagactacgagccttag

SEQ ID NO: 33634 - protein, 770 aa, Muscodor strobelii
  misc_feature: SGI Peptide ID NO. 571606
  misc_feature (606)..(684): Pfam Id: PF00271 Pfam Desc: Helicase conserved C-terminal domain
  misc_feature (175)..(473): Pfam Id: PF00176 Pfam Desc: SNF2 family N-terminal domain
  misc_feature (175)..(350): Pfam Id: PF00176 Pfam Desc: SNF2 family N-terminal domain
  misc_feature (162)..(765): NCBI GI: 85085493 Blast Desc: NCU04445 [Neurospora crassa OR74A] gi|28918614|gb|EAA28286.1| [Neurospora crassa OR74A]
  misc_feature (163)..(711): NCBI GI: 212529790 Blast Desc: SNF2 family helicase, [Penicillium marneffei ATCC 18224] gi|210074450|gb|EEA28537.1| SNF2 family helicase, [Penicillium marneffei ATCC 18224]
  misc_feature (168)..(730): NCBI GI: 270252001 Blast Desc: protein product [Vitis vinifera]
  misc_feature (196)..(738): NCBI GI: 270230383 Blast Desc: protein product [Vitis vinifera]
  misc_feature (196)..(739): NCBI GI: 213406021 Blast Desc: ATP-dependent helicase RIS1 [Schizosaccharomyces japonicus yFS275] gi|212001829|gb|EEB07489.1| ATP-dependent helicase RIS1 [Schizosaccharomyces japonicus yFS275]
  misc_feature (154)..(711): NCBI GI: 19111970 Blast Desc: ATP-dependent DNA helicase Rhp16b () [Schizosaccharomyces pombe] gi|1723497|sp|Q10332.1|YBMA_SCHPO RecName: Full=Uncharacterized ATP-dependent helicase C582.10c DNA
  misc_feature (160)..(478): NCBI GI: 154309155 Blast Desc: BC1G_07472 [Botryotinia fuckeliana B05.10] gi|150852515|gb|EDN27707.1| BC1G_07472 [Botryotinia fuckeliana B05.10]
  misc_feature (160)..(510): NCBI GI: 145607271 Blast Desc: MGG_12155 [Magnaporthe grisea 70-15] gi|145014859|gb|EDJ99427.1| MGG_12155 [Magnaporthe grisea 70-15]
  misc_feature (165)..(740): NCBI GI: 255932145 Blast Desc: Pc12g07960 [Penicillium chrysogenum Wisconsin 54-1255] gi|211582248|emb|CAP80423.1| Pc12g07960 [Penicillium chrysogenum Wisconsin 54-1255]
  misc_feature (165)..(740): NCBI GI: 145244809 Blast Desc: An11g06990 [Aspergillus niger] gi|134079366|emb|CAK96995.1| protein product [Aspergillus niger]
MSARAEAAPRVEAGDNDCRPIHTKTEIDSTEELSSLDMKHQPKKATVGMAQGTGTSAAVNDAHHAGMKRKHEETQANIDTGRNKARNGRITLKTAALRRLKANQTPEDLMASFAPAGPPAYTSPKKAEEKRQQDEKEMKKTIEYLEGFINEKGKEDDYPNETYQLQGMTTFLRDYQLDTVGKMRKIELSRHLPNRGGILADDMGVGKTVQTIGCMSVNLPTKKDLRNGTGATLIVGPTQSLIKQWKDELITHTSGNTKNSILIYSVKSNTPAVSVRGATYVLATYSAVLADYANFVNGDETKTGALFEVEFHRIVLDEGDSIKNISGKWSKACRALKGRLKWVLTGTPLQAIPYFRFIGIEINQTRKEFEKTFDALPDKDTIEERIRRLLWLLMPRRMKGDMFMGRPICKLPDSTEMVLKFPLSKEENMIYDTQRSAMFDEAKMAADDAELGLDILQGFCLKLRQASDHAFHLESTLRTEALLPKLSELIQNINGINPRVSLYHQLMANWSGADQLEPRDRDNEDHGIQALGFDITQYLADLVDQEDRDVCVECGEADADKLQFIIASTKIILASELIRTWTTQAPDDKVVVFVEWNLSACVLGRVLDKTGLKYVYYWGDMSDTTQAKALETFRSEPEAKVMITSVKAGSVGLNITCANKAIIMAPWFNSAVELQAFGRIKRHGQEKETLMVRLIAEGTLDEDLLELQSEKNIALAPALNQDSSNTGLTRDDHFRLLFGRLDPKSIIEETDEDSDHLTTVDSEDDTDYEP

SEQ ID NO: 33635 - DNA, 1392 bp, Muscodor strobelii
  misc_feature: SGI EST ID NO. CUFF.79430.0
  misc_feature: Variant of the nucleotide sequence at SEQ ID NO 33633
ggaatgtggagaggcagacgctgataaactccaatttatcaactgtgagcatccagtttgcaacgattgctacgaagatgctatcgaggaatgcaagacaagggggatgagaaaatgcaggtgtcccctttgtaacagactatgggcaaatgtaaaagtcctggagaaaggggcaattcggaaagggaggccgccagttgggtcaagctctatcagaacggtcggaatccagaatgttggagcctttagcaacatcaaaggacccttgcaaacggctgcacagtcaacgagtcaatcaccgggcgacgatataaacagctgccaaccacacctcgatagacagagcagtggctgtcgttggctcgaacgatgtgacagagacaaccagatcattgcgagtaccaagatcatactcgcttcggaactcatcagaacatggaccactcaagcgccagatgataaggtagtcgtctttgttgaatggaatctctcagcatgcgtgctaggtcgcgttctagacaagactgggcttaaatatgtctattactggggggatatgtcggacactacacaggcaaaagccctcgaaactttcagaagtgagcctgaagccaaagttatgatcaccagtgtaaaagccggcagcgttggtttgaacatcacctgcgctaacaaagcaattatcatggccccgtggtttaactccgctgtagagctacaagccttcggaaggatcaagcgacacggccaagaaaaagaaactcttatggtccgactcattgctgaggggactcttgacgaagatttgcttgagttgcaaagcgagaaaaacattgcgcttgccccagcgctgaaccaagactcgtcaaatacaggattgacaagagacgaccatttccgccttctattcggtagactcgacccgaaatctattattgaagagacagacgaggactctgatcatttgacgacagttgactcagaggatgatacagactacgagccttagtttcaagggcactgactgcatcttcgcatcaacgttgccgaatacggactcgcctgggaatgcaacaaaagaccgagtgtgtaagaccgtaaggggaccaatatataaaaacagtcaagccaaaaaagtaaaaaggggaaagaaagtcatacaaagaaagacatgagggagagtaacgatatcgactttacgcgttcgtcttccaagcacaggctagtcttcaaggtgaacagtcagcaatgacttaatagctgctcgacggacattctataatccgcttcatgatcaagacatagtggcgaggcagttaaacattgatttatagtggttaataaaatgcgttgttttaaatgtaagcctagtggaacctataaggaatcgtc

SEQ ID NO: 33636 - DNA, 1242 bp, Muscodor strobelii
  misc_feature: SGI cDNA ID NO. 571607
  misc_feature: Encodes the peptide sequence at SEQ ID NO 33637
atgcaacgctcaaactcagcggtgggagcgttttccaacctgctgaaccccgaacccgcagtttcgcccgggtctgccgccaacaacgccagtgcacacaaagtcgacgccgagggagacaccgagatggcctctgtcagcgtcatcaggcccaacggccctctgcccggcggccatgccaccgagactcccaacgagctgccccggccgtacaagtgcccgctgtgcgacaaggcattccaccgcttggagcaccagacgcggcacatccgcacccacaccggcgagaagccgcacgcctgcatgttccctggctgcactaagaagttctccaggtccgacgagctcacccgccactcgaggatacacaacaaccccaactccaggcgaggaaacaaggctggccaggctgcgcaccacgtcctcggccactctctgtccccggactccatgatgccgcctccgtcgggcgccagggacatcaagtctgccccgacgtcagccatggtgtcgcccaatgtgtctccgccgcactcgtactcatcctacaccgtgccgcatcagtcgcccctgcatcattattcaaggggtgctcatgtgcccggcccgaacgtggacatgggcatgctggccaacgctgcgcaccaggtagagcagcagggcctcgctcctcaccacgcttcgaggcagcagtactactctcacagccatcacaactcccgcaaccaccttccctctttgtctgcgtaccacatgtctcggtcgcactcaagcgatgaccaccgagacgatcattattctccagccgctcgcctcgccaaacgctcgcggccaaattcgcccaactcaactgcgccatcctctccgacgttctcacacgactcgctctctcctacgccagaccacacccctctggcaactcctgctcactcgccacgtcttcgcccttatgcgggtgttgagttaccaactctgcgtcacctcaccctgggccacacaccagcacttgcgcctatggaaccgcatttagaaggttcaacatttgcacaggcgcctcagcccacaagcggtccccgtcccacgggcttgtccttgacagatataatcagtcgaccagatgggagcagaaaactgcccgttccccagatgccaaaggttgcggttcatgatttgctctcgaacgacaattttagtcacagtggccggagctccgcaaatggcagtctcgctggcggagaatga

SEQ ID NO: 33637 - protein, 413 aa, Muscodor strobelii
  misc_feature: SGI Peptide ID NO. 571607
  misc_feature (99)..(123): Pfam Id: PF00096 Pfam Desc: Zinc finger, C2H2 type
  misc_feature (71)..(93): Pfam Id: PF00096 Pfam Desc: Zinc finger, C2H2 type
  misc_feature (1)..(413): NCBI GI: 46136399 Blast Desc: CREA_GIBFU DNA-binding protein creA (Carbon catabolite repressor) [Gibberella zeae PH-1]
  misc_feature (1)..(413): NCBI GI: 21362408 Blast Desc: CREA_GIBFU RecName: Full=DNA-binding protein creA; AltName: Full=Carbon catabolite repressor gi|3820899|emb|CAA76330.1| carbon catabolite repression regulator
  misc_feature (11)..(413): NCBI GI: 256727499 Blast Desc: [Nectria haematococca mpVI 77-13-4]
  misc_feature (1)..(413): NCBI GI: 1177689 Blast Desc: CREI protein [Hypocrea lixii]
  misc_feature (1)..(413): NCBI GI: 1835118 Blast Desc: CRR1 protein [Metarhizium anisopliae]
  misc_feature (1)..(413): NCBI GI: 940429 Blast Desc: DNA-binding protein [Hypocrea jecorina] gi|1586934|prf||2205243A carbon catabolite repressor
  misc_feature (1)..(413): NCBI GI: 1177692 Blast Desc: CREI protein [Hypocrea jecorina]
  misc_feature (1)..(413): NCBI GI: 1585561 Blast Desc: CREI protein [Hypocrea jecorina]
  misc_feature (1)..(413): NCBI GI: 1041216 Blast Desc: Cre1 [Hypocrea jecorina]
  misc_feature (1)..(413): NCBI GI: 118582595 Blast Desc: carbon catabolite repressor [Beauveria bassiana]
MQRSNSAVGAFSNLLNPEPAVSPGSAANNASAHKVDAEGDTEMASVSVIRPNGPLPGGHATETPNELPRPYKCPLCDKAFHRLEHQTRHIRTHTGEKPHACMFPGCTKKFSRSDELTRHSRIHNNPNSRRGNKAGQAAHHVLGHSLSPDSMMPPPSGARDIKSAPTSAMVSPNVSPPHSYSSYTVPHQSPLHHYSRGAHVPGPNVDMGMLANAAHQVEQQGLAPHHASRQQYYSHSHHNSRNHLPSLSAYHMSRSHSSDDHRDDHYSPAARLAKRSRPNSPNSTAPSSPTFSHDSLSPTPDHTPLATPAHSPRLRPYAGVELPTLRHLTLGHTPALAPMEPHLEGSTFAQAPQPTSGPRPTGLSLTDIISRPDGSRKLPVPQMPKVAVHDLLSNDNFSHSGRSSANGSLAGGE

SEQ ID NO: 33638 - DNA, 2077 bp, Muscodor strobelii
  misc_feature: SGI EST ID NO. CUFF.79982.1
  misc_feature: Variant of the nucleotide sequence at SEQ ID NO 33636
cccccatccctccttaaagctttccccctccaaccctctagccgtctattacgtccggaaaaaaatcgcccacttcaccgttgaatcgccccccaggcttttccccaacttacaaaaacagcactgccgcctcttgatgacaagacatatatatcagcgataacaacaactgtaatctgcacaccaccacgagtcctgtgttttactttctgacgtcttcccgtctctgcagcggaagcgctcaactttcaaaggaatcagaggatcgaaaaagacatcaattgcacaggctgccggatcgagccttggtttaagtcgtggagagaaagtcagcatcattattacccggtaaatttcaagcgcccacttggctggcgatcacatgcaacgctcaaactcagcggtgggagcgttttccaacctgctgaaccccgaacccgcagtttcgcccgggtctgccgccaacaacgccagtgcacacaaagtcgacgccgagggagacaccgagatggcctctgtcagcgtcatcaggcccaacggccctctgcccggcggccatgccaccgagactcccaacgagctgccccggccgtacaagtgcccgctgtgcgacaaggcattccaccgcttggagcaccagacgcggcacatccgcacccacaccggcgagaagccgcacgcctgcatgttccctggctgcactaagaagttctccaggtccgacgagctcacccgccactcgaggatacacaacaaccccaactccaggcgaggaaacaaggctggccaggctgcgcaccacgtcctcggccactctctgtccccggactccatgatgccgcctccgtcgggcgccagggacatcaagtctgccccgacgtcagccatggtgtcgcccaatgtgtctccgccgcactcgtactcatcctacaccgtgccgcatcagtcgcccctgcatcattattcaaggggtgctcatgtgcccggcccgaacgtggacatgggcatgctggccaacgctgcgcaccaggtagagcagcagggcctcgctcctcaccacgcttcgaggcagcagtactactctcacagccatcacaactcccgcaaccaccttccctctttgtctgcgtaccacatgtctcggtcgcactcaagcgatgaccaccgagacgatcattattctccagccgctcgcctcgccaaacgctcgcggccaaattcgcccaactcaactgcgccatcctctccgacgttctcacacgactcgctctctcctacgccagaccacacccctctggcaactcctgctcactcgccacgtcttcgcccttatgcgggtgttgagttaccaactctgcgtcacctcaccctgggccacacaccagcacttgcgcctatggaaccgcatttagaaggttcaacatttgcacaggcgcctcagcccacaagcggtccccgtcccacgggcttgtccttgacagatataatcagtcgaccagatgggagcagaaaactgcccgttccccagatgccaaaggttgcggttcatgatttgctctcgaacgacaattttagtcacagtggccggagctccgcaaatggcagtctcgctggcggagaatgagtttgcaaactatgattcacctggtgtggacaaagtgacgaattattggatcacgacatgaattatgaagtttttcattttgagatatagactattatagagaatggaagggaggcgttatcatctttctcgccttcttaggcgcctgttcacaccccactctcataatagggcgaccatacgtggctatacgtcgagatattatagggagaaagacggagtctgcgatggaatgggagctgtgctttctgttggacacatttgtatagatttgagacctccagggtactcttcgattattcattctggacaagccacgagagcagatgtcattttccatttgcctcacgcatggtttacttgatcaatagacgtaaatcactgaattgcactaaatttgttcattttcctggcgacattttatgtctagttccaaccgctttggttcaaaag

SEQ ID NO: 33639 - DNA, 588 bp, Muscodor strobelii
  misc_feature: SGI cDNA ID NO. 571608
  misc_feature: Elevated expression when VOC is produced
  misc_feature: Encodes the peptide sequence at SEQ ID NO 33640
atgtcatctccaaatcccaatctgcgcaccgaaaatcttctccttcgccccgccgtcctctctgatgcctcccccatcgccgccctttttgccaatcccctcaacacccagcatgaaccgcacaagccaagcagcccaacagcagaagagtaccggcgccgaatcgccaaatgggatgatctacgcgctcgtgggaaagcctactttcttgtcatatgccgacgcccactagcagagggagaatcggcctcaccacctgccgatcgtgtcatcggcttcggcggcatcaatgccatctctacggacgctcagggtaagcgagtggcggatctgggggtgctgattgacagctccgagtggaggaaggggtatgggcgtgaagcgttgcaggtcactttggagtttgcattccggaaggccgaggcggagggcaccggatgcgacgaggccttttttgagacgttggcggtgaatgcgccgtttcaagggctggctgatcgaatggggatggccaagtggaagcaggtgaagagtgaagggcgcgaggttgaatacaggttcagcaaggaggattgggagggggcatga

SEQ ID NO: 33640 - protein, 195 aa, Muscodor strobelii
  misc_feature: SGI Peptide ID NO. 571608
  misc_feature (88)..(171): Pfam Id: PF00583 Pfam Desc: Acetyltransferase (GNAT) family
  misc_feature (1)..(137): NCBI GI: 260651974 Blast Desc: acetyltransferase. [Streptomyces scabiei 87.22]
  misc_feature (5)..(192): NCBI GI: 49082738 Blast Desc: PA3945 [synthetic construct]
  misc_feature (5)..(192): NCBI GI: 15599140 Blast Desc: PA3945 [Pseudomonas aeruginosa PAO1] gi|254236838|ref|ZP_04930161.1| conserved [Pseudomonas aeruginosa C3719] gi|254242633|ref|ZP_04935955.1| conserved [Pseudomonas
  misc_feature (7)..(151): NCBI GI: 257440900 Blast Desc: acetyltransferase, GNAT family [Faecalibacterium prausnitzii A2-165] gi|257196680|gb|EEU94964.1| acetyltransferase, GNAT family [Faecalibacterium prausnitzii
  misc_feature (1)..(137): NCBI GI: 239988394 Blast Desc: acetyltransferase [Streptomyces roseosporus NRRL 11379]
  misc_feature (1)..(137): NCBI GI: 239941930 Blast Desc: acetyltransferase [Streptomyces roseosporus NRRL 15998]
  misc_feature (1)..(137): NCBI GI: 282873752 Blast Desc: GCN5-related N-acetyltransferase [Streptomyces sp. ACT-1] gi|282572793|gb|EFB78254.1| GCN5-related N-acetyltransferase [Streptomyces sp. ACT-1]
  misc_feature (1)..(129): NCBI GI: 159128467 Blast Desc: conserved [Aspergillus fumigatus A1163]
  misc_feature (1)..(129): NCBI GI: 146323133 Blast Desc: N-acetyltransferase, GNAT family [Aspergillus fumigatus Af293] gi|129556481|gb|EBA27269.1| N-acetyltransferase, GNAT family, [Aspergillus fumigatus Af293]
  misc_feature (1)..(137): NCBI GI: 182433965 Blast Desc: acetyltransferase [Streptomyces griseus subsp. griseus NBRC 13350] gi|178462481|dbj|BAG17001.1| acetyltransferase [Streptomyces griseus subsp. griseus NBRC 13350]
  misc_feature: Useful for introducing or modulating the production of volatile compounds
MSSPNPNLRTENLLLRPAVLSDASPIAALFANPLNTQHEPHKPSSPTAEEYRRRIAKWDDLRARGKAYFLVICRRPLAEGESASPPADRVIGFGGINAISTDAQGKRVADLGVLIDSSEWRKGYGREALQVTLEFAFRKAEAEGTGCDEAFFETLAVNAPFQGLADRMGMAKWKQVKSEGREVEYRFSKEDWEGA

SEQ ID NO: 33641 - DNA, 947 bp, Muscodor strobelii
  misc_feature: SGI EST ID NO. CUFF.79473.0
  misc_feature: Variant of the nucleotide sequence at SEQ ID NO 33639
cttctcgatcctgagagacaacttgaacagtcattatctatcccattcataaactcttgagtgtgctgtctcccaattacacgtcatcttacgacccgggttaccaatagtaaccttcacaagaatgtcatctccaaatcccaatctgcgcaccgaaaatcttctccttcgccccgccgtcctctctgatgcctcccccatcgccgccctttttgccaatcccctcaacacccagcatgaaccgcacaagccaagcagcccaacagcagaagagtaccggcgccgaatcgccaaatgggatgatctacgcgctcgtgggaaagcctactttcttgtcatatgccgacgcccactagcagagggagaatcggcctcaccacctgccgatcgtgtcatcggcttcggcggcatcaatgccatctctacggacgctcagggtaagcgagtggcggatctgggggtgctgattgacagctccgagtggaggaaggggtatgggcgtgaagcgttgcaggtcactttggagtttgcattccggaaggccgaggcggagggcaccggatgcgacgaggccttttttgagacgttggcggtgaatgcgccgtttcaagggctggctgatcgaatggggatggccaagtggaagcaggtgaagagtgaagggcgcgaggttgaatacaggttcagcaaggaggattgggagggggcatgaatccgacggaccgctggaacggaggcgctgatgaaattgggatcgaaatttaccggtcatcaatgtcgtagagggacgtgacaatgtcaaagccatgaaggctagatataatggagaacgccccatacgtgaccacccgagtgtatataagatggcattacccccaacgagtagttcggggaacttagacctcaaaataattaacgggataaccatatactatttttaacaggtt

SEQ ID NO: 33642 - DNA, 918 bp, Muscodor strobelii
  misc_feature: SGI cDNA ID NO. 571609
  misc_feature: Elevated expression when VOC is produced
  misc_feature: Encodes the peptide sequence at SEQ ID NO 33643
atggcatccaacatacatggcttcttacagccagagacactcggggaaaagtttcttggccatgttgccgatttcgaggaccacgacagctcttccaccctcctaccatcaatcgaagaaagtggacgccgtctcagagaacgtcatacacagaggcgtcttgttctcatttccatcggccagctggcgttctttgtactctctctttccatgctggtatattctttacacttacagaagcaaatgcctcgaaattgtatgcgaaaggtctcgtcgccttctcctttactcgatgccttcaccgacggtgactacgaatgggttcattggaacactacgttgaacacctttggagagtttaccggcaaatacaccgaggagaaagcccgggcatgggagagtatcacttcaactcctctcgttactgtgtccgaggcaaatatgatcagcgctggtgctgccttagactccgtccgagtgcctcaatctgctggaggcggctacctagcccagttcgagggattccacgcactgcattgccttcgcgcgctctggtttgatcaccactccgaggagatctcggagattaagaagtccaagctagagaattcacgacactatgaagcacattacgagcactgtgttgaccttctacgacagagcctaacttgtcattttgataccagcatcacgactttcaattggcttgtggacattggcgagccattcccctatttttcgaatcccaagaaatgtctcaagttggacaagatcgtgagctggacacatgagcacaagcttcatatgccagagggatttgtttggaaggcacctgatgacgctcatttggtcagagtagtcgaccgtgttgcgcaatgggatgaaccccgagtagacaagtatgggaacgtactttga

SEQ ID NO: 33643 - protein, 305 aa, Muscodor strobelii
  misc_feature: SGI Peptide ID NO. 571609
  misc_feature (59)..(262): NCBI GI: 242215559 Blast Desc: POSPLDRAFT_130143 [Postia placenta Mad-698-R] gi|220727314|gb|EED81237.1| POSPLDRAFT_130143 [Postia placenta Mad-698-R]
  misc_feature (108)..(267): NCBI GI: 154302917 Blast Desc: [Botryotinia fuckeliana B05.10] gi|150855126|gb|EDN30318.1| [Botryotinia fuckeliana B05.10]
  misc_feature (120)..(299): NCBI GI: 154313179 Blast Desc: [Botryotinia fuckeliana B05.10] gi|150849676|gb|EDN24869.1| [Botryotinia fuckeliana B05.10]
  misc_feature (84)..(281): NCBI GI: 212534390 Blast Desc: conserved [Penicillium marneffei ATCC 18224] gi|210069750|gb|EEA23840.1| conserved [Penicillium marneffei ATCC 18224]
  misc_feature (112)..(299): NCBI GI: 156032888 Blast Desc: [Sclerotinia sclerotiorum 1980] gi|154699252|gb|EDN98990.1| [Sclerotinia sclerotiorum 1980]
  misc_feature (52)..(266): NCBI GI: 242804865 Blast Desc: conserved [Talaromyces stipitatus ATCC 10500] gi|218717807|gb|EED17228.1| conserved [Talaromyces stipitatus ATCC 10500]
  misc_feature (62)..(270): NCBI GI: 242211044 Blast Desc: [Postia placenta Mad-698-R] gi|220729527|gb|EED83399.1| [Postia placenta Mad-698-R]
  misc_feature (104)..(267): NCBI GI: 242222427 Blast Desc: [Postia placenta Mad-698-R] gi|220723760|gb|EED77873.1| [Postia placenta Mad-698-R]
  misc_feature (65)..(264): NCBI GI: 242211074 Blast Desc: [Postia placenta Mad-698-R] gi|220729542|gb|EED83414.1| [Postia placenta Mad-698-R]
  misc_feature (65)..(264): NCBI GI: 242207340 Blast Desc: [Postia placenta Mad-698-R] gi|220731553|gb|EED85397.1| [Postia placenta Mad-698-R]
  misc_feature: Useful for introducing or modulating the production of volatile compounds
MASNIHGFLQPETLGEKFLGHVADFEDHDSSSTLLPSIEESGRRLRERHTQRRLVLISIGQLAFFVLSLSMLVYSLHLQKQMPRNCMRKVSSPSPLLDAFTDGDYEWVHWNTTLNTFGEFTGKYTEEKARAWESITSTPLVTVSEANMISAGAALDSVRVPQSAGGGYLAQFEGFHALHCLRALWFDHHSEEISEIKKSKLENSRHYEAHYEHCVDLLRQSLTCHFDTSITTFNWLVDIGEPFPYFSNPKKCLKLDKIVSWTHEHKLHMPEGFVWKAPDDAHLVRVVDRVAQWDEPRVDKYGNVL

SEQ ID NO: 33644 - DNA, 1400 bp, Muscodor strobelii
  misc_feature: SGI EST ID NO. CUFF.79477.0
  misc_feature: Variant of the nucleotide sequence at SEQ ID NO 33642
cccacagtagtcactagtctcggtctcacaaagccctcgccatcgcctttgctgctcgttctacttctccgagaattgaggtctaataatatcatcaaatcaacatggcatccaacatacatggcttcttacagccagagacactcggggaaaagtttcttggccatgttgccgatttcgaggaccacgacagctcttccaccctcctaccatcaatcgaagaaagtggacgccgtctcagagaacgtcatacacagaggcgtcttgttctcatttccatcggccagctggcgttctttgtactctctctttccatgctggtatattctttacacttacagaagcaaatgcctcgaaattgtatgcgaaaggtctcgtcgccttctcctttactcgatgccttcaccgacggtgactacgaatgggttcattggaacactacgttgaacacctttggagagtttaccggcaaatacaccgaggagaaagcccgggcatgggagagtatcacttcaactcctctcgttactgtgtccgaggcaaatatgatcagcgctggtgctgccttagactccgtccgagtgcctcaatctgctggaggcggctacctagcccagttcgagggattccacgcactgcattgccttcgcgcgctctggtttgatcaccactccgaggagatctcggagattaagaagtccaagctagagaattcacgacactatgaagcacattacgagcactgtgttgaccttctacgacagagcctaacttgtcattttgataccagcatcacgactttcaattggcttgtggacattggcgagccattcccctatttttcgaatcccaagaaatgtctcaagttggacaagatcgtgagctggacacatgagcacaagcttcatatgccagagggatttgtttggaaggcacctgatgacgctcatttggtcagagtagtcgaccgtgttgcgcaatgggatgaaccccgagtagacaagtatgggaacgtactttgaagaccttgcaggtttgcgtctgatcgataggtggtgctgacctagtggttcggcgatgtaaacacatcctatacatagaatctctgggcatgcaatcaagtagtcagaggcaaccattcgcatttctaagtgtgtaagcagcagagaatttaggccgtgtccataggtcttataaaggagggtcggcttcgtgtaattcacgtgctcccagttttcttttgactttatcgatgaagttctgtttgggttgcaacgcgccaactattctgactccggactctgctcgcggcgttctgctgggtatattcccactttgtgtcacgaagtgcagagattagtgcatttcgcatttcatagaattcaaagaataatagaaac

SEQ ID NO: 33645 - DNA, 816 bp, Muscodor strobelii
  misc_feature: SGI cDNA ID NO. 571610
  misc_feature: Elevated expression when VOC is produced
  misc_feature: Encodes the peptide sequence at SEQ ID NO 33646
atgcactcatacgagcccttgagcaatctcgacgatggtgaagagtcaagatcggcccccaaaacagctcattttctgccacgtttggggccgcggtacttgctcgcgtgcaatgtggccatcttgcttctgaacatcttcgcaaccgccgtgttcacgtcattggcgttgaccagagacgccacgcctgccaacaactatatgcttcctccaactccgaacgaaaagctcttgcaaagacagcagcggatcttcacgctctcttcaaactggtccggagctcccagcaacgaaacagatcaagcgtggaaaagcctcgtcgaggacgacatgggcgcattcggcatttctgcaaagctcttcggacaagtcaatccctccttggagacaggagtccgcgtaccgcacgagaatgatgacaagtacctggcgacttttgatgtcgtgcataaacttcactgtctgaatcctattcgcttgagcttttaccaagatcggcatcccgattatccaggcttccacggccacacgtcggaggagatccaggggcatcgcgagcactgtattgagcagattcgccagtcgttgatgtgtagcggagacctcagtattctgacgtacaactgggtcaaaggagagcggatgccaaagccgaacttcaagacggtgcatacatgccagaactgggactacttggtgggatgggcgaaggagaactctgtcgaacacttgcttcgatatatgaggagaccaaaggacggcctcgagctggtccatgtgccatgtgaggaaggggtggactgcgatggaatataa

SEQ ID NO: 33646 - protein, 271 aa, Muscodor strobelii
  misc_feature: SGI Peptide ID NO. 571610
  misc_feature (34)..(234): NCBI GI: 145244851 Blast Desc: An11g07180 [Aspergillus niger] gi|134079386|emb|CAK40768.1| protein product [Aspergillus niger]
  misc_feature (85)..(260): NCBI GI: 154302917 Blast Desc: [Botryotinia fuckeliana B05.10] gi|150855126|gb|EDN30318.1| [Botryotinia fuckeliana B05.10]
  misc_feature (91)..(257): NCBI GI: 212534390 Blast Desc: conserved [Penicillium marneffei ATCC 18224] gi|210069750|gb|EEA23840.1| conserved [Penicillium marneffei ATCC 18224]
  misc_feature (85)..(241): NCBI GI: 242222427 Blast Desc: [Postia placenta Mad-698-R] gi|220723760|gb|EED77873.1| [Postia placenta Mad-698-R]
  misc_feature (31)..(244): NCBI GI: 116204067 Blast Desc: CHGG_09917 [Chaetomium globosum CBS 148.51] gi|88176045|gb|EAQ83513.1| CHGG_09917 [Chaetomium globosum CBS 148.51]
  misc_feature (89)..(233): NCBI GI: 242215559 Blast Desc: POSPLDRAFT_130143 [Postia placenta Mad-698-R] gi|220727314|gb|EED81237.1| POSPLDRAFT_130143 [Postia placenta Mad-698-R]
  misc_feature (88)..(254): NCBI GI: 156032888 Blast Desc: [Sclerotinia sclerotiorum 1980] gi|154699252|gb|EDN98990.1| [Sclerotinia sclerotiorum 1980]
  misc_feature (31)..(220): NCBI GI: 145244821 Blast Desc: An11g07050 [Aspergillus niger] gi|134079372|emb|CAK97001.1| protein product [Aspergillus niger]
  misc_feature (32)..(244): NCBI GI: 225680940 Blast Desc: conserved [Paracoccidioides brasiliensis Pb03]
  misc_feature (43)..(244): NCBI GI: 261204982 Blast Desc: conserved [Ajellomyces dermatitidis SLH14081] gi|239592287|gb|EEQ74868.1| conserved [Ajellomyces dermatitidis SLH14081] gi|239611559|gb|EEQ88546.1| conserved [Ajellomyces
  misc_feature: Useful for introducing or modulating the production of volatile compounds
MHSYEPLSNLDDGEESRSAPKTAHFLPRLGPRYLLACNVAILLLNIFATAVFTSLALTRDATPANNYMLPPTPNEKLLQRQQRIFTLSSNWSGAPSNETDQAWKSLVEDDMGAFGISAKLFGQVNPSLETGVRVPHENDDKYLATFDVVHKLHCLNPIRLSFYQDRHPDYPGFHGHTSEEIQGHREHCIEQIRQSLMCSGDLSILTYNWVKGERMPKPNFKTVHTCQNWDYLVGWAKENSVEHLLRYMRRPKDGLELVHVPCEEGVDCDGI

SEQ ID NO: 33647 - DNA, 1928 bp, Muscodor strobelii
  misc_feature: SGI EST ID NO. CUFF.79482.0
  misc_feature: Variant of the nucleotide sequence at SEQ ID NO 33645
ggaatatgtcggtcgtcactaaaaacacaatgcactcatacgagcccttgagcaatctcgacgatggtgaagagtcaagatcggcccccaaaacagctcattttctgccacgtttggggccgcggtacttgctcgcgtgcaatgtggccatcttgcttctgaacatcttcgcaaccgccgtgttcacgtcattggcgttgaccagagacgccacgcctgccaacaactatatgcttcctccaactccgaacgaaaagctcttgcaaagacagcagcggatcttcacgctctcttcaaactggtccggagctcccagcaacgaaacagatcaagcgtggaaaagcctcgtcgaggacgacatgggcgcattcggcatttctgcaaagctcttcggacaagtcaatccctccttggagacaggagtccgcgtaccgcacgagaatgatgacaagtacctggcgacttttgatgtcgtgcataaacttcactgtctgaatcctattcgcttgagcttttaccaagatcggcatcccgattatccaggcttccacggccacacgtcggaggagatccaggggcatcgcgagcactgtattgagcagattcgccagtcgttgatgtgtagcggagacctcagtattctgacgtacaactgggtcaaaggagagcggatgccaaagccgaacttcaagacggtgcatacatgccagaactgggactacttggtgggatgggcgaaggagaactctgtcgaacacttgcttcgatatatgaggagaccaaaggacggcctcgagctggtccatgtgccatgtgaggaaggggtggactgcgatggaatataacaagcgttacgaacaagactttcacagcgtcccagggttgctgtggtgattgaatgactatagatacttttgcaaatgcacgttggtgtcggcccaggagcaactttctgagcgttgcaaatgtactggttccacgatcgtctactatcaatgcctatctaattcagcgcgtcaaagaggctccacattgttgccccctcttccagctctggtaatgagtcgagcgggcgttgctcagtctgctcaatcttctctctgaggtaaatcgcactcttgcactgatgcttgatgtcttctccgtctatgtcgtccctgagcacgttccccgcatcatccgtgtaagttctgggccgctccagcgtgccatcagcagagcacaacaatgactgcgcaatatagctgagacagtgtcctatatgcatctcatgttcactttttgccccgcgaatcccactttctaagctatgagaatgggcggccggccggccctctgacactttgatcatgtcccgaatcatcgaaaggcaatgtagagcgtggaacatggtcacgccatgtccggtcctgtacgtgtcgttgtatcgcacccaaagaaaaccgccttgcttagtcgaggatatcgtcgaccatgctgcatctccgacttgtgtcatatcttccagctcgggtctcgcgcggaaggcttcgagatgggcactggggggtgttgtggtcgacgcgtcgtggccactcgcgctgtgttgttcgcagacgcatggcggtggtgatggccatgatccgtacaacggattgcttggagaattggccgtgaagaagacgaagagtgagatgagtagaagaaggaaggtgaaaaggagagtaaagttggtgggcttgggggcggcgggactcatggtgataatgaagaagaagatgttgagtaaacaattacagcgagtagtcaggctgtgtcaacgtgcgcgctcgagcttgcagcatgagccttgggaaaattgtaagccgagtttggaccagacttgccgagagaaagccagggaagtcacatcgcagagctcatggttgtcagtatcaatgtatcactcg

SEQ ID NO: 33648 - DNA, 735 bp, Muscodor strobelii
  misc_feature: SGI cDNA ID NO. 571611
  misc_feature: Elevated expression when VOC is produced
  misc_feature: Encodes the peptide sequence at SEQ ID NO 33649
atgagtcccgccgcccccaagcccaccaactttactctccttttcaccttccttcttctactcatctcactcttcgtcttcttcacggccaattctccaagcaatccgttgtacggatcatggccatcaccaccgccatgcgtctgcgaacaacacagcgcgagtggccacgacgcgtcgaccacaacaccccccagtgcccatctcgaagccttccgcgcgagacccgagctggaagatatgacacaagtcggagatgcagcatggtcgacgatatcctcgactaagcaaggcggttttctttgggtgcgatacaacgacacgtacaggaccggacatggcgtgaccatgttccacgctctacattgcctttcgatgattcgggacatgatcaaagtgtcagagggccggccggccgcccattctcatagcttagaaagtgggattcgcggggcaaaaagtgaacatgagatgcatataggacactgtctcagctatattgcgcagtcattgttgtgctctgctgatggcacgctggagcggcccagaacttacacggatgatgcggggaacgtgctcagggacgacatagacggagaagacatcaagcatcagtgcaagagtgcgatttacctcagagagaagattgagcagactgagcaacgcccgctcgactcattaccagagctggaagagggggcaacaatgtggagcctctttgacgcgctgaattag

SEQ ID NO: 33649 - protein, 244 aa, Muscodor strobelii
  misc_feature: SGI Peptide ID NO. 571611
  misc_feature (48)..(224): NCBI GI: 156037504 Blast Desc: SS1G_12465 [Sclerotinia sclerotiorum 1980] gi|154697874|gb|EDN97612.1| SS1G_12465 [Sclerotinia sclerotiorum 1980]
  misc_feature (59)..(224): NCBI GI: 154305122 Blast Desc: [Botryotinia fuckeliana B05.10] gi|150853814|gb|EDN29006.1| [Botryotinia fuckeliana B05.10]
  misc_feature (72)..(224): NCBI GI: 154319961 Blast Desc: [Botryotinia fuckeliana B05.10] gi|150854700|gb|EDN29892.1| [Botryotinia fuckeliana B05.10]
  misc_feature (1)..(225): NCBI GI: 212527440 Blast Desc: PMAA_022410 [Penicillium marneffei ATCC 18224] gi|210073275|gb|EEA27362.1| PMAA_022410 [Penicillium marneffei ATCC 18224]
  misc_feature (1)..(225): NCBI GI: 242783744 Blast Desc: TSTA_030770 [Talaromyces stipitatus ATCC 10500] gi|218720395|gb|EED19814.1| TSTA_030770 [Talaromyces stipitatus ATCC 10500]
  misc_feature (86)..(225): NCBI GI: 145236188 Blast Desc: protein product [Aspergillus niger] gi|134075193|emb|CAK96506.1| protein product [Aspergillus niger]
  misc_feature (44)..(225): NCBI GI: 145253116 Blast Desc: An16g07720 [Aspergillus niger] gi|134083629|emb|CAL00544.1| protein product [Aspergillus niger]
  misc_feature (1)..(207): NCBI GI: 156059979 Blast Desc: [Sclerotinia sclerotiorum 1980] gi|154699536|gb|EDN99274.1| [Sclerotinia sclerotiorum 1980]
  misc_feature (85)..(218): NCBI GI: 242217203 Blast Desc: [Postia placenta Mad-698-R] gi|220726445|gb|EED80394.1| [Postia placenta Mad-698-R]
  misc_feature (114)..(220): NCBI GI: 240277352 Blast Desc: conserved [Ajellomyces capsulatus H143]
  misc_feature: Useful for introducing or modulating the production of volatile compounds
MSPAAPKPTNFTLLFTFLLLLISLFVFFTANSPSNPLYGSWPSPPPCVCEQHSASGHDASTTTPPSAHLEAFRARPELEDMTQVGDAAWSTISSTKQGGFLWVRYNDTYRTGHGVTMFHALHCLSMIRDMIKVSEGRPAAHSHSLESGIRGAKSEHEMHIGHCLSYIAQSLLCSADGTLERPRTYTDDAGNVLRDDIDGEDIKHQCKSAIYLREKIEQTEQRPLDSLPELEEGATMWSLFDALN

SEQ ID NO: 33650 - DNA, 603 bp, Muscodor strobelii
  misc_feature: SGI cDNA ID NO. 571612
  misc_feature: Elevated expression when VOC is produced
  misc_feature: Encodes the peptide sequence at SEQ ID NO 33651
atgtctcgcctcctgcagacgggcgtcttggtgctctctctgaccagtaatctgggctggattctgacgctttggtctatgccatcgagatccgtgggtattaatgagtatccgccttacaagactattcataccgcagtgtttcaagacacgacctacggcaacatgggcgcggagaagctgcatgcagactctctttggagaggtctctttccttctggcaatggcctggtatcaataagagaattagaccgcgaagcgcatagcctttcacaaacatggcctgatccggacacccctggtaacggcctctatttcatggcagggtatcataacttgcactgtttggctaagattcgaacctcgatctttcaatctcaagcgcaggagaaccagagcgagccatgggcgcatctatggcattgcattgatcagatcaggcagacgattatgtgcaatattgacacgacattggtgcccatgagtgggccaaaggagttcatagatgggcactttcatgtctgtaaagattaccgcgatgtgttcgagtgggcgactgagcaccgacccgtggtcgcgccggaagacgaagaagcagaataa

SEQ ID NO: 33651 - protein, 200 aa, Muscodor strobelii
  misc_feature: SGI Peptide ID NO. 571612
  misc_feature (64)..(188): NCBI GI: 212531897 Blast Desc: conserved [Penicillium marneffei ATCC 18224] gi|210071469|gb|EEA25558.1| conserved [Penicillium marneffei ATCC 18224]
  misc_feature (64)..(187): NCBI GI: 242774252 Blast Desc: conserved [Talaromyces stipitatus ATCC 10500] gi|218722023|gb|EED21441.1| conserved [Talaromyces stipitatus ATCC 10500]
  misc_feature (36)..(189): NCBI GI: 164425482 Blast Desc: NCU05766 [Neurospora crassa OR74A] gi|157070942|gb|EAA30505.2| conserved [Neurospora crassa OR74A]
  misc_feature (2)..(187): NCBI GI: 169620792 Blast Desc: SNOG_13602 [Phaeosphaeria nodorum SN15] gi|111057929|gb|EAT79049.1| SNOG_13602 [Phaeosphaeria nodorum SN15]
  misc_feature (46)..(189): NCBI GI: 121712355 Blast Desc: conserved [Aspergillus clavatus NRRL 1] gi|119401941|gb|EAW12363.1| conserved [Aspergillus clavatus NRRL 1]
  misc_feature (4)..(187): NCBI GI: 169611622 Blast Desc: SNOG_08926 [Phaeosphaeria nodorum SN15] gi|111062974|gb|EAT84094.1| SNOG_08926 [Phaeosphaeria nodorum SN15]
  misc_feature (9)..(188): NCBI GI: 115401080 Blast Desc: [Aspergillus terreus NIH2624] gi|114190069|gb|EAU31769.1| [Aspergillus terreus NIH2624]
  misc_feature (55)..(188): NCBI GI: 156051644 Blast Desc: SS1G_07229 [Sclerotinia sclerotiorum 1980] gi|154705007|gb|EDO04746.1| SS1G_07229 [Sclerotinia sclerotiorum 1980]
  misc_feature (50)..(189): NCBI GI: 39972493 Blast Desc: [Magnaporthe grisea 70-15] gi|145016745|gb|EDK01175.1| [Magnaporthe grisea 70-15]
  misc_feature (64)..(157): NCBI GI: 154322324 Blast Desc: [Botryotinia fuckeliana B05.10] gi|150850556|gb|EDN25749.1| [Botryotinia fuckeliana B05.10]
  misc_feature: Useful for introducing or modulating the production of volatile compounds
MSRLLQTGVLVLSLTSNLGWILTLWSMPSRSVGINEYPPYKTIHTAVFQDTTYGNMGAEKLHADSLWRGLFPSGNGLVSIRELDREAHSLSQTWPDPDTPGNGLYFMAGYHNLHCLAKIRTSIFQSQAQENQSEPWAHLWHCIDQIRQTIMCNIDTTLVPMSGPKEFIDGHFHVCKDYRDVFEWATEHRPVVAPEDEEAE

SEQ ID NO: 33652 - DNA, 1297 bp, Muscodor strobelii
  misc_feature: SGI EST ID NO. CUFF.79486.0
  misc_feature: Variant of the nucleotide sequence at SEQ ID NO 33650
ccgacctgcggcgtggtaccctctcgatccgaagatgctgagatattggagacgcattatcgttttcaacacaactcgcagttttgtgcatcgatcgggggcctgttcgagcgcaaatattaggcaatattacctagggggtcgcccttctataacagtcgtatcatagtagttccctgtgacgatgtttgggggttctggcgatgctcatcttccttctgtctcgtttcctgaggtgttccctcatatcacaacatcaggaaaaccatttgaagattctgtctaggaaaggtcggaaggccccctcctccacgacatgaagtacagccaagtgccaaagtcagagtcgctggaatgtcgtgaatccgaatggccaccggctcctcaaaatcggcaatacaaaatgtctcgcctcctgcagacgggcgtcttggtgctctctctgaccagtaatctgggctggattctgacgctttggtctatgccatcgagatccgtgggtattaatgagtatccgccttacaagactattcataccgcagtgtttcaagacacgacctacggcaacatgggcgcggagaagctgcatgcagactctctttggagaggtctctttccttctggcaatggcctggtatcaataagagaattagaccgcgaagcgcatagcctttcacaaacatggcctgatccggacacccctggtaacggcctctatttcatggcagggtatcataacttgcactgtttggctaagattcgaacctcgatctttcaatctcaagcgcaggagaaccagagcgagccatgggcgcatctatggcattgcattgatcagatcaggcagacgattatgtgcaatattgacacgacattggtgcccatgagtgggccaaaggagttcatagatgggcactttcatgtctgtaaagattaccgcgatgtgttcgagtgggcgactgagcaccgacccgtggtcgcgccggaagacgaagaagcagaataatagtgaagtagggtctcaggtcatcgtgtagcggaagtgcgatgtttgtgaggtgcttacattttactgatcaatcgtcgttggtcaaagttagctatatagtatcagtgtgttgccagattttgcccatcaatccatccaccgccatgatcaaccaactcgttgtttcctctgcaccccgggtacatctttgagtattggtgttgagaggagggtctcggtatgttgcatcttggtacgtgtcttgctcatatgtacctaggtagcgtagtgtcctgttggcgatttgtg

SEQ ID NO: 33653 - DNA, 243 bp, Muscodor strobelii
  misc_feature: SGI cDNA ID NO. 571613
  misc_feature: Elevated expression when VOC is produced
  misc_feature: Encodes the peptide sequence at SEQ ID NO 33654
atgtctgtcttgtttgttcttgctgtggtctacaccaacctacacgcagcccctttggcccttcccaaacctgcgactgacgatacccttcgatctctcattgagccaagcgctgcttacgtccacggctcctacggctatgacaagcgtacccccgagactgacgacactctcggatctctcattgagccaagcgctgcttacgtccacggctcatacggctacgacaagcgtgacgagtag

SEQ ID NO: 33654 - protein, 80 aa, Muscodor strobelii
  misc_feature: SGI Peptide ID NO. 571613
  misc_feature: Useful for introducing or modulating the production of volatile compounds
MSVLFVLAVVYTNLHAAPLALPKPATDDTLRSLIEPSAAYVHGSYGYDKRTPETDDTLGSLIEPSAAYVHGSYGYDKRDE

SEQ ID NO: 33655 - DNA, 935 bp, Muscodor strobelii
  misc_feature: SGI EST ID NO. CUFF.79488.0
  misc_feature: Variant of the nucleotide sequence at SEQ ID NO 33653
cgttcgatgaggccggctcattctcccaatgtggtcatatcgctgccagacggtgaggtgggaaaaggaagtcttgttcgtcagcatgcagtattgccccatgtgaaggccgtccgttggtctatcgtgacctaatgtgttcccatacacaggaggctgatcctccacttgtgtattgcagcagaagttcgacctcatctataaagtaggcatgaagctggtcgtctccagtttcccaccatcactgcttgccatcactgcttctcattactcactgcttgccatcactgcttctcattactcactgcttgccatcactgcttctcattactccttcccatccaaagattctctcagcaacaatggctttcaagatgtctgtcttgtttgttcttgctgtggtctacaccaacctacacgcagcccctttggcccttcccaaacctgcgactgacgatacccttcgatctctcattgagccaagcgctgcttacgtccacggctcctacggctatgacaagcgtacccccgagactgacgacactctcggatctctcattgagccaagcgctgcttacgtccacggctcatacggctacgacaagcgtgacgagtagttccgcccgtcgttgtgaggaaacgcacacttacatttatgcttcgaagtgggcggtggattcgtctgagaaaaaaaatatatcaagtagggatctgggaccgcgggaccgcgggtatgacttggttgactattggcccgtggggggctacctgttatcattggtttgtagaaccttgaatataccatgtaactggaatcaaaagaaggatttcctctcatcctttgtctgcagcgctttcctatagtagaccaaaagttgtggagccccctcagatctgtccaaccattgacgcgaacgaagtgacttgaagtgcgg

SEQ ID NO: 33656 - DNA, 1311 bp, Muscodor strobelii
  misc_feature: SGI cDNA ID NO. 571614
  misc_feature: Reduced expression when VOC is produced
  misc_feature: Encodes the peptide sequence at SEQ ID NO 33657
atgggtcgcagcaagctcaagactgctttgaaagcagagaagggtgtcgatatcaagaagctcaaattaaagagaaagcagaaagagaagaccgctattaagaagaaaaacggaacctacgtcccaccaaagaaacccgagcctgaggaggatgacgacgaagacgacgatgaggacgaggaagatgaaggcgacgatggcggtgcattgatcgctgcggaagagagcggcgacagcgaagagaacgaggaggatgaagaaaaagcagcaggtttcgacatagcagctctcgatgagagcagcagcgacgagtcaatcgacttcgaagagaagatcgtgcgacccaagaaagccaacccgacagccaatggcaccaccacagctcccgtccctacaccaaaacctgccaagaaagccgaagccacagaagactcagatgaggatgaggacgacgaggaagaagacgaagaggaggatgagatcgattgggacgaggtcccagaagaagagcgcgaagatctcgtcccccgcacccgcctcagcatcaacaataccaacggcctcctcacctcactcaagcgcttctccatacccaccgacgacagcgtcgccttctccacacaccagagcataacatccgtaacgaccaccgcaaacgccattggcgacgatattatggacgatatcaagcgcgagcttgccttctacgcacaatccctcgacgctgcaaagcgcgcacgaatcttactgaagggagaaggtgtccctttctcaagaccgacggactacttcgccgagatggtcaaggacgatggacatatggagaaggttaaggccaagctcattgaggatgccagcgcaaagaaggcgagcgccgaagcccggaaattgcgcgacctgaagaagttcggcaagcaagtgcaggttgccaagcttcaggagcgtgctaaggagaagagggagacgttggagaagatcaagacgctcaagaggaagcgatccgagacctcagggggtgacctgggaaccaacgaggctgacatcttcgacgtcggcgtcgacaacgaactgcagaaatataagccgcgcgcaggccaatcacaatctcgcggtggcgtcaacacgaaacgccagaagaagaatgagaagtatggctttggtggcaagaagcgaaattcaaagtcaggagatgctatgagttcgggtgacatgagtgggtttagcacaaagaggatgaagagcggtgcgaagggcaagacaatgaagacggcgagattggggaagagtagacggaatgctgggaagcggtag

SEQ ID NO: 33657 - protein, 436 aa, Muscodor strobelii
  misc_feature: SGI Peptide ID NO. 571614
  misc_feature (137)..(436): Pfam Id: PF05890 Pfam Desc: Eukaryotic rRNA processing protein EBP2
  misc_feature (208)..(436): Pfam Id: PF05890 Pfam Desc: Eukaryotic rRNA processing protein EBP2
  misc_feature (162)..(433): NCBI GI: 256730888 Blast Desc: NECHADRAFT_48982 [Nectria haematococca mpVI 77-13-4]
  misc_feature (174)..(431): NCBI GI: 46126159 Blast Desc: FG07457.1 [Gibberella zeae PH-1]
  misc_feature (1)..(433): NCBI GI: 261351491 Blast Desc: Ebp2p [Verticillium albo-atrum VaMs.102]
  misc_feature (162)..(433): NCBI GI: 39968721 Blast Desc: MGG_02453 [Magnaporthe grisea 70-15] gi|145013943|gb|EDJ98584.1| MGG_02453 [Magnaporthe grisea 70-15]
  misc_feature (175)..(434): NCBI GI: 85099358 Blast Desc: NCU01257 [Neurospora crassa OR74A] gi|28922297|gb|EAA31538.1| NCU01257 [Neurospora crassa OR74A] gi|28950311|emb|CAD70841.1| related to rRNA processing protein
  misc_feature (174)..(436): NCBI GI: 156041154 Blast Desc: SS1G_11556 [Sclerotinia sclerotiorum 1980] gi|154695939|gb|EDN95677.1| SS1G_11556 [Sclerotinia sclerotiorum 1980]
  misc_feature (162)..(428): NCBI GI: 169613719 Blast Desc: SNOG_09992 [Phaeosphaeria nodorum SN15] gi|111061207|gb|EAT82327.1| SNOG_09992 [Phaeosphaeria nodorum SN15]
  misc_feature (139)..(436): NCBI GI: 240106867 Blast Desc: Eukaryotic rRNA processing protein EBP2 containing protein [Coccidioides posadasii C735 delta SOWgp]
  misc_feature (161)..(435): NCBI GI: 242777201 Blast Desc: rRNA processing protein (Ebp2), [Talaromyces stipitatus ATCC 10500] gi|218722605|gb|EED22023.1| rRNA processing protein (Ebp2), [Talaromyces stipitatus ATCC 10500]
  misc_feature (153)..(436): NCBI GI: 119174542 Blast Desc: CIMG_09253 [Coccidioides immitis RS]
  misc_feature: Useful for introducing or modulating the production of volatile compounds
MGRSKLKTALKAEKGVDIKKLKLKRKQKEKTAIKKKNGTYVPPKKPEPEEDDDEDDDEDEEDEGDDGGALIAAEESGDSEENEEDEEKAAGFDIAALDESSSDESIDFEEKIVRPKKANPTANGTTTAPVPTPKPAKKAEATEDSDEDEDDEEEDEEEDEIDWDEVPEEEREDLVPRTRLSINNTNGLLTSLKRFSIPTDDSVAFSTHQSITSVTTTANAIGDDIMDDIKRELAFYAQSLDAAKRARILLKGEGVPFSRPTDYFAEMVKDDGHMEKVKAKLIEDASAKKASAEARKLRDLKKFGKQVQVAKLQERAKEKRETLEKIKTLKRKRSETSGGDLGTNEADIFDVGVDNELQKYKPRAGQSQSRGGVNTKRQKKNEKYGFGGKKRNSKSGDAMSSGDMSGFSTKRMKSGAKGKTMKTARLGKSRRNAGKR

SEQ ID NO: 33658 - DNA, 1633 bp, Muscodor strobelii
  misc_feature: SGI EST ID NO. CUFF.79535.0
  misc_feature: Variant of the nucleotide sequence at SEQ ID NO 33656
aaaagttccaagggtccgacatcccaccttatcacctccggtcgctcaccacacacaacatcgcgcacgatgggtcgcagcaagctcaagactgctttgaaagcagagaagggtgtcgatatcaagaagctcaaattaaagagaaagcagaaagagaagaccgctattaagaagaaaaacggaacctacgtcccaccaaagaaacccgagcctgaggaggatgacgacgaagacgacgatgaggacgaggaagatgaaggcgacgatggcggtgcattgatcgctgcggaagagagcggcgacagcgaagagaacgaggaggatgaagaaaaagcagcaggtttcgacatagcagctctcgatgagagcagcagcgacgagtcaatcgacttcgaagagaagatcgtgcgacccaagaaagccaacccgacagccaatggcaccaccacagctcccgtccctacaccaaaacctgccaagaaagccgaagccacagaagactcagatgaggatgaggacgacgaggaagaagacgaagaggaggatgagatcgattgggacgaggtcccagaagaagagcgcgaagatctcgtcccccgcacccgcctcagcatcaacaataccaacggcctcctcacctcactcaagcgcttctccatacccaccgacgacagcgtcgccttctccacacaccagagcataacatccgtaacgaccaccgcaaacgccattggcgacgatattatggacgatatcaagcgcgagcttgccttctacgcacaatccctcgacgctgcaaagcgcgcacgaatcttactgaagggagaaggtgtccctttctcaagaccgacggactacttcgccgagatggtcaaggacgatggacatatggagaaggttaaggccaagctcattgaggatgccagcgcaaagaaggcgagcgccgaagcccggaaattgcgcgacctgaagaagttcggcaagcaagtgcaggttgccaagcttcaggagcgtgctaaggagaagagggagacgttggagaagatcaagacgctcaagaggaagcgatccgagacctcagggggtgacctgggaaccaacgaggctgacatcttcgacgtcggcgtcgacaacgaactgcagaaatataagccgcgcgcaggccaatcacaatctcgcggtggcgtcaacacgaaacgccagaagaagaatgagaagtatggctttggtggcaagaagcgaaattcaaagtcaggagatgctatgagttcgggtgacatgagtgggtttagcacaaagaggatgaagagcggtgcgaagggcaagacaatgaagacggcgagattggggaagagtagacggaatgctgggaagcggtagcctgctgtgtaggcaaggggaaggacgaagggcgacaggcatagagagatatgtggcgttcaaaaggcgataccttggtcattctgtatgagtatactgagacgcatcctttcactagttgtgagaacaatgccgaagtgaatactgggttaatgaactgctacggctttattatactgctaacttatacaaacaagcaaagtcagggcgtgcgctgatgatctagctgtcacccactcgcgatgtcatgttc

SEQ ID NO: 33659 - DNA, 6024 bp, Muscodor strobelii
  misc_feature: SGI cDNA ID NO. 571615
  misc_feature: Reduced expression when VOC is produced
  misc_feature: Encodes the peptide sequence at SEQ ID NO 33660
atgcctctcgcccggtccggtacgcaaagggctccgaatggggccccaaggcagaagaaagaatataaagatgtggagcagacgatgaagcagctgtatcctactgacaagcagcaaaacgtcgttccggagatagacattgttttggtgcctgggcttggagctgatccggaaaaaagttgggtatctgagagtaccaagtttaattggacaacagaggcgctacgcaatgatttcccgaaatcaaggttgctgctatacaagtatcagtcagcatggaccggatcgttacaagtccagcagtttatggaaaatatcgccaatggactactcacaagtctacagagtgtccggaagaaatgtcaaagacgaccgatcgtgttcattgggcacagtatgggtggtctagtcattgcgaaagcgattactatcgccgacaaacgtcggcgcgacaaattccccatcatgtttgaagcgatagctgcagcagttttcttcggaacaccatttaatggagctccggttgcttcggtggctgctatgtatgcttacgctgcggaacagattgggacggcaacttcatcgaaactattagatttaatgaagccaggagacgagagtctccgagagctgaagcatgagtttatgcgcctggtaggaaagctgacgccaaagatcgaactcttctgcttctacgaagagcagccgacagactggtcgaaaatggctggattgccaagtctctttggtctgacaaagctcgctattccaaaagcctatgctgaattcgtcaatcgagactcggcgacgctgccaggtgttgatgagctaggccttgcttgtacccatcgtgatcttgtcaaattcgacggacacaaagatccgagatggagtcaattcgtccgtgagcctttgaggagggttgttctcggggcacagcttgcggtcaagaatcgtatgaactctgtgcgtgatatcgatagtacgatgattaaaaagatcatggacgccctagagggaggagttactatggcagcaaggaggaataccctccggcaaacatttgctccctcttcgtggataaccaaagaaaacgagtatatcgattggctagctgagaagcgcaaagtaggggaaggcgaggaaatccgtgttggagactgcctctggattcgtggcccggaaggacggggcaagacgagtgcagctatggcagcagtcgaagaaatcgagactctcatacgagtgaacgaagagaaatcttcgggcgaagatccaattctacttgcttatttcttctgtgatacaacgccagacttcaacaccgcagaggacgttttgaaatcctttgtcaggcagcttatcaatcaacaagagaccttggctccatatgcgaaggtgtttgcgaagaagaaggggaatgaagccggaaaatcacaggctcaagtcaccgttgagaacctgtggaacacgctacaggacatggtcgcagacgaatttgcaggaagcaaggtgatcttcgtcttgaataacctacacgctttacctgaagactcggactcaaccatcaagctgatgaagtatctcaactcggaacttcaatatttgaacagtgaagataccaagcgtgtacctacaaggtggctgatcacaagcagggaggcctacaacgtcgaaacggccttgaaagttgacaatgttcgactcgtcgatctcaaagacgacaaatacggcgatcaagtacaaatggcgctgcgaaagcacgcgaaagacagagtcgcaacactcgagcaggagaagaagtacaacaaggcactagcatacttcgcgagtagtttgattggtagacgggctcagaacacccaatggatcgatatcacttgtgttcaactagaagagctcccgcccacggaaagcgatctaccagttcggcgtgcattggagactatgccgcaagatctgaaaacactactcaacaaatcctggatgcaggtcttccgatccaatgagcagcatgccgaggcaattagagagatgctacgtgcgctcgttcttacgtatgaggacccgagcgaagaagagttgggtgtcctcgcaggattgtgctcaaacgagcaagaaaaagaggaattgcatggattgatagaatgttgcaagccgttgctctctatcaacgaagatgacacaatcagtttcatcaatgtctttgtcaagactcatctgctggaaaacgcaaaagagctgctcgggctttcagaagaggaaatcaagtggcaacatggcgttcttgctttgagagcattctctcacctcagagagaaatttgactttgatccaacgccagaaggggccgaggagtcaaaagagggcgaaggcgaaaacgcagaaaacgcggagaatgcagatggtggatcagctgctggcgatggcgagcaagacaacgcttcgaatgccgacgacaatgaaagcgaaaaccaggatgacggcgatgatgaggatggaagcgaaggggacgacgatgacgatgaagaggaggaggaggaagaagaggaagatgagtatgactacgatgaggagagtgaaaacgacgaagaatacgagtataaggcgctgccatacactatcaagcattggctccgacatgcctcgaaagcaacactcgaaatcgccgaagatctgagtctagaagaagacttctggaaccccgattcgcgaattaggcgcaactggctcgaagactatacccacgccatgccgaccttcagtgattttgaccatataacactgaccgggcttcatatcgctgcttcgataggatttcgacagcttgtcgcggcactcatccgcaatggacacgaggaagagatcaagattcgtgattctttgataaacacgccacttcacttcgccgccaactttggccgtccaaagattgtcgaagaacttttgaaccatggcgcagtgatcgacgatggtatcgaaatttcggaacaaacgccactgcacatggcggcctttggtggacatattgaggtgatgaagaaactggtactcagaggtgcaaatcccaacgccacttccaatgatatcggccctgtcgtcaacgctgccatttcatccgggaaccgagctgctgttgagttacttgtggaaaacggcgtctccttgacggtcgacagagagggaatcgaagcaccactcgctctagcggctttactttcagacgtgtccatgtttgaatacctcgttgagaagtataaactgcctcctgtggaatactccaaagccctggtaaaagcagcagaagcaggaagaattgaagttttcaacaaattgctagagttccagcatagccaacaatactgtcaagacgcactcaatgaggcagttgaggagtggaattgggacattgtcacggtcatcctcgagagataccccggactcgactgcaatacattgttctacactgcagctacgtgttcggagcctcaagacaaaatggtcgagctggcctgggattatgccaatggctcgataacgtccgacacattaaacaagtcattgtacgatgctacagaccgagaaaaggataccacagtacagctgctgctcgagaaattccatgctaacccaaacgcaacgggcgaagaatttggaaatgccctgactgcagcggcgtacgatggcactatagaaattgtcaaaatgttactagatgctggcgctaacgtcaatgcaccagagggatacgcattgcaatcggctgcatcaatggggcattacgatgttgtcgaagagctactccgacggcacgcagatgtaaatgccctaacgacccgagaggatttcacggctggcacggcactacaagcagcatgcgaggcaagccgagtagatattgtacggctgttgctcgaaagtggcgcggatcctaaccacggggccggagaggatgcccctccagttgttgctgctgcattgcacgcagaggaagagatacttgagcttctcgtacaaaggaggcccaagctagatgtcttcggaggatgggatcactcctcaccactgatcaatgccgctgccttcatgcccgtatcgtctctcaagctcctcttagatgcaggcgcagacatcaatcttcaagataatgacggcgatacagcactcatcgttgcttcatctagaggagataaggaggcagttgagttcttgctcaataacggcgctgatatcatgcactcgagttctaggaacgagaatgcactccaagccgcaatgacacaagataaccatgaatgcttggaagtgctggtcgaacatgtctcggtactctttaccgcacttaagaagtccatggacgcaggcaaccctgatgttacgagcgtcgtccgctcagccacgactaaacagcaaggccttgattacggtgacgatgagcctcgtgcaaacaaccgtcaggtgaacaatagcgaatccaacgtgagcgtcaacggcgcgggcaacaggtcgttagatcagaacggcattgctaatgacgtcaacggcaaatcccatgaggcgcatgtcaacggcgtcagcaacggtgaaaatagccaacgagatgtcggaaatgatcactcagactcagcaggcttctccgaagccatgtcatcagtgttctcgatgttcagcaggaaaaagaacgaccagccgacggatgaggagcagactccgcaagacgaattcccttcgtaccacgaggcaactcttgcggccctagagcaacatgattctggggataacacgccagaagctcaaagaggagcagaggacatggataatagcagtgaaccagatcacgacttccgaagccaatctcccaccgaagtacccacggacgacgatactgacgttgcctcttctacacatgaagatgaagacgacgatgaccaagcaagcagaacgggccgtagtctccatgatgagccatattatgaggagccatactctatggaccatctttcccaagcattagacagtggaatcaggcgcctgagctcttttgggcagcctaacgaggaagaagcgaatcgccattcttataccgaggagaatcgttctgtcgaccacgagccgcagccagagcccgagccaaaggggaagcaaccagcagagctctcgagtgaagaccatgccgaacaatacaacccgagcccaccctctgagcttctaaatcaaggcattccaaagagaaagcctgcacctctcgcgcccctagccccatataacggcgctggttcgtcctacaacgaagatcccaacccgaagactgctgagatcaggtatcaagctcagccaacgccaccgaatggcggctatgaccaagatacgccgactcagccgtatcaccctcgactagacggcccaagctatcaggcacagcagagtgctcaagcacctacctcggtcccaagctcgcagacgcaacaagtatcgccaccatcgtcttcctatcacgcataccagccaagcacatcctcccaagccacgggctcgtcctcgacagattaccaacagcaacaatctcagacacaagcacaagggcaataccaaaacacctccctatacgatgggtcgcactacgacggctcccactacggcaacaccgagatgcacttctccaatccttcccaacagcaacaatcttacgcggcgtaccatccggacgactatcgctacatgcagcagcaacagcaacaacaacaatatacacctgagcagctacaagcgtatcaaaaccagcagcaatatttctcccaggatcagtaccagaactactataacagtctcaacgtagcgcagcagcaaaagatgcaacaggagcaacaacgaagacaggagatgatgcaacaacaacagcagcagccgcaagggcagagctgggaggctccgcagttgaagacgaggacgagttctttctttacgaataatgttaagaatacttttgataaggctaagattagtggctttctgagccggaagtaa

SEQ ID NO: 33660 - protein, 2007 aa, Muscodor strobelii
  misc_feature: SGI Peptide ID NO. 571615
  misc_feature (996)..(1028): Pfam Id: PF00023 Pfam Desc: Ankyrin repeat
  misc_feature (1384)..(1416): Pfam Id: PF00023 Pfam Desc: Ankyrin repeat
  misc_feature (1251)..(1279): Pfam Id: PF00023 Pfam Desc: Ankyrin repeat
  misc_feature (964)..(994): Pfam Id: PF00023 Pfam Desc: Ankyrin repeat
  misc_feature (1351)..(1383): Pfam Id: PF00023 Pfam Desc: Ankyrin repeat
  misc_feature (1221)..(1249): Pfam Id: PF00023 Pfam Desc: Ankyrin repeat
  misc_feature (1287)..(1316): Pfam Id: PF00023 Pfam Desc: Ankyrin repeat
  misc_feature (1)..(1480): NCBI GI: 46115670 Blast Desc: FG03677.1 [Gibberella zeae PH-1]
  misc_feature (332)..(1437): NCBI GI: 171684051 Blast Desc: protein product [Podospora anserina] gi|170941986|emb|CAP67638.1| protein product [Podospora anserina]
  misc_feature (293)..(1438): NCBI GI: 116178952 Blast Desc: CHGG_00104 [Chaetomium globosum CBS 148.51] gi|88184401|gb|EAQ91869.1| CHGG_00104 [Chaetomium globosum CBS 148.51]
  misc_feature (223)..(1113): NCBI GI: 169600291 Blast Desc: SNOG_02976 [Phaeosphaeria nodorum SN15] gi|160705411|gb|EAT89707.2| SNOG_02976 [Phaeosphaeria nodorum SN15]
  misc_feature (862)..(1484): NCBI GI: 242760147 Blast Desc: Pfs, NACHT and Ankyrin domain protein [Talaromyces stipitatus ATCC 10500] gi|218723125|gb|EED22542.1| Pfs, NACHT and Ankyrin domain protein [Talaromyces stipitatus ATCC 10500]
  misc_feature (932)..(1439): NCBI GI: 116208038 Blast Desc: CHGG_03312 [Chaetomium globosum CBS 148.51] gi|88183909|gb|EAQ91377.1| CHGG_03312 [Chaetomium globosum CBS 148.51]
  misc_feature (966)..(1439): NCBI GI: 242816359 Blast Desc: multiple ankyrin repeats single kh domain protein, [Talaromyces stipitatus ATCC 10500] gi|218715100|gb|EED14523.1| multiple ankyrin repeats single kh domain protein, [Talaromyces
  misc_feature (932)..(1440): NCBI GI: 242816359 Blast Desc: multiple ankyrin repeats single kh domain protein, [Talaromyces stipitatus ATCC 10500] gi|218715100|gb|EED14523.1| multiple ankyrin repeats single kh domain protein, [Talaromyces
  misc_feature (900)..(1439): NCBI GI: 242816359 Blast Desc: multiple ankyrin repeats single kh domain protein, [Talaromyces stipitatus ATCC 10500] gi|218715100|gb|EED14523.1| multiple ankyrin repeats single kh domain protein, [Talaromyces
  misc_feature (935)..(1439): NCBI GI: 242760147 Blast Desc: Pfs, NACHT and Ankyrin domain protein [Talaromyces stipitatus ATCC 10500] gi|218723125|gb|EED22542.1| Pfs, NACHT and Ankyrin domain protein [Talaromyces stipitatus ATCC 10500]
  misc_feature: Useful for introducing or modulating the production of volatile compounds
MPLARSGTQRAPNGAPRQKKEYKDVEQTMKQLYPTDKQQNVVPEIDIVLVPGLGADPEKSWVSESTKFNWTTEALRNDFPKSRLLLYKYQSAWTGSLQVQQFMENIANGLLTSLQSVRKKCQRRPIVFIGHSMGGLVIAKAITIADKRRRDKFPIMFEAIAAAVFFGTPFNGAPVASVAAMYAYAAEQIGTATSSKLLDLMKPGDESLRELKHEFMRLVGKLTPKIELFCFYEEQPTDWSKMAGLPSLFGLTKLAIPKAYAEFVNRDSATLPGVDELGLACTHRDLVKFDGHKDPRWSQFVREPLRRVVLGAQLAVKNRMNSVRDIDSTMIKKIMDALEGGVTMAARRNTLRQTFAPSSWITKENEYIDWLAEKRKVGEGEEIRVGDCLWIRGPEGRGKTSAAMAAVEEIETLIRVNEEKSSGEDPILLAYFFCDTTPDFNTAEDVLKSFVRQLINQQETLAPYAKVFAKKKGNEAGKSQAQVTVENLWNTLQDMVADEFAGSKVIFVLNNLHALPEDSDSTIKLMKYLNSELQYLNSEDTKRVPTRWLITSREAYNVETALKVDNVRLVDLKDDKYGDQVQMALRKHAKDRVATLEQEKKYNKALAYFASSLIGRRAQNTQWIDITCVQLEELPPTESDLPVRRALETMPQDLKTLLNKSWMQVFRSNEQHAEAIREMLRALVLTYEDPSEEELGVLAGLCSNEQEKEELHGLIECCKPLLSINEDDTISFINVFVKTHLLENAKELLGLSEEEIKWQHGVLALRAFSHLREKFDFDPTPEGAEESKEGEGENAENAENADGGSAAGDGEQDNASNADDNESENQDDGDDEDGSEGDDDDDEEEEEEEEEDEYDYDEESENDEEYEYKALPYTIKHWLRHASKATLEIAEDLSLEEDFWNPDSRIRRNWLEDYTHAMPTFSDFDHITLTGLHIAASIGFRQLVAALIRNGHEEEIKIRDSLINTPLHFAANFGRPKIVEELLNHGAVIDDGIEISEQTPLHMAAFGGHIEVMKKLVLRGANPNATSNDIGPVVNAAISSGNRAAVELLVENGVSLTVDREGIEAPLALAALLSDVSMFEYLVEKYKLPPVEYSKALVKAAEAGRIEVFNKLLEFQHSQQYCQDALNEAVEEWNWDIVTVILERYPGLDCNTLFYTAATCSEPQDKMVELAWDYANGSITSDTLNKSLYDATDREKDTTVQLLLEKFHANPNATGEEFGNALTAAAYDGTIEIVKMLLDAGANVNAPEGYALQSAASMGHYDVVEELLRRHADVNALTTREDFTAGTALQAACEASRVDIVRLLLESGADPNHGAGEDAPPVVAAALHAEEEILELLVQRRPKLDVFGGWDHSSPLINAAAFMPVSSLKLLLDAGADINLQDNDGDTALIVASSRGDKEAVEFLLNNGADIMHSSSRNENALQAAMTQDNHECLEVLVEHVSVLFTALKKSMDAGNPDVTSVVRSATTKQQGLDYGDDEPRANNRQVNNSESNVSVNGAGNRSLDQNGIANDVNGKSHEAHVNGVSNGENSQRDVGNDHSDSAGFSEAMSSVFSMFSRKKNDQPTDEEQTPQDEFPSYHEATLAALEQHDSGDNTPEAQRGAEDMDNSSEPDHDFRSQSPTEVPTDDDTDVASSTHEDEDDDDQASRTGRSLHDEPYYEEPYSMDHLSQALDSGIRRLSSFGQPNEEEANRHSYTEENRSVDHEPQPEPEPKGKQPAELSSEDHAEQYNPSPPSELLNQGIPKRKPAPLAPLAPYNGAGSSYNEDPNPKTAEIRYQAQPTPPNGGYDQDTPTQPYHPRLDGPSYQAQQSAQAPTSVPSSQTQQVSPPSSSYHAYQPSTSSQATGSSSTDYQQQQSQTQAQGQYQNTSLYDGSHYDGSHYGNTEMHFSNPSQQQQSYAAYHPDDYRYMQQQQQQQQYTPEQLQAYQNQQQYFSQDQYQNYYNSLNVAQQQKMQQEQQRRQEMMQQQQQQPQGQSWEAPQLKTRTSSFFTNNVKNTFDKAKISGFLSRK

SEQ ID NO: 33661 - DNA, 5897 bp, Muscodor strobelii
  misc_feature: SGI EST ID NO. CUFF.79538.0
  misc_feature: Variant of the nucleotide sequence at SEQ ID NO 33659
caaagacgaccgatcgtgttcattgggcacagtatgggtggtctagtcattgcgaaagcgattactatcgccgacaaacgtcggcgcgacaaattccccatcatgtttgaagcgatagctgcagcagttttcttcggaacaccatttaatggagctccggttgcttcggtggctgctatgtatgcttacgctgcggaacagattgggacggcaacttcatcgaaactattagatttaatgaagccaggagacgagagtctccgagagctgaagcatgagtttatgcgcctggtaggaaagctgacgccaaagatcgaactcttctgcttctacgaagagcagccgacagactggtcgaaaatggctggattgccaagtctctttggtctgacaaagctcgctattccaaaagcctatgctgaattcgtcaatcgagactcggcgacgctgccaggtgttgatgagctaggccttgcttgtacccatcgtgatcttgtcaaattcgacggacacaaagatccgagatggagtcaattcgtccgtgagcctttgaggagggttgttctcggggcacagcttgcggtcaagaatcgtatgaactctgtgcgtgatatcgatagtacgatgattaaaaagatcatggacgccctagagggaggagttactatggcagcaaggaggaataccctccggcaaacatttgctccctcttcgtggataaccaaagaaaacgagtatatcgattggctagctgagaagcgcaaagtaggggaaggcgaggaaatccgtgttggagactgcctctggattcgtggcccggaaggacggggcaagacgagtgcagctatggcagcagtcgaagaaatcgagactctcatacgagtgaacgaagagaaatcttcgggcgaagatccaattctacttgcttatttcttctgtgatacaacgccagacttcaacaccgcagaggacgttttgaaatcctttgtcaggcagcttatcaatcaacaagagaccttggctccatatgcgaaggtgtttgcgaagaagaaggggaatgaagccggaaaatcacaggctcaagtcaccgttgagaacctgtggaacacgctacaggacatggtcgcagacgaatttgcaggaagcaaggtgatcttcgtcttgaataacctacacgctttacctgaagactcggactcaaccatcaagctgatgaagtatctcaactcggaacttcaatatttgaacagtgaagataccaagcgtgtacctacaaggtggctgatcacaagcagggaggcctacaacgtcgaaacggccttgaaagttgacaatgttcgactcgtcgatctcaaagacgacaaatacggcgatcaagtacaaatggcgctgcgaaagcacgcgaaagacagagtcgcaacactcgagcaggagaagaagtacaacaaggcactagcatacttcgcgagtagtttgattggtagacgggctcagaacacccaatggatcgatatcacttgtgttcaactagaagagctcccgcccacggaaagcgatctaccagttcggcgtgcattggagactatgccgcaagatctgaaaacactactcaacaaatcctggatgcaggtcttccgatccaatgagcagcatgccgaggcaattagagagatgctacgtgcgctcgttcttacgtatgaggacccgagcgaagaagagttgggtgtcctcgcaggattgtgctcaaacgagcaagaaaaagaggaattgcatggattgatagaatgttgcaagccgttgctctctatcaacgaagatgacacaatcagtttcatcaatgtctttgtcaagactcatctgctggaaaacgcaaaagagctgctcgggctttcagaagaggaaatcaagtggcaacatggcgttcttgctttgagagcattctctcacctcagagagaaatttgactttgatccaacgccagaaggggccgaggagtcaaaagagggcgaaggcgaaaacgcagaaaacgcggagaatgcagatggtggatcagctgctggcgatggcgagcaagacaacgcttcgaatgccgacgacaatgaaagcgaaaaccaggatgacggcgatgatgaggatggaagcgaaggggacgacgatgacgatgaagaggaggaggaggaagaagaggaagatgagtatgactacgatgaggagagtgaaaacgacgaagaatacgagtataaggcgctgccatacactatcaagcattggctccgacatgcctcgaaagcaacactcgaaatcgccgaagatctgagtctagaagaagacttctggaaccccgattcgcgaattaggcgcaactggctcgaagactatacccacgccatgccgaccttcagtgattttgaccatataacactgaccgggcttcatatcgctgcttcgataggatttcgacagcttgtcgcggcactcatccgcaatggacacgaggaagagatcaagattcgtgattctttgataaacacgccacttcacttcgccgccaactttggccgtccaaagattgtcgaagaacttttgaaccatggcgcagtgatcgacgatggtatcgaaatttcggaacaaacgccactgcacatggcggcctttggtggacatattgaggtgatgaagaaactggtactcagaggtgcaaatcccaacgccacttccaatgatatcggccctgtcgtcaacgctgccatttcatccgggaaccgagctgctgttgagttacttgtggaaaacggcgtctccttgacggtcgacagagagggaatcgaagcaccactcgctctagcggctttactttcagacgtgtccatgtttgaatacctcgttgagaagtataaactgcctcctgtggaatactccaaagccctggtaaaagcagcagaagcaggaagaattgaagttttcaacaaattgctagagttccagcatagccaacaatactgtcaagacgcactcaatgaggcagttgaggagtggaattgggacattgtcacggtcatcctcgagagataccccggactcgactgcaatacattgttctacactgcagctacgtgttcggagcctcaagacaaaatggtcgagctggcctgggattatgccaatggctcgataacgtccgacacattaaacaagtcattgtacgatgctacagaccgagaaaaggataccacagtacagctgctgctcgagaaattccatgctaacccaaacgcaacgggcgaagaatttggaaatgccctgactgcagcggcgtacgatggcactatagaaattgtcaaaatgttactagatgctggcgctaacgtcaatgcaccagagggatacgcattgcaatcggctgcatcaatggggcattacgatgttgtcgaagagctactccgacggcacgcagatgtaaatgccctaacgacccgagaggatttcacggctggcacggcactacaagcagcatgcgaggcaagccgagtagatattgtacggctgttgctcgaaagtggcgcggatcctaaccacggggccggagaggatgcccctccagttgttgctgctgcattgcacgcagaggaagagatacttgagcttctcgtacaaaggaggcccaagctagatgtcttcggaggatgggatcactcctcaccactgatcaatgccgctgccttcatgcccgtatcgtctctcaagctcctcttagatgcaggcgcagacatcaatcttcaagataatgacggcgatacagcactcatcgttgcttcatctagaggagataaggaggcagttgagttcttgctcaataacggcgctgatatcatgcactcgagttctaggaacgagaatgcactccaagccgcaatgacacaagataaccatgaatgcttggaagtgctggtcgaacatgtctcggtactctttaccgcacttaagaagtccatggacgcaggcaaccctgatgttacgagcgtcgtccgctcagccacgactaaacagcaaggccttgattacggtgacgatgagcctcgtgcaaacaaccgtcaggtgaacaatagcgaatccaacgtgagcgtcaacggcgcgggcaacaggtcgttagatcagaacggcattgctaatgacgtcaacggcaaatcccatgaggcgcatgtcaacggcgtcagcaacggtgaaaatagccaacgagatgtcggaaatgatcactcagactcagcaggcttctccgaagccatgtcatcagtgttctcgatgttcagcaggaaaaagaacgaccagccgacggatgaggagcagactccgcaagacgaattcccttcgtaccacgaggcaactcttgcggccctagagcaacatgattctggggataacacgccagaagctcaaagaggagcagaggacatggataatagcagtgaaccagatcacgacttccgaagccaatctcccaccgaagtacccacggacgacgatactgacgttgcctcttctacacatgaagatgaagacgacgatgaccaagcaagcagaacgggccgtagtctccatgatgagccatattatgaggagccatactctatggaccatctttcccaagcattagacagtggaatcaggcgcctgagctcttttgggcagcctaacgaggaagaagcgaatcgccattcttataccgaggagaatcgttctgtcgaccacgagccgcagccagagcccgagccaaaggggaagcaaccagcagagctctcgagtgaagaccatgccgaacaatacaacccgagcccaccctctgagcttctaaatcaaggcattccaaagagaaagcctgcacctctcgcgcccctagccccatataacggcgctggttcgtcctacaacgaagatcccaacccgaagactgctgagatcaggtatcaagctcagccaacgccaccgaatggcggctatgaccaagatacgccgactcagccgtatcaccctcgactagacggcccaagctatcaggcacagcagagtgctcaagcacctacctcggtcccaagctcgcagacgcaacaagtatcgccaccatcgtcttcctatcacgcataccagccaagcacatcctcccaagccacgggctcgtcctcgacagattaccaacagcaacaatctcagacacaagcacaagggcaataccaaaacacctccctatacgatgggtcgcactacgacggctcccactacggcaacaccgagatgcacttctccaatccttcccaacagcaacaatcttacgcggcgtaccatccggacgactatcgctacatgcagcagcaacagcaacaacaacaatatacacctgagcagctacaagcgtatcaaaaccagcagcaatatttctcccaggatcagtaccagaactactataacagtctcaacgtagcgcagcagcaaaagatgcaacaggagcaacaacgaagacaggagatgatgcaacaacaacagcagcagccgcaagggcagagctgggaggctccgcagttgaagacgaggacgagttctttctttacgaataatgttaagaatacttttgataaggctaagattagtggctttctgagccggaagtaaagacaagaatgctgaggaggaggaggggtaatactaatactgtatgaacacaaaggaaaatataacgcagattggatagatggatagggcatgtaagatcaaatgttagaactagaattggaagtgtaatgatatctaagaccttgtagaggttcggcggcctataaatgtcatgatgcacttgtaattctgtctgtcataaacattatagatcaataattttaataaagggacgg

SEQ ID NO: 33662 - DNA, 1047 bp, Muscodor strobelii
  misc_feature: SGI cDNA ID NO. 571616
  misc_feature: Encodes the peptide sequence at SEQ ID NO 33663
atgcgcgagcttcagttacccttcaacaccagggtactcgaagaggaccccgacgagaagcaggcaatacagagatttgggctgaatgccacggcccaacttcccgcatcgcatcgcgcaaagggagatcacatcgtaataccacaagccaactcggacttcctcggagatgagctgcttgtcaagcgcttgaacgccgtacaagactggctatggatatgcgggcgtccaatgccaccgcggcccctgcatcatcaggtagtcgtctcaagagacattaccataacagaaaatccggaactgcatcttgtatggtccaacaacagaatattcctgaaacctctaccatcatggatatttgaccctgatttctggaccgagcatctactgcccgacatcaacctctctcgatgcgctagaggttttctattttcatacactgcgctcatcgcatatcagagcgacttcaacttagctcaagaaaagagcctactacctaaggacctcagttggataggatggaagactctatgcagggagttcttacacaatcatgaccctgccatggtgaatccgagatattggtacggagaactgcggcttggcagactcaacctgatataccgtctgcgcaaaggtttcgtactacgaggctattcgaaagtggccgcccacacgatctacgttgacttgctacgcgacaacttcgctgtcctggcaacggtgctgggttacgtcgtcatcgtgttgacgtccttgcaagtagggctcggcacagacaggctgtatgaagatactgctttccagaattttagctatggtttcaccgtgttcagcatcattgcgcctttgattgctggtgtggggatcttgctcgccgtcttagtcatgttcgtctcaaattggatagtcacaacgaagtatgaagcctcgagattcaaggcaatgggtgttgagccttattggaggaataaaccagggaaggccgtcatggtaccgttgacgaagcatggcgaaatggagtcgaattcaggtaccggtgtatga

SEQ ID NO: 33663 - protein, 348 aa, Muscodor strobelii
  misc_feature: SGI Peptide ID NO. 571616
  misc_feature (7)..(321): NCBI GI: 256724017 Blast Desc: NECHADRAFT_86348 [Nectria haematococca mpVI 77-13-4]
  misc_feature (7)..(319): NCBI GI: 46115668 Blast Desc: FG03676.1 [Gibberella zeae PH-1]
  misc_feature (7)..(325): NCBI GI: 171684055 Blast Desc: protein product [Podospora anserina] gi|170941988|emb|CAP67640.1| protein product [Podospora anserina]
  misc_feature (34)..(308): NCBI GI: 46130706 Blast Desc: FG08957.1 [Gibberella zeae PH-1]
  misc_feature (32)..(319): NCBI GI: 261196804 Blast Desc: conserved [Ajellomyces dermatitidis SLH14081] gi|239596050|gb|EEQ78631.1| conserved [Ajellomyces dermatitidis SLH14081] gi|239609632|gb|EEQ86619.1| conserved [Ajellomyces
  misc_feature (7)..(313): NCBI GI: 225562740 Blast Desc: conserved [Ajellomyces capsulatus G186AR]
  misc_feature (7)..(292): NCBI GI: 145248569 Blast Desc: An13g04030 [Aspergillus niger] gi|134081289|emb|CAK41794.1| protein product [Aspergillus niger]
  misc_feature (13)..(318): NCBI GI: 255941772 Blast Desc: Pc16g13560 [Penicillium chrysogenum Wisconsin 54-1255] gi|211586278|emb|CAP94026.1| Pc16g13560 [Penicillium chrysogenum Wisconsin 54-1255]
  misc_feature (8)..(313): NCBI GI: 145246910 Blast Desc: An12g06470 [Aspergillus niger] gi|134080428|emb|CAK41177.1| protein product [Aspergillus niger]
  misc_feature (53)..(303): NCBI GI: 116178954 Blast Desc: CHGG_00105 [Chaetomium globosum CBS 148.51] gi|88184402|gb|EAQ91870.1| CHGG_00105 [Chaetomium globosum CBS 148.51]
MRELQLPFNTRVLEEDPDEKQAIQRFGLNATAQLPASHRAKGDHIVIPQANSDFLGDELLVKRLNAVQDWLWICGRPMPPRPLHHQVVVSRDITITENPELHLVWSNNRIFLKPLPSWIFDPDFWTEHLLPDINLSRCARGFLFSYTALIAYQSDFNLAQEKSLLPKDLSWIGWKTLCREFLHNHDPAMVNPRYWYGELRLGRLNLIYRLRKGFVLRGYSKVAAHTIYVDLLRDNFAVLATVLGYVVIVLTSLQVGLGTDRLYEDTAFQNFSYGFTVFSIIAPLIAGVGILLAVLVMFVSNWIVTTKYEASRFKAMGVEPYWRNKPGKAVMVPLTKHGEMESNSGTGV

SEQ ID NO: 33664 - DNA, 1576 bp, Muscodor strobelii
  misc_feature: SGI EST ID NO. CUFF.79513.0
  misc_feature: Variant of the nucleotide sequence at SEQ ID NO 33662
cctcaatatctaatcatacggaagactgaacttcatatcagtactcaaactttatcgaaagggaggaaagtgggaaaataagaagagcttacagtactcgaccgcaatgcgcgagcttcagttacccttcaacaccagggtactcgaagaggaccccgacgagaagcaggcaatacagagatttgggctgaatgccacggcccaacttcccgcatcgcatcgcgcaaagggagatcacatcgtaataccacaagccaactcggacttcctcggagatgagctgcttgtcaagcgcttgaacgccgtacaagactggctatggatatgcgggcgtccaatgccaccgcggcccctgcatcatcaggtagtcgtctcaagagacattaccataacagaaaatccggaactgcatcttgtatggtccaacaacagaatattcctgaaacctctaccatcatggatatttgaccctgatttctggaccgagcatctactgcccgacatcaacctctctcgatgcgctagaggttttctattttcatacactgcgctcatcgcatatcagagcgacttcaacttagctcaagaaaagagcctactacctaaggacctcagttggataggatggaagactctatgcagggagttcttacacaatcatgaccctgccatggtgaatccgagatattggtacggagaactgcggcttggcagactcaacctgatataccgtctgcgcaaaggtttcgtactacgaggctattcgaaagtggccgcccacacgatctacgttgacttgctacgcgacaacttcgctgtcctggcaacggtgctgggttacgtcgtcatcgtgttgacgtccttgcaagtagggctcggcacagacaggctgtatgaagatactgctttccagaattttagctatggtttcaccgtgttcagcatcattgcgcctttgattgctggtgtggggatcttgctcgccgtcttagtcatgttcgtctcaaattggatagtcacaacgaagtatgaagcctcgagattcaaggcaatgggtgttgagccttattggaggaataaaccagggaaggccgtcatggtaccgttgacgaagcatggcgaaatggagtcgaattcaggtaccggtgtatgagcagtactttgaccagcacgtgaatgaaggctagctactggcacgattctatcaaattacgaaatagtctagcactagcgcggtactgtcaaaattaatcaactttgcatacacttttgatcaatcaaagacgcgtaaacaagcccgtgactaaaggatgaccagacaagttgctgccgtgtgtctcaagatgatccatcatcacggcctcacaggcactcgcgatcatatgaaagtgcactgcaaaccacgcaagcgtgaactatatgcgtatgctatgtgaactcagctctccatgctacacgatgactaggtagctagcccagtcgccttcaagatataaggccatgatgcgtcctatccttgctgcatcatttctttccatttagcaatagcacacattcagacaacactattcactca

SEQ ID NO: 33665 - DNA, 558 bp, Muscodor strobelii
  misc_feature: SGI cDNA ID NO. 571617
  misc_feature: Encodes the peptide sequence at SEQ ID NO 33666
atgaaggcttacacgctccttgtcttcgccacagtagccttagctatgcccgcttttcaggcgcggggcgacgatagcgaacgcgagctgaaggagccatactttcgcaacctgtttggcgatttccggtgcgatccaccagagttcaatttacggcttgcgaaaaatcacccaaccgaagtttctttcgaagaatgtcaagacctctatcgtcgtgtacgattcgacatagtcggcgagtggcacttgaccacagccaccaagaagggcgacctcagcaactggcatctcttagcgcaggagggcaattgcggagtcttggcgaagaacgaccaaggtccagcagtagtcggcaatggggaccttgctaaggtgttgtatctcatgaaacaatggttcccgaataacaccgacgacagagtcagtcagatgggccagctgccggagtgctcgactaggatgacgcctgatgtgaagaaccctttctggtttctttccagggtaaatgtcacgttctgggtgcgaaataccgaacatctagatggttactacacctag

SEQ ID NO: 33666 - protein, 185 aa, Muscodor strobelii
  misc_feature: SGI Peptide ID NO. 571617
MKAYTLLVFATVALAMPAFQARGDDSERELKEPYFRNLFGDFRCDPPEFNLRLAKNHPTEVSFEECQDLYRRVRFDIVGEWHLTTATKKGDLSNWHLLAQEGNCGVLAKNDQGPAVVGNGDLAKVLYLMKQWFPNNTDDRVSQMGQLPECSTRMTPDVKNPFWFLSRVNVTFWVRNTEHLDGYYT

SEQ ID NO: 33667 - DNA, 495 bp, Muscodor strobelii
  misc_feature: SGI cDNA ID NO. 571618
  misc_feature: Reduced expression when VOC is produced
  misc_feature: Encodes the peptide sequence at SEQ ID NO 33668
atgtctgaccaatcccccatcgcaacgctcgactcaacgctggttgatcgactgccagcctactctaaagccctcttcgatgggaaagctagcaagaagcttagtttcgaggagatcgccaaggagctcggtcgtggtgaggttgctgtagctgccctattctacggccaggcccaagcatctcccgaagacattgacaagctatcaaacctgctaggagtctccaagcatgagctagaagcttcaatgggcggtttccctgatcgcggtcgcgccggtcctatgcctcctgttgaacctctgatctaccgcctgtacgagattgtccagaactacggatatgctttcaaggccgtcatgaacgagaagttcggcgacggcatcatgagtgccatcgcattctcttccaaggttgagaaggaggtagatgagaatggagttgcctgggtgaacatcacgctccgaggcaaatggttgccttatacacgattttaa

SEQ ID NO: 33668 - protein, 164 aa, Muscodor strobelii
  misc_feature: SGI Peptide ID NO. 571618
  misc_feature (91)..(164): Pfam Id: PF02560 Pfam Desc: Cyanate lyase C-terminal domain
  misc_feature (94)..(164): Pfam Id: PF02560 Pfam Desc: Cyanate lyase C-terminal domain
  misc_feature (1)..(164): NCBI GI: 156041014 Blast Desc: SS1G_11485 [Sclerotinia sclerotiorum 1980] gi|154695869|gb|EDN95607.1| SS1G_11485 [Sclerotinia sclerotiorum 1980]
  misc_feature (1)..(164): NCBI GI: 154305303 Blast Desc: BC1G_08946 [Botryotinia fuckeliana B05.10] gi|150853688|gb|EDN28880.1| BC1G_08946 [Botryotinia fuckeliana B05.10]
  misc_feature (1)..(164): NCBI GI: 215407043 Blast Desc: cyanase [Sordaria macrospora]
  misc_feature (1)..(164): NCBI GI: 256730886 Blast Desc: [Nectria haematococca mpVI 77-13-4]
  misc_feature (1)..(164): NCBI GI: 46126161 Blast Desc: FG07458.1 [Gibberella zeae PH-1]
  misc_feature (7)..(164): NCBI GI: 68137993 Blast Desc: cyanate lyase [Chaetomium globosum]
  misc_feature (1)..(164): NCBI GI: 28950310 Blast Desc: cyanate lyase [Neurospora crassa]
  misc_feature (4)..(164): NCBI GI: 261351489 Blast Desc: cyanate hydratase [Verticillium albo-atrum VaMs.102]
  misc_feature (1)..(164): NCBI GI: 171692103 Blast Desc: protein product [Podospora anserina] gi|170946000|emb|CAP72801.1| protein product [Podospora anserina]
  misc_feature (14)..(164): NCBI GI: 39968717 Blast Desc: conserved [Magnaporthe grisea 70-15] gi|145013945|gb|EDJ98586.1| conserved [Magnaporthe grisea 70-15]
  misc_feature (22)..(164): SWISSPROT Homolog: EC 4.2.1.104 Cyanase
  misc_feature: Useful for introducing or modulating the production of volatile compounds
MSDQSPIATLDSTLVDRLPAYSKALFDGKASKKLSFEEIAKELGRGEVAVAALFYGQAQASPEDIDKLSNLLGVSKHELEASMGGFPDRGRAGPMPPVEPLIYRLYEIVQNYGYAFKAVMNEKFGDGIMSAIAFSSKVEKEVDENGVAWVNITLRGKWLPYTRF

SEQ ID NO: 33669 - DNA, 962 bp, Muscodor strobelii
  misc_feature: SGI EST ID NO. CUFF.79523.0
  misc_feature: Variant of the nucleotide sequence at SEQ ID NO 33667
cggatacacgcggggtttgcccatggcaatggattcaaaggcgggataggccgtcatcgattcacatccgtacctaatatttgatccttaaggtatatataacatatctgcttgctatcaaggctggaattgcatacacattaagtggtagccagtatcgaattcatccaagtcaaaatgtctgaccaatcccccatcgcaacgctcgactcaacgctggttgatcgactgccagcctactctaaagccctcttcgatgggaaagctagcaagaagcttagtttcgaggagatcgccaaggagctcggtcgtggtgaggttgctgtagctgccctattctacggccaggcccaagcatctcccgaagacattgacaagctatcaaacctgctaggagtctccaagcatgagctagaagcttcaatgggcggtttccctgatcgcggtcgcgccggtcctatgcctcctgttgaacctctgatctaccgcctgtacgagattgtccagaactacggatatgctttcaaggccgtcatgaacgagaagttcggcgacggcatcatgagtgccatcgcattctcttccaaggttgagaaggaggtagatgagaatggagttgcctgggtgaacatcacgctccgaggcaaatggttgccttatacacgattttaaaatcaccgacgtccaaaggaagcgattcggtcaaaatatggttacttgacgcgagtatcttaatcgctcattcatatgttagctgtctcgatcacattatatgtacatgtagatgtgacataatacctacatatagctatatgtacctatctacagcctgacaagttacggagtaaaaatatataatacacttctttagttgtttgacgttgagccgaaactgttattgatcgctattctgctatacttgaagtggacagctgaaatgtactcaaacagaacagacacgc

SEQ ID NO: 33670 - DNA, 1740 bp, Muscodor strobelii
  misc_feature: SGI cDNA ID NO. 571619
  misc_feature: Encodes the peptide sequence at SEQ ID NO 33671
atgggcgggctcgaccattcgtcgcatgacgcgacccacgatcagcacgtccacttcgaggacattggcggttccagcgcaagtgacgaggatgcaaaagccgtcgaggtcacatttgacccgactaatccgcatcgaaggaaaagctctctcgtcccgtccgaaagcccaaaccccaaagtcactgtgaggcgacccaagacacagcgaatgtcgtcggagtgtatcgtgcatcagtttctcgagagccacagactagaaagtcaaagacggaatgcggcactgaacaatcatgcgcagcacgatgggcacgaggacgttacagaccaagctggactgaacagtttcgttgagcccaaaggcaaaagcaagaaaccagacagagtatctgtaattgacccagaaagcgacgatagtgtggcgtcgggccaggtcgatgagaaatcatggaagacggccctcaccaagagccggtccgaattggatctagccgaagaagagcacgagatgatacatagtcgtctactgaccaaaaaacaactcagcgatatggcctggggagtacgggaactttcgcgacgactaggctctttgcgtctcaaatttagagccaagaacatttttcttctgaccaagatatacgatgaggaattgataccgaaaacaagagaggtcgctaaatggttattgagccaagaaagagatgttcgctacacggtctacgtgcaagatgcactaagacatcacaaaggtttcgatatacctggtttactcgaagaattgcgccaagagtatgtcgaggcaggcaaaatggagaaagatacgccaatcgatgctttaaaacggcgattacgcttttgggacgagaagatgtgtcgaagccgaccgcataccttcgatttcattatcactctcgggggcgatgggacagtgctatttgctagttggcttttccaaaggatagtgccgcccgtgcttagctttgccctcgggagcctcggatttctcactaagttcgacttcaacgagtatgaagacatactcaaaacggcgttcaatcatggtgttactgtgagcttacggttgcgtttcgaaggcaccgtcatgcgaagtcaaaacaagaagctcttggcagatgggaaagaaatcgatgggaacgttcccaacaagaaacgcgatcttgtagaagagcttattggcgaagagaaggaagatgagcatactcacaaaccagatggcaccttcgagattctcaatgaaattgttgttgacaggggtccaaatccaacaatgtcttatacagaaattttcggagacgacgagcacttcacatcagtcctcgccgatggcctttgcgtctcgacacccacaggctcaacagcttacaacttagcagcaggcggttcactatgccaccccgagaatcctgtgatgctagtcacagccatctgtgcacacactctctcattccgacccatcatcctccccgacaccattgtgctgcgaataggggtaccatatgatgcacggaccaacagctgggcgagcttcgacggccgggagcgtatagaactctaccctggcgactatgtgacgatcagcgccagccgttttccgtttgctagtgtccaaccgcaggggcggcgcagcgaagattgggtcaatagtattagtgggaagctgggctggaatacaagacagaagcagaagaatgagggctataagcaatgggatagatag

SEQ ID NO: 33671 - protein, 579 aa, Muscodor strobelii
  misc_feature: SGI Peptide ID NO. 571619
  misc_feature (206)..(545): Pfam Id: PF01513 Pfam Desc: ATP-NAD kinase
  misc_feature (417)..(545): Pfam Id: PF01513 Pfam Desc: ATP-NAD kinase
  misc_feature (206)..(383): Pfam Id: PF01513 Pfam Desc: ATP-NAD kinase
  misc_feature (14)..(579): NCBI GI: 46125545 Blast Desc: FG07150.1 [Gibberella zeae PH-1]
  misc_feature (36)..(578): NCBI GI: 261355687 Blast Desc: ATP NAD kinase [Verticillium albo-atrum VaMs.102]
  misc_feature (25)..(571): NCBI GI: 85103418 Blast Desc: NCU03741 [Neurospora crassa OR74A] gi|16944488|emb|CAC28828.2| related to UTR1 (associated with ferric reductase activity) [Neurospora crassa] NCU03741 crassa
  misc_feature (21)..(577): NCBI GI: 156059126 Blast Desc: SS1G_03575 [Sclerotinia sclerotiorum 1980] gi|154701362|gb|EDO01101.1| SS1G_03575 [Sclerotinia sclerotiorum 1980]
  misc_feature (144)..(579): NCBI GI: 116206492 Blast Desc: CHGG_02539 [Chaetomium globosum CBS 148.51] gi|88183136|gb|EAQ90604.1| CHGG_02539 [Chaetomium globosum CBS 148.51]
  misc_feature (15)..(577): NCBI GI: 154304248 Blast Desc: BC1G_08394 [Botryotinia fuckeliana B05.10] gi|150854196|gb|EDN29388.1| BC1G_08394 [Botryotinia fuckeliana B05.10]
  misc_feature (24)..(570): NCBI GI: 242762127 Blast Desc: NAD kinase, [Talaromyces stipitatus ATCC 10500] gi|242762132|ref|XP_002340317.1| NAD kinase, [Talaromyces stipitatus ATCC 10500] gi|242762137|ref|XP_002340318.1| NAD ATCC
  misc_feature (20)..(577): NCBI GI: 189199536 Blast Desc: NAD kinase /ATP NAD kinase [Pyrenophora tritici-repentis Pt-1C-BFP] gi|187983204|gb|EDU48692.1| NAD kinase /ATP NAD kinase [Pyrenophora tritici-repentis Pt-1C-BFP]
  misc_feature (25)..(578): NCBI GI: 169613961 Blast Desc: SNOG_10115 [Phaeosphaeria nodorum SN15] gi|160707247|gb|EAT82450.2| SNOG_10115 [Phaeosphaeria nodorum SN15]
  misc_feature (24)..(570): NCBI GI: 212529820 Blast Desc: NAD+ kinase, [Penicillium marneffei ATCC 18224] gi|210074465|gb|EEA28552.1| NAD+ kinase, [Penicillium marneffei ATCC 18224]
  misc_feature (180)..(571): SWISSPROT Homolog: EC 2.7.1.23 NAD(+) kinase
MGGLDHSSHDATHDQHVHFEDIGGSSASDEDAKAVEVTFDPTNPHRRKSSLVPSESPNPKVTVRRPKTQRMSSECIVHQFLESHRLESQRRNAALNNHAQHDGHEDVTDQAGLNSFVEPKGKSKKPDRVSVIDPESDDSVASGQVDEKSWKTALTKSRSELDLAEEEHEMIHSRLLTKKQLSDMAWGVRELSRRLGSLRLKFRAKNIFLLTKIYDEELIPKTREVAKWLLSQERDVRYTVYVQDALRHHKGFDIPGLLEELRQEYVEAGKMEKDTPIDALKRRLRFWDEKMCRSRPHTFDFIITLGGDGTVLFASWLFQRIVPPVLSFALGSLGFLTKFDFNEYEDILKTAFNHGVTVSLRLRFEGTVMRSQNKKLLADGKEIDGNVPNKKRDLVEELIGEEKEDEHTHKPDGTFEILNEIVVDRGPNPTMSYTEIFGDDEHFTSVLADGLCVSTPTGSTAYNLAAGGSLCHPENPVMLVTAICAHTLSFRPIILPDTIVLRIGVPYDARTNSWASFDGRERIELYPGDYVTISASRFPFASVQPQGRRSEDWVNSISGKLGWNTRQKQKNEGYKQWDR

SEQ ID NO: 33672 - DNA, 2972 bp, Muscodor strobelii
  misc_feature: SGI EST ID NO. CUFF.79576.2
  misc_feature: Variant of the nucleotide sequence at SEQ ID NO 33670
ggcgaacgcgacacgagattcattccaagccagtggagtgaataaatcaatcaatgcgaatcccgaagtaaatttccgttcacccaactttttttttaataactgaaggcactcgttcatcatgggcgggctcgaccattcgtcgcatgacgcgacccacgatcagcacgtccacttcgaggacattggcggttccagcgcaagtgacgaggatgcaaaagccgtcgaggtcacatttgacccgactaatccgcatcgaaggaaaagctctctcgtcccgtccgaaagcccaaaccccaaagtcactgtgaggcgacccaagacacagcgaatgtcgtcggagtgtatcgtgcatcagtttctcgagagccacagactagaaagtcaaagacggaatgcggcactgaacaatcatgcgcagcacgatgggcacgaggacgttacagaccaagctggactgaacagtttcgttgagcccaaaggcaaaagcaagaaaccagacagagtatctgtaattgacccagaaagcgacgatagtgtggcgtcgggccaggtcgatgagaaatcatggaagacggccctcaccaagagccggtccgaattggatctagccgaagaagagcacgagatgatacatagtcgtctactgaccaaaaaacaactcagcgatatggcctggggagtacgggaactttcgcgacgactaggctctttgcgtctcaaatttagagccaagaacatttttcttctgaccaagatatacgatgaggaattgataccgaaaacaagagaggtcgctaaatggttattgagccaagaaagagatgttcgctacacggtctacgtgcaagatgcactaagacatcacaaaggtttcgatatacctggtttactcgaagaattgcgccaagagtatgtcgaggcaggcaaaatggagaaagatacgccaatcgatgctttaaaacggcgattacgcttttgggacgagaagatgtgtcgaagccgaccgcataccttcgatttcattatcactctcgggggcgatgggacagtgctatttgctagttggcttttccaaaggatagtgccgcccgtgcttagctttgccctcgggagcctcggatttctcactaagttcgacttcaacgagtatgaagacatactcaaaacggcgttcaatcatggtgttactgtgagcttacggttgcgtttcgaaggcaccgtcatgcgaagtcaaaacaagaagctcttggcagatgggaaagaaatcgatgggaacgttcccaacaagaaacgcgatcttgtagaagagcttattggcgaagagaaggaagatgagcatactcacaaaccagatggcaccttcgagattctcaatgaaattgttgttgacaggggtccaaatccaacaatgtcttatacagaaattttcggagacgacgagcacttcacatcagtcctcgccgatggcctttgcgtctcgacacccacaggctcaacagcttacaacttagcagcaggcggttcactatgccaccccgagaatcctgtgatgctagtcacagccatctgtgcacacactctctcattccgacccatcatcctccccgacaccattgtgctgcgaataggggtaccatatgatgcacggaccaacagctgggcgagcttcgacggccgggagcgtatagaactctaccctggcgactatgtgacgatcagcgccagccgttttccgtttgctagtgtccaaccgcaggggcggcgcagcgaagattgggtcaatagtattagtgggaagctgggctggaatacaagacagaagcagaagaatgagggctataagcaatgggatagatagccagatctctgcagcactaccagtatagagtgtattaaacaccacggccatcggtgctatcctcttgtcctttcatttccgcacctaatggttccggtatgcctcagctaaggcctcaatcagagcaagagtgaccaataaccccctctcaacatcaatttcagacgatgaaggcggcacatggaagaacacggccgacccaggctttgtcccaatcttcgcaagctccgcaagcgtagtgtagtaaataagcccacacacgtaattcccgacgatatcagtagctcggatatcaaagcttgcagcattcctcagttgttctctgccgcactttgcattcttcgtccttgcacccaatactatcctggccagacaagttttccaatgcgcgaccactgcgtcaagatcaaaccccgtgacgagtctcgtagcgctgtctttgccccatatcgtcttactctcagctttcgtgatgattttttgggcttcgtcagggtgctgattaccaccatctctggttgcgctcttctcaactgcgtaatatttccgccctactgctacgcccatgtgcagcacaatgtccggatcatgctcttgtattaactttggtgctatgtcgagtattgagtggtagactactgggattggttctggtggaactatgatttggattcctggcagagaggaaggaagtcgtgatgctatttcccatgatgtgttacgtgttacgttcaggaacggaccgaaacctgttactaggatgcgaaggtctctttctggtggttcggagcccatagtgaggggtcggggtgagagtttggtggtgtctccgttagcccgggctaaaggggaactatactagtggtggtgatggcgtcgttggtgattgctatgagagccaccagcaccgcaatacgttataaaatacgaataaaatatgttatgtatgatttttagaggtggatcttaggtaaatagcttagaacgtgttttccacatcagcgaaggtagtttgaagtattgagtattagtgtatttattcagcaacagcaagaacttataatccggattctaggcatcagatgcatcgacgaagcttgttccaacgtcc

SEQ ID NO: 33673 - DNA, 711 bp, Muscodor strobelii
  misc_feature: SGI cDNA ID NO. 571620
  misc_feature: Encodes the peptide sequence at SEQ ID NO 33674
atgggctccgaaccaccagaaagagaccttcgcatcctagtaacaggtttcggtccgttcctgaacgtaacacgtaacacatcatgggaaatagcatcacgacttccttcctctctgccaggaatccaaatcatagttccaccagaaccaatcccagtagtctaccactcaatactcgacatagcaccaaagttaatacaagagcatgatccggacattgtgctgcacatgggcgtagcagtagggcggaaatattacgcagttgagaagagcgcaaccagagatggtggtaatcagcaccctgacgaagcccaaaaaatcatcacgaaagctgagagtaagacgatatggggcaaagacagcgctacgagactcgtcacggggtttgatcttgacgcagtggtcgcgcattggaaaacttgtctggccaggatagtattgggtgcaaggacgaagaatgcaaagtgcggcagagaacaactgaggaatgctgcaagctttgatatccgagctactgatatcgtcgggaattacgtgtgtgggcttatttactacactacgcttgcggagcttgcgaagattgggacaaagcctgggtcggccgtgttcttccatgtgccgccttcatcgtctgaaattgatgttgagagggggttattggtcactcttgctctgattgaggccttagctgaggcataccggaaccattag

SEQ ID NO: 33674 - protein, 236 aa, Muscodor strobelii
  misc_feature: SGI Peptide ID NO. 571620
  misc_feature (10)..(152): Pfam Id: PF01470 Pfam Desc: Pyroglutamyl peptidase
  misc_feature (11)..(83): Pfam Id: PF01470 Pfam Desc: Pyroglutamyl peptidase
  misc_feature (8)..(231): NCBI GI: 169864215 Blast Desc: CC1G_11162 [Coprinopsis cinerea okayama7#130] gi|116500183|gb|EAU83078.1| CC1G_11162 [Coprinopsis cinerea okayama7#130]
  misc_feature (3)..(234): NCBI GI: 189194381 Blast Desc: conserved [Pyrenophora tritici-repentis Pt-1C-BFP] gi|187979093|gb|EDU45719.1| conserved [Pyrenophora tritici-repentis Pt-1C-BFP]
  misc_feature (1)..(232): NCBI GI: 46125435 Blast Desc: FG07095.1 [Gibberella zeae PH-1]
  misc_feature (2)..(232): NCBI GI: 154305098 Blast Desc: BC1G_08639 [Botryotinia fuckeliana B05.10] gi|150853802|gb|EDN28994.1| BC1G_08639 [Botryotinia fuckeliana B05.10]
  misc_feature (1)..(232): NCBI GI: 256733075 Blast Desc: NECHADRAFT_102556 [Nectria haematococca mpVI 77-13-4]
  misc_feature (2)..(232): NCBI GI: 156045303 Blast Desc: SS1G_09840 [Sclerotinia sclerotiorum 1980] gi|154694235|gb|EDN93973.1| SS1G_09840 [Sclerotinia sclerotiorum 1980]
  misc_feature (9)..(233): NCBI GI: 238487936 Blast Desc: pyroglutamyl peptidase type I, [Aspergillus flavus NRRL3357] gi|220700085|gb|EED56424.1| pyroglutamyl peptidase type I, [Aspergillus flavus NRRL3357]
  misc_feature (1)..(229): NCBI GI: 67526971 Blast Desc: AN3943.2 [Aspergillus nidulans FGSC A4] gi|40740062|gb|EAA59252.1| AN3943.2 [Aspergillus nidulans FGSC A4] gi|259481481|tpe|CBF75040.1| TPA: pyroglutamyl peptidase type
  misc_feature (3)..(233): NCBI GI: 238846146 Blast Desc: conserved [Microsporum canis CBS 113480]
  misc_feature (9)..(233): NCBI GI: 255948454 Blast Desc: Pc22g09850 [Penicillium chrysogenum Wisconsin 54-1255] gi|211592011|emb|CAP98273.1| Pc22g09850 [Penicillium chrysogenum Wisconsin 54-1255]
  misc_feature (10)..(207): SWISSPROT Homolog: EC 3.4.19.3 Pyroglutamyl-peptidase I
MGSEPPERDLRILVTGFGPFLNVTRNTSWEIASRLPSSLPGIQIIVPPEPIPVVYHSILDIAPKLIQEHDPDIVLHMGVAVGRKYYAVEKSATRDGGNQHPDEAQKIITKAESKTIWGKDSATRLVTGFDLDAVVAHWKTCLARIVLGARTKNAKCGREQLRNAASFDIRATDIVGNYVCGLIYYTTLAELAKIGTKPGSAVFFHVPPSSSEIDVERGLLVTLALIEALAEAYRNH

SEQ ID NO: 33675 - DNA, 3166 bp, Muscodor strobelii
  misc_feature: SGI EST ID NO. CUFF.79576.1
  misc_feature: Variant of the nucleotide sequence at SEQ ID NO 33673
ggacgttggaacaagcttcgtcgatgcatctgatgcctagaatccggattataagttcttgctgttgctgaataaatacactaatactcaatacttcaaactaccttcgctgatgtggaaaacacgttctaagctatttacctaagatccacctctaaaaatcatacataacatattttattcgtattttataacgtattgcggtgctggtggctctcatagcaatcaccaacgacgccatcaccaccactagtatagttcccctttagcccgggctaacggagacaccaccaaactctcaccccgacccctcactatgggctccgaaccaccagaaagagaccttcgcatcctagtaacaggtttcggtccgttcctgaacgtaacacgtaacacatcatgggaaatagcatcacgacttccttcctctctgccaggaatccaaatcatagttccaccagaaccaatcccagtagtctaccactcaatactcgacatagcaccaaagttaatacaagagcatgatccggacattgtgctgcacatgggcgtagcagtagggcggaaatattacgcagttgagaagagcgcaaccagagatggtggtaatcagcaccctgacgaagcccaaaaaatcatcacgaaagctgagagtaagacgatatggggcaaagacagcgctacgagactcgtcacggggtttgatcttgacgcagtggtcgcgcattggaaaacttgtctggccaggatagtattgggtgcaaggacgaagaatgcaaagtgcggcagagaacaactgaggaatgctgcaagctttgatatccgagctactgatatcgtcgggaattacgtgtgtgggcttatttactacactacgcttgcggagcttgcgaagattgggacaaagcctgggtcggccgtgttcttccatgtgccgccttcatcgtctgaaattgatgttgagagggggttattggtcactcttgctctgattgaggccttagctgaggcataccggaaccattaggtgcggaaatctggtataggcttcagcttcagacgtcttcttcggcgccgaaaagaatgattgatgtttcacccagatagcccacttacgaaaggacaagaggatagcaccgatggccgtggtgtttaatacactctatactggtagtgctgcagagatctggctatctatcccattgcttatagccctcattcttctgcttctgtcttgtattccagcccagcttcccactaatactattgacccaatcttcgctgcgccgcccctgcggttggacactagcaaacggaaaacggctggcgctgatcgtcacatagtcgccagggtagagttctatacgctcccggccgtcgaagctcgcccagctgttggtccgtgcatcatatggtacccctattcgcagcacaatggtgtcggggaggatgatgggtcggaatgagagagtgtgtgcacagatggctgtgactagcatcacaggattctcggggtggcatagtgaaccgcctgctgctaagttgtaagctgttgagcctgtgggtgtcgagacgcaaaggccatcggcgaggactgatgtgaagtgctcgtcgtctccgaaaatttctgtataagacattgctgtatactgttagcatatgaaaataatcacgggggcgctgcattgctcacttggatttggacccctgtcaacaacaatttcattgagaatctcgaaggtgccatctggtttgtgagtatgctcatcttccttctcttcgccaataagctcttctacaagatcgcgtttcttgttgggaacgttcccatcgatttctttcccatctgccaagagcttcttgttttgacttcgcatgacggtgccttcgaaacgcaaccgtaagctcacagtaacaccatgattgaacgccgttttgagtatgtcttcatactcgttgaagtcgaacttagtgagaaatccgaggctcccgagggcaaagctaagcacgggcggcactatcctttggaaaagccaactagcaaatagcactgtcccatcgcccccgagagtgataatgaaatcgaaggtatgcggtcggcttcgacacatcttctcgtcccaaaagcgtaatcgccgttttaaagcatcgattggcgtatctttctccattttgcctgcctcgacatactcttggcgcaattcttcgagtaaaccaggtatatcgaaacctttgtgatgtcttagtgcatcttgcacgtagaccgtgtagcgaacatctctttcttggctcaataaccatttagcgacctctcttgttttcggtatcaattcctcatcgtatatcttggtcagaagaaaaatgttcttggctctaaatttgagacgcaaagagcctagtcgtcgcgaaagttcccgtactccccaggccatatcgctgagttgttttttggtcagtagacgactatgtatcatctcgtgctcttcttcggctagatccaattcggaccggctcttggtgagggccgtcttccatgatttctcatcgacctggcccgacgccacactatcgtcgctttctgggtcaattacagatactctgtctggtttcttgcttttgcctttgggctcaacgaaactgttcagtccagcttggtctgtaacgtcctcgtgcccatcgtgctgcgcatgattgttcagtgccgcattccgtctttgactttctagtctgtggctctcgagaaactgatgcacgatacactccgacgacattcgctgtgtcttgggtcgcctcacagtgactttggggtttgggctttcggacgggacgagagagcttttccttcgatgcggattagtcgggtcaaatgtgacctgtgtaacattgtttgattagcgatatgtaggtaacctatacttctcccgcggaatcgcgcacctcgacggcttttgcatcctcgtcacttgcgctggaaccgccaatgtcctcgaagtggacgtgctgatcgtgggtcgcgtcatgcgacgaatggtcgagcccgcccatgatgaacgagtgccttcagttattaaaaaaaaagttgggtgaacggaaatttacttcgggattcgcattgattgatttattcactccactggcttggaatgaatctcgtgtcgcgttcgcc

SEQ ID NO: 33676 - DNA, 2211 bp, Muscodor strobelii
  misc_feature: SGI cDNA ID NO. 571621
  misc_feature: Encodes the peptide sequence at SEQ ID NO 33677
atggatagagatgccaagacgcatctcgacctcacccctcagtcgccaaggactcagcatacaccactttggaaacggctctcaaagcctattatcttaggcatcttctacacatggacactttattgtatcttcagcactacttcgtcttcaacgatatccctctgggaatacctagatgccagattgcgctttcggcatcatgaagtacctccacaggacagaacatctgcagacggtggagtgtccgtgacagcatgggaagacattatacccagcgaaaagctcaactggcagccatgcttcgcaatctacggccccaggttcgcatgtaccaggctcacagtgcccatggattacaaccggcccttaaacgagtcatcagcaaaccccaaagtacacctcgctctcgttctacttccaggagtcaatcgtacaaatgacccatcatcatacgcggaagcgcctctaatcttcaaccccggcggtcccggaggcgcaggcgcaatgttcaccggattgagaggacctcaactccagacctacgtcggcgaacaaaacgacatccttggatttgacccaagaggtgtggggttcagtacaccgaaagctgattgttttgcatcgccgctggggaggaacgatgcttaccttaataggattgcgtggtttgcgacgggccacgatgttggaggtgtcaattctacacctgctgctctgggaaagctggatgctcgcgcgagggctcttgctaagctctgtaagcgcgttgatgatttggagggcgatgatagtatctttcggcattctagtacgccttatcatgcacgggatatgctctcgattgttcatgcttgggatgagtggagggacagtggttcccaacccaactcgttgcaaaaggtccctgaaaagctacttggtgcggatgatagcaaggcttcagagagtctcaaagggaagctggtatactggggcttttcctatggcactatgctaggcgcgacattcgcatctatgttcccagacaaagtcgggaggatggtactcgatggtatcgtgcatccggacaagtacgtcaatccgatatgggagacgagcatcatcgatgcagacgccattttcgaccttttcttcgactactgtgccgaggcaggtctgaaatgcgcattttatcactcagaagacacatcggaagacatacgagagcggttccatagtcttctgggtgaacttgagcaacagccgatggtaattcttccaccgcaggttaatatcccggtgctactgactgctagcgatgtgaagaagcttctgttctttggagggctctatagtccgctgattggatttcctgtcattgctacggttctgcaggatatcattagtgggcatggtgagaagttggtgaatgctccgagtctcgtaacgctgtgttcgtcaagcttcgaattacctgtttggcctgacgatgcgatgaaagctatcgcgtgtagcgacaagcagtacaagcttaacgagactgttccgaatctaaagaagcgctttgagaaaatggcaccgctgtcgtggttcactgacatctggttcggagtcgacaccgacttgggctgtaacggatggcagatcgacagccaggcaccccctatgcgatggggtgatcatccatctgagaaaccaaaactcatcgagacaaacttccccatactcattctctcaaacaaactcgatccagtgacgccgctccaccatgctcttgaggtagtcaagaaattcgcaaacgcgagtatagtagagcaagacggcatcggtcattgcacactgtcttgcatttcctcatgcacattgatgtatctgcgcgagtacatcaacgagggagtggtgcctcctattccggaattcgacgacgacgatgagtataagggcagatggtcaaaatgcacgtgttatgataagccatgggaccttgtgagcactgacgggtttgagccatgggggaagatgtggcctgctgggcgcgaagcgcttagtgagttgcgtgctcagttctcggctctcatgatggagcgatatcttgagggtcacccgttgaaagagacgctgctgtttcgtatggagaagcagagagtgtcattgcttgaaggggacagagaacgggaagaggctcagaaggcgtactttcagtcgttgtatgaccgattccaaacgtaa

SEQ ID NO: 33677 - protein, 736 aa, Muscodor strobelii
  misc_feature: SGI Peptide ID NO. 571621
  misc_feature (527)..(639): Pfam Id: PF08386 Pfam Desc: TAP-like protein
  misc_feature (320)..(405): Pfam Id: PF00561 Pfam Desc: alpha/beta hydrolase fold
  misc_feature (568)..(629): Pfam Id: PF08386 Pfam Desc: TAP-like protein
  misc_feature (21)..(654): NCBI GI: 154298922 Blast Desc: BC1G_11708 [Botryotinia fuckeliana B05.10] gi|150857613|gb|EDN32805.1| BC1G_11708 [Botryotinia fuckeliana B05.10]
  misc_feature (81)..(654): NCBI GI: 145612215 Blast Desc: MGG_12304 [Magnaporthe grisea 70-15] gi|145019416|gb|EDK03644.1| MGG_12304 [Magnaporthe grisea 70-15]
  misc_feature (171)..(654): NCBI GI: 156064093 Blast Desc: SS1G_00054 [Sclerotinia sclerotiorum 1980] gi|154690916|gb|EDN90654.1| SS1G_00054 [Sclerotinia sclerotiorum 1980]
  misc_feature (51)..(680): NCBI GI: 116201101 Blast Desc: CHGG_08435 [Chaetomium globosum CBS 148.51] gi|88176953|gb|EAQ84421.1| CHGG_08435 [Chaetomium globosum CBS 148.51]
  misc_feature (86)..(629): NCBI GI: 67903022 Blast Desc: AN8498.2 [Aspergillus nidulans FGSC A4] gi|40747964|gb|EAA67120.1| AN8498.2 [Aspergillus nidulans FGSC A4] gi|259484447|tpe|CBF80675.1| TPA: proteinase, AFUA_3G01350)
  misc_feature (53)..(629): NCBI GI: 169865702 Blast Desc: CC1G_06662 [Coprinopsis cinerea okayama7#130] gi|116499457|gb|EAU82352.1| CC1G_06662 [Coprinopsis cinerea okayama7#130]
  misc_feature (86)..(637): NCBI GI: 39976437 Blast Desc: MGG_05855 [Magnaporthe grisea 70-15] gi|145011904|gb|EDJ96560.1| MGG_05855 [Magnaporthe grisea 70-15]
  misc_feature (86)..(638): NCBI GI: 169865692 Blast Desc: CC1G_06657 [Coprinopsis cinerea okayama7#130] gi|116499452|gb|EAU82347.1| CC1G_06657 [Coprinopsis cinerea okayama7#130]
  misc_feature (87)..(630): NCBI GI: 169602859 Blast Desc: SNOG_04432 [Phaeosphaeria nodorum SN15] gi|111067072|gb|EAT88192.1| SNOG_04432 [Phaeosphaeria nodorum SN15]
  misc_feature (87)..(629): NCBI GI: 212544053 Blast Desc: proteinase, [Penicillium marneffei ATCC 18224] gi|210067088|gb|EEA21181.1| proteinase, [Penicillium marneffei ATCC 18224]
MDRDAKTHLDLTPQSPRTQHTPLWKRLSKPIILGIFYTWTLYCIFSTTSSSTISLWEYLDARLRFRHHEVPPQDRTSADGGVSVTAWEDIIPSEKLNWQPCFAIYGPRFACTRLTVPMDYNRPLNESSANPKVHLALVLLPGVNRTNDPSSYAEAPLIFNPGGPGGAGAMFTGLRGPQLQTYVGEQNDILGFDPRGVGFSTPKADCFASPLGRNDAYLNRIAWFATGHDVGGVNSTPAALGKLDARARALAKLCKRVDDLEGDDSIFRHSSTPYHARDMLSIVHAWDEWRDSGSQPNSLQKVPEKLLGADDSKASESLKGKLVYWGFSYGTMLGATFASMFPDKVGRMVLDGIVHPDKYVNPIWETSIIDADAIFDLFFDYCAEAGLKCAFYHSEDTSEDIRERFHSLLGELEQQPMVILPPQVNIPVLLTASDVKKLLFFGGLYSPLIGFPVIATVLQDIISGHGEKLVNAPSLVTLCSSSFELPVWPDDAMKAIACSDKQYKLNETVPNLKKRFEKMAPLSWFTDIWFGVDTDLGCNGWQIDSQAPPMRWGDHPSEKPKLIETNFPILILSNKLDPVTPLHHALEVVKKFANASIVEQDGIGHCTLSCISSCTLMYLREYINEGVVPPIPEFDDDDEYKGRWSKCTCYDKPWDLVSTDGFEPWGKMWPAGREALSELRAQFSALMMERYLEGHPLKETLLFRMEKQRVSLLEGDREREEAQKAYFQSLYDRFQT

SEQ ID NO: 33678 - DNA, 2469 bp, Muscodor strobelii
  misc_feature: SGI EST ID NO. CUFF.79528.0
  misc_feature: Variant of the nucleotide sequence at SEQ ID NO 33676
cctcagctcagccgctttggaaaaagaccaagatgcattcctctctcatataacagcgtgcactcctatttgccttatgtttcgtgactgagaacgttgtggtatatgaagcttgaaaatacaatggatagagatgccaagacgcatctcgacctcacccctcagtcgccaaggactcagcatacaccactttggaaacggctctcaaagcctattatcttaggcatcttctacacatggacactttattgtatcttcagcactacttcgtcttcaacgatatccctctgggaatacctagatgccagattgcgctttcggcatcatgaagtacctccacaggacagaacatctgcagacggtggagtgtccgtgacagcatgggaagacattatacccagcgaaaagctcaactggcagccatgcttcgcaatctacggccccaggttcgcatgtaccaggctcacagtgcccatggattacaaccggcccttaaacgagtcatcagcaaaccccaaagtacacctcgctctcgttctacttccaggagtcaatcgtacaaatgacccatcatcatacgcggaagcgcctctaatcttcaaccccggcggtcccggaggcgcaggcgcaatgttcaccggattgagaggacctcaactccagacctacgtcggcgaacaaaacgacatccttggatttgacccaagaggtgtggggttcagtacaccgaaagctgattgttttgcatcgccgctggggaggaacgatgcttaccttaataggattgcgtggtttgcgacgggccacgatgttggaggtgtcaattctacacctgctgctctgggaaagctggatgctcgcgcgagggctcttgctaagctctgtaagcgcgttgatgatttggagggcgatgatagtatctttcggcattctagtacgccttatcatgcacgggatatgctctcgattgttcatgcttgggatgagtggagggacagtggttcccaacccaactcgttgcaaaaggtccctgaaaagctacttggtgcggatgatagcaaggcttcagagagtctcaaagggaagctggtatactggggcttttcctatggcactatgctaggcgcgacattcgcatctatgttcccagacaaagtcgggaggatggtactcgatggtatcgtgcatccggacaagtacgtcaatccgatatgggagacgagcatcatcgatgcagacgccattttcgaccttttcttcgactactgtgccgaggcaggtctgaaatgcgcattttatcactcagaagacacatcggaagacatacgagagcggttccatagtcttctgggtgaacttgagcaacagccgatggtaattcttccaccgcaggttaatatcccggtgctactgactgctagcgatgtgaagaagcttctgttctttggagggctctatagtccgctgattggatttcctgtcattgctacggttctgcaggatatcattagtgggcatggtgagaagttggtgaatgctccgagtctcgtaacgctgtgttcgtcaagcttcgaattacctgtttggcctgacgatgcgatgaaagctatcgcgtgtagcgacaagcagtacaagcttaacgagactgttccgaatctaaagaagcgctttgagaaaatggcaccgctgtcgtggttcactgacatctggttcggagtcgacaccgacttgggctgtaacggatggcagatcgacagccaggcaccccctatgcgatggggtgatcatccatctgagaaaccaaaactcatcgagacaaacttccccatactcattctctcaaacaaactcgatccagtgacgccgctccaccatgctcttgaggtagtcaagaaattcgcaaacgcgagtatagtagagcaagacggcatcggtcattgcacactgtcttgcatttcctcatgcacattgatgtatctgcgcgagtacatcaacgagggagtggtgcctcctattccggaattcgacgacgacgatgagtataagggcagatggtcaaaatgcacgtgttatgataagccatgggaccttgtgagcactgacgggtttgagccatgggggaagatgtggcctgctgggcgcgaagcgcttagtgagttgcgtgctcagttctcggctctcatgatggagcgatatcttgagggtcacccgttgaaagagacgctgctgtttcgtatggagaagcagagagtgtcattgcttgaaggggacagagaacgggaagaggctcagaaggcgtactttcagtcgttgtatgaccgattccaaacgtaaaaatacagattgtctagaggctggctggcgtcagcttgaagacgcgttggtagatagctcaatcagatggagacccacgagttgcgccctttggctgacatcacggagaccaaaatgccaaaacgttttaaaaac

SEQ ID NO: 33679 - DNA, 1020 bp, Muscodor strobelii
  misc_feature: SGI cDNA ID NO. 571622
  misc_feature: Encodes the peptide sequence at SEQ ID NO 33680
atggaaacaagcaaattcacagcacgatgtcattgtcgcaatatctcgtacacaattgaactgcagacatcaatcctgcctctcaaggcttggatatgcggttgcgatatctgtcgatatactcatgggacgttcgccgccttctacatcactataccaaagggtgttgcaccgaagtggacgcacgacgacgtgaaactcactgagtacaaacccgactccggtgatcacggtacattgaacttctgcgcttcatgcggagcgcatcaaggctactacgacgactcaacatctcaatggatactcgatctctccttattcgacgagccattctggaaatacgtctcgttctcatctgcgtactcgccgcccgacggcgggatactcccatgggtaccacaattcgcaaatctcatgaaagagacacagacgaatcctcctcctacagcttcatccggaaacaccgaggaactgcgagcagaatgtcactgcggcggcgtatccttcacgatctctcggccaacatcggcgattcaagccgacacgtacatgcgagactacatctcaccgctcgattcttcgaaatggaaagcattcatcgacttctgctcggactgtcgattactcactagcgctccgttcgtgccctggattctcgtcccacgagtctctatctcgccgcctttgccgacaagcctggaactggggactatgaagacttacgcatcgtcggataagaatgtccggagtttctgtgggaagtgcggagctactgtattcatcaagtccgagtacagaacgccgagcgaggagcagatggttttgaatcttgcgatggggattttgagggcgggtgagggtgcgagggcagaggattgggtgacttggagatgtggtaaacctgcctgggttgatgatgcgagggcgttcgataaggtacttgcggatgggctgattgaggggcatggaacttgggggagagaggtttatggtaaggacttgagttttgatgttatttga

SEQ ID NO: 33680 - protein, 339 aa, Muscodor strobelii
  misc_feature: SGI Peptide ID NO. 571622
  misc_feature (1)..(338): NCBI GI: 115388687 Blast Desc: conserved [Aspergillus terreus NIH2624] gi|114195933|gb|EAU37633.1| conserved [Aspergillus terreus NIH2624]
  misc_feature (3)..(338): NCBI GI: 212547110 Blast Desc: DUF636 domain protein [Penicillium marneffei ATCC 18224] gi|210064468|gb|EEA18564.1| DUF636 domain protein [Penicillium marneffei ATCC 18224]
  misc_feature (1)..(338): NCBI GI: 255944141 Blast Desc: Pc20g02840 [Penicillium chrysogenum Wisconsin 54-1255] gi|211587573|emb|CAP85613.1| Pc20g02840 [Penicillium chrysogenum Wisconsin 54-1255]
  misc_feature (6)..(338): NCBI GI: 71001832 Blast Desc: DUF636 domain protein [Aspergillus fumigatus Af293] gi|66853235|gb|EAL93559.1| DUF636 domain protein [Aspergillus fumigatus Af293] gi|159129656|gb|EDP54770.1| DUF636 domain A1163]
  misc_feature (1)..(336): NCBI GI: 67903860 Blast Desc: AN8917.2 [Aspergillus nidulans FGSC A4] gi|40744895|gb|EAA64051.1| AN8917.2 [Aspergillus nidulans FGSC A4] gi|259486645|tpe|CBF84664.1| TPA: DUF636 domain protein FGSC
  misc_feature (1)..(328): NCBI GI: 255936183 Blast Desc: Pc13g06850 [Penicillium chrysogenum Wisconsin 54-1255] gi|211583738|emb|CAP91754.1| Pc13g06850 [Penicillium chrysogenum Wisconsin 54-1255]
  misc_feature (3)..(338): NCBI GI: 225558176 Blast Desc: DUF636 domain-containing protein [Ajellomyces capsulatus G186AR]
  misc_feature (3)..(338): NCBI GI: 154280839 Blast Desc: [Ajellomyces capsulatus NAm1] gi|150411411|gb|EDN06799.1| [Ajellomyces capsulatus NAm1]
  misc_feature (3)..(338): NCBI GI: 240273416 Blast Desc: DUF636 domain-containing protein [Ajellomyces capsulatus H143]
  misc_feature (8)..(338): NCBI GI: 261192635 Blast Desc: DUF636 domain-containing protein [Ajellomyces dermatitidis SLH14081] gi|239589206|gb|EEQ71849.1| DUF636 domain-containing protein [Ajellomyces dermatitidis SLH14081]
METSKFTARCHCRNISYTIELQTSILPLKAWICGCDICRYTHGTFAAFYITIPKGVAPKWTHDDVKLTEYKPDSGDHGTLNFCASCGAHQGYYDDSTSQWILDLSLFDEPFWKYVSFSSAYSPPDGGILPWVPQFANLMKETQTNPPPTASSGNTEELRAECHCGGVSFTISRPTSAIQADTYMRDYISPLDSSKWKAFIDFCSDCRLLTSAPFVPWILVPRVSISPPLPTSLELGTMKTYASSDKNVRSFCGKCGATVFIKSEYRTPSEEQMVLNLAMGILRAGEGARAEDWVTWRCGKPAWVDDARAFDKVLADGLIEGHGTWGREVYGKDLSFDVI

SEQ ID NO: 33681 - DNA, 1133 bp, Muscodor strobelii
  misc_feature: SGI EST ID NO. CUFF.79531.0
  misc_feature: Variant of the nucleotide sequence at SEQ ID NO 33679
tatctgtcgatatactcatgggacgttcgccgccttctacatcactataccaaagggtgttgcaccgaagtggacgcacgacgacgtgaaactcactgagtacaaacccgactccggtgatcacggtacattgaacttctgcgcttcatgcggagcgcatcaaggctactacgacgactcaacatctcaatggatactcgatctctccttattcgacgagccattctggaaatacgtctcgttctcatctgcgtactcgccgcccgacggcgggatactcccatgggtaccacaattcgcaaatctcatgaaagagacacagacgaatcctcctcctacagcttcatccggaaacaccgaggaactgcgagcagaatgtcactgcggcggcgtatccttcacgatctctcggccaacatcggcgattcaagccgacacgtacatgcgagactacatctcaccgctcgattcttcgaaatggaaagcattcatcgacttctgctcggactgtcgattactcactagcgctccgttcgtgccctggattctcgtcccacgagtctctatctcgccgcctttgccgacaagcctggaactggggactatgaagacttacgcatcgtcggataagaatgtccggagtttctgtgggaagtgcggagctactgtattcatcaagtccgagtacagaacgccgagcgaggagcagatggttttgaatcttgcgatggggattttgagggcgggtgagggtgcgagggcagaggattgggtgacttggagatgtggtaaacctgcctgggttgatgatgcgagggcgttcgataaggtacttgcggatgggctgattgaggggcatggaacttgggggagagaggtttatggtaaggacttgagttttgatgttatttgatttgggactggtctatggcgttttggtgcctcatgggtcggaatatagtggttgtgaagtgttcaacatccaatattcaacagatgatctgctagcaaactacctagcggtatgaagctagcttaagggggtataacgattttgcatcgcttcgacgaactaagctcaacgccaccgggtgagacaatgtcttgcagtatctagatagaatccaacttgc

SEQ ID NO: 33682 - DNA, 1323 bp, Muscodor strobelii
  misc_feature: SGI cDNA ID NO. 571623
  misc_feature: Reduced expression when VOC is produced
  misc_feature: Encodes the peptide sequence at SEQ ID NO 33683
atgcctcttgcgttgaggacggttgcgcccttcctgcgggcctcgcgggcttgcatcagacccggctcggcggccaacccgttagaattcgctggccgactcaacatctccagatcctacgctgccgccgtcttcgagcgcagcaagcctcacgtcaacatcggtaccattggtcacgtcgatcacggcaagaccaccctctccgctgccatcaccaagagacaggccgagaagggctttgccaacttcttagactatggcgccatcgacaaggcccccgaagagcgaaagcgtggtatcaccatctccaccgcccacatcgaatacgccaccgagaaccgccattactcccacgtcgactgtccgggccacgccgattacatcaagaacatgatcactggtgccgccaacatggacggtgccatcatcgtagttgccgcctcggacggacagatgccccagacccgtgagcacctgctgctcgcccgccaggttggtgtccagaagatcgtcgtcttcgtcaacaaggtggacgccatcgacgacccggagatgttggagctcgtcgagatggagatgcgcgagctgctcacccactacggcttcgagggcgacgagacccccgtcgtcatgggctccgccctgatggctctcgagggcaagcgacccgagatcggaaacgagaagatcgacgagctgatggccgccgtcgactcgtggatccctacccccgagcgtgacctcgacaagcccttcctcatgtctgttgaggatgtcttctctatcgccggccgtggaaccgtcgcctctggccgtgtcgagcgtggcaccctcaagaaggactccgaagtcgagctcatcggcaagggtaccgaggtcatcaagaccaaggtcaccgacatcgagaccttcaagaagtcctgcgacgagtcccgcgctggtgacaactccggactcctgctccgtggtatccgccgtgaggatgtgagacgtggcatggtcgtcgctaagcccggcaccgtcaagtcccacaccaagttcatggtctccatgtacgtcctctccaaggaggaaggtggccgccacactggtttcaccgagaactatcgcccccagatgtacctgcgtaccgccgacgaggcctgcgctctcttcttccccgatgagttcgaggacaagtcgcacatggtcatgcctggcgacaacattgaaatggttgcgacgctcaaccagcctattgctgtcgaggctggccagcgtatcaatatccgtgagggtggccgcaccgtcgccaccggtattatcacccgcatcgtccagtaa

SEQ ID NO: 33683 - protein, 440 aa, Muscodor strobelii
  misc_feature: SGI Peptide ID NO. 571623
  misc_feature (266)..(336): Pfam Id: PF03144 Pfam Desc: Elongation factor Tu domain 2
  misc_feature (49)..(243): Pfam Id: PF00009 Pfam Desc: Elongation factor Tu GTP binding domain
  misc_feature (341)..(439): Pfam Id: PF03143 Pfam Desc: Elongation factor Tu C-terminal domain
  misc_feature (5)..(440): NCBI GI: 85103402 Blast Desc: elongation factor Tu, mitochondrial precursor [Neurospora crassa OR74A] gi|12718271|emb|CAC28833.1| translation elongation factor EF-Tu precursor, mitochondrial [Neurospora Tu,
  misc_feature (1)..(440): NCBI GI: 156064091 Blast Desc: SS1G_00053 [Sclerotinia sclerotiorum 1980] gi|154690915|gb|EDN90653.1| SS1G_00053 [Sclerotinia sclerotiorum 1980]
  misc_feature (1)..(440): NCBI GI: 46125609 Blast Desc: FG07182.1 [Gibberella zeae PH-1]
  misc_feature (1)..(440): NCBI GI: 256731343 Blast Desc: [Nectria haematococca mpVI 77-13-4]
  misc_feature (1)..(440): NCBI GI: 261355692 Blast Desc: elongation factor Tu [Verticillium albo-atrum VaMs.102]
  misc_feature (1)..(440): NCBI GI: 116206488 Blast Desc: CHGG_02537 [Chaetomium globosum CBS 148.51] gi|88183134|gb|EAQ90602.1| CHGG_02537 [Chaetomium globosum CBS 148.51]
  misc_feature (1)..(440): NCBI GI: 171694185 Blast Desc: protein product [Podospora anserina] gi|170947041|emb|CAP73846.1| protein product [Podospora anserina]
  misc_feature (1)..(440): NCBI GI: 39946084 Blast Desc: MGG_08162 [Magnaporthe grisea 70-15] gi|145019418|gb|EDK03646.1| MGG_08162 [Magnaporthe grisea 70-15]
  misc_feature (11)..(440): NCBI GI: 189199718 Blast Desc: elongation factor Tu [Pyrenophora tritici-repentis Pt-1C-BFP] gi|187983295|gb|EDU48783.1| elongation factor Tu [Pyrenophora tritici-repentis Pt-1C-BFP]
  misc_feature (24)..(440): NCBI GI: 212538367 Blast Desc: translation elongation factor EF-Tu, [Penicillium marneffei ATCC 18224] gi|210069081|gb|EEA23172.1| translation elongation factor EF-Tu, [Penicillium marneffei ATCC 18224]
  misc_feature: Useful for introducing or modulating the production of volatile compounds
MPLALRTVAPFLRASRACIRPGSAANPLEFAGRLNISRSYAAAVFERSKPHVNIGTIGHVDHGKTTLSAAITKRQAEKGFANFLDYGAIDKAPEERKRGITISTAHIEYATENRHYSHVDCPGHADYIKNMITGAANMDGAIIVVAASDGQMPQTREHLLLARQVGVQKIVVFVNKVDAIDDPEMLELVEMEMRELLTHYGFEGDETPVVMGSALMALEGKRPEIGNEKIDELMAAVDSWIPTPERDLDKPFLMSVEDVFSIAGRGTVASGRVERGTLKKDSEVELIGKGTEVIKTKVTDIETFKKSCDESRAGDNSGLLLRGIRREDVRRGMVVAKPGTVKSHTKFMVSMYVLSKEEGGRHTGFTENYRPQMYLRTADEACALFFPDEFEDKSHMVMPGDNIEMVATLNQPIAVEAGQRINIREGGRTVATGIITRIVQ

SEQ ID NO: 33684 - DNA, 2027 bp, Muscodor strobelii
  misc_feature: SGI EST ID NO. CUFF.80217.0
  misc_feature: Variant of the nucleotide sequence at SEQ ID NO 33682
gctgcgtctaccaattgggtgcttgcatttgatagcaatttgttagatcatcagtcccgacatccacctccgtcacacctgcccatctcatctcataccacgccttcctcctttcattccttcgctgtgttgtttgtaattgctatttccatcttagccgtctaggcttgtaatacacacaagatgcctcttgcgttgaggacggttgcgcccttcctgcgggcctcgcgggcttgcatcagacccggctcggcggccaacccgttagaattcgctggccgactcaacatctccagatcctacgctgccgccgtcttcgagcgcagcaagcctcacgtcaacatcggtaccattggtcacgtcgatcacggcaagaccaccctctccgctgccatcaccaagagacaggccgagaagggctttgccaacttcttagactatggcgccatcgacaaggcccccgaagagcgaaagcgtggtatcaccatctccaccgcccacatcgaatacgccaccgagaaccgccattactcccacgtcgactgtccgggccacgccgattacatcaagaacatgatcactggtgccgccaacatggacggtgccatcatcgtagttgccgcctcggacggacagatgccccagacccgtgagcacctgctgctcgcccgccaggttggtgtccagaagatcgtcgtcttcgtcaacaaggtggacgccatcgacgacccggagatgttggagctcgtcgagatggagatgcgcgagctgctcacccactacggcttcgagggcgacgagacccccgtcgtcatgggctccgccctgatggctctcgagggcaagcgacccgagatcggaaacgagaagatcgacgagctgatggccgccgtcgactcgtggatccctacccccgagcgtgacctcgacaagcccttcctcatgtctgttgaggatgtcttctctatcgccggccgtggaaccgtcgcctctggccgtgtcgagcgtggcaccctcaagaaggactccgaagtcgagctcatcggcaagggtaccgaggtcatcaagaccaaggtcaccgacatcgagaccttcaagaagtcctgcgacgagtcccgcgctggtgacaactccggactcctgctccgtggtatccgccgtgaggatgtgagacgtggcatggtcgtcgctaagcccggcaccgtcaagtcccacaccaagttcatggtctccatgtacgtcctctccaaggaggaaggtggccgccacactggtttcaccgagaactatcgcccccagatgtacctgcgtaccgccgacgaggcctgcgctctcttcttccccgatgagttcgaggacaagtcgcacatggtcatgcctggcgacaacattgaaatggttgcgacgctcaaccagcctattgctgtcgaggctggccagcgtatcaatatccgtgagggtggccgcaccgtcgccaccggtattatcacccgcatcgtccagtaaacgcattaagtcagatgtacactggcatcgagatgtaaatcaaatctacaaacaacttgtatgagggcgaactagtgtaagagctggagactgggcctgggctgttccgaggatataaagaatacctggaactcgtgtatatggaaggctaaaaatctgtacaatattgcaagacgaaaaggagtcctgggctatgtatacaatcgtcgtttgggccaagcctccatctctctcccctctaatcgatcacgagacactgcgttgttcttcgttgcgtggtcttctgaattgtaatttatagcctgatgaaatagaattccgttaagacaagctcggtggcaaagactattcatactacaactgaagaacttgaaatacttccataaggcggatatggcgttgatttagtaagggggactgaatagaaatacatactgtgggatatcgatgggtatcgaagtgtacagtgtccttcgggacgctacagttagctcaattggcaatcaatcagtcaataccgt

SEQ ID NO: 33685 - DNA, 891 bp, Muscodor strobelii
  misc_feature: SGI cDNA ID NO. 571624
  misc_feature: Encodes the peptide sequence at SEQ ID NO 33686
atgacatccagtaccccactgcgtcccaagttctatcacgaaccatcgttcggttcgggatctgacaactttggcggtcgcttcagagcctatatcagccgccttagagaataccacgaatccagcgcggactggagcatcgagcatcgagctgagccgattcaaaatacgtccgagtctctgtttgagcctgtttttgaagctctgcacgacggtaaacatggtctacctgacatgacacgctacaaagacaacagctatgacagtagtcccacggccaacgatacagacctcaactccgacttacacaagaccttcaacgagaacatgaaacaagacggataccgagacgacacatcttccgagaccaaacccaagcaccatatctggattaacgaagcgaaacattctgctgatcttgcaaacgaagctggacccgacctcaaaataatgcacgacactgctccagccggtccagccaaggaggaagtggaagtcctctacaagtactgggagaaagttatgggcgcggatggtgttggatatttctacctgaatgccatgaacatgtataagatatacgacgacgcatgcaccggtgccaggctactctactggtcagtcgtatgggccgagcatctcggcttcatggtcaccgcgatcctctatagagactacatggacagcatgaaacagcgagatgaaggcgtcacagttgatggaaaacgcaaagccgaggaactagtcaagagttgtgaagacgtccgcgagaagtttgtgaacgtggctttgcgagtaattgcgacacttgcgagccgaattgaccgtcagagtgcatcgaagggcataccggtgtggcatcagtactgcgccatgtgctcgtggttttga

SEQ ID NO: 33686 - protein, 296 aa, Muscodor strobelii
  misc_feature: SGI Peptide ID NO. 571624
MTSSTPLRPKFYHEPSFGSGSDNFGGRFRAYISRLREYHESSADWSIEHRAEPIQNTSESLFEPVFEALHDGKHGLPDMTRYKDNSYDSSPTANDTDLNSDLHKTFNENMKQDGYRDDTSSETKPKHHIWINEAKHSADLANEAGPDLKIMHDTAPAGPAKEEVEVLYKYWEKVMGADGVGYFYLNAMNMYKIYDDACTGARLLYWSVVWAEHLGFMVTAILYRDYMDSMKQRDEGVTVDGKRKAEELVKSCEDVREKFVNVALRVIATLASRIDRQSASKGIPVWHQYCAMCSWF

SEQ ID NO: 33687 - DNA, 164 bp, Muscodor strobelii
  misc_feature: SGI EST ID NO. CUFF.79540.0
  misc_feature: Variant of the nucleotide sequence at SEQ ID NO 33685
ccacggccaacgatacagacctcaactccgacttacacaagaccttcaacgagaacatgaaacaagacggataccgagacgacacatcttccgagaccaaacccaagcaccatatctggattaacgaagcgaaacattctgctgatcttgcaaacgaagctgga

SEQ ID NO: 33688 - DNA, 741 bp, Muscodor strobelii
  misc_feature: SGI cDNA ID NO. 571625
  misc_feature: Encodes the peptide sequence at SEQ ID NO 33689
atgtctacagactgcagctcacaacaggggtcagctgagttgcctaactcactcgacttgcccaaagaccaacagaaccccacgaccgtcaagtcgcacattggcttactcgatcttcctggtgagatccgaaaccagatatatggtctgatgctactacgcgaacggccgatcggaatcggtgctaggttggagtcgaccggaccaaagatcccactcgatctactctgtgcgaataagttcatcaataacgaaacttgttcgctgctctacggatccaactggttcgattttagctggtacactcctgatagagtattgttgtttctcacgcagatcggcaagaaaaatgcaggccaaattcgcaaagtccaaatcgagtttccagacttcagctgtctcactcctggaaatctcgttcttgggcaggatagcattcgcctccttcccttcatccgtcgcaattgccccaacgtacgctggcttttaacgtaccttgatcacttcctctcgaagtgtgagtgctgccgcatcctaatggaccacaagctggccagcgaggcactagagctagtcgattctcacttccgaacgttaccttccctgcgaacgattaccgtcgtcgtattcaatgagttgcaaagtcatgtctcaccagatcattatattaggggaagaatggatcaccacatgtggactgttgtggacataaagaaggaccgctacgaggtatggagatga

SEQ ID NO: 33689 - protein, 246 aa, Muscodor strobelii
  misc_feature: SGI Peptide ID NO. 571625
  misc_feature (34)..(207): NCBI GI: 256723009 Blast Desc: NECHADRAFT_86959 [Nectria haematococca mpVI 77-13-4]
  misc_feature (34)..(225): NCBI GI: 145252170 Blast Desc: An16g02860 [Aspergillus niger] gi|134083143|emb|CAK48595.1| [Aspergillus niger]
  misc_feature (34)..(129): NCBI GI: 212538713 Blast Desc: PMAA_099330 [Penicillium marneffei ATCC 18224] gi|210069254|gb|EEA23345.1| PMAA_099330 [Penicillium marneffei ATCC 18224]
  misc_feature (38)..(130): NCBI GI: 169600137 Blast Desc: SNOG_02897 [Phaeosphaeria nodorum SN15] gi|111068508|gb|EAT89628.1| SNOG_02897 [Phaeosphaeria nodorum SN15]
  misc_feature (35)..(132): NCBI GI: 189192266 Blast Desc: conserved [Pyrenophora tritici-repentis Pt-1C-BFP] gi|187974078|gb|EDU41577.1| conserved [Pyrenophora tritici-repentis Pt-1C-BFP]
  misc_feature (36)..(140): NCBI GI: 154313645 Blast Desc: [Botryotinia fuckeliana B05.10] gi|150849254|gb|EDN24447.1| [Botryotinia fuckeliana B05.10]
MSTDCSSQQGSAELPNSLDLPKDQQNPTTVKSHIGLLDLPGEIRNQIYGLMLLRERPIGIGARLESTGPKIPLDLLCANKFINNETCSLLYGSNWFDFSWYTPDRVLLFLTQIGKKNAGQIRKVQIEFPDFSCLTPGNLVLGQDSIRLLPFIRRNCPNVRWLLTYLDHFLSKCECCRILMDHKLASEALELVDSHFRTLPSLRTITVVVFNELQSHVSPDHYIRGRMDHHMWTVVDIKKDRYEVWR

SEQ ID NO: 33690 - DNA, 302 bp, Muscodor strobelii
  misc_feature: SGI EST ID NO. CUFF.79546.0
  misc_feature: Variant of the nucleotide sequence at SEQ ID NO 33688
ctctgtgcgaataagttcatcaataacgaaacttgttcgctgctctacggatccaactggttcgattttagctggtacactcctgatagagtattgttgtttctcacgcagatcggcaagaaaaatgcaggccaaattcgcaaagtccaaatcgagtttccagacttcagctgtctcactcctggaaatctcgttcttgggcaggatagcattcgcctccttcccttcatccgtcgcaattgccccaacgtacgctggcttttaacgtaccttgatcacttcctctcgaagtgtgagtgctg

SEQ ID NO: 33691 - DNA, 1110 bp, Muscodor strobelii
  misc_feature: SGI cDNA ID NO. 571626
  misc_feature: Encodes the peptide sequence at SEQ ID NO 33692
atgtctgccaacgaatcgatattttcccccgatctcctgcctgctggcgcaacagctccggctgagtcgcctccgcagtgcgtacagaacaaggtggcttgtgaagacagtcactctaccgccgcgaaaccgggcgatcccgagccgtcggctgacaaccccaacaagatttcaagggattgcaggtcggaacaatggttggacgagttgatcgattcatctagctcactcacgatccaacagcccacgtcctccagctcgcaggttggcttcctcgatctacctggtgagatccgaaatcagatatacagcttggtactattgtgtgaggtgtctatcgaaatacgcaagtatgattgggctctaggaggagagtctgaaatctcctggaaacatcgccaaccaagactcggcctagagttgcttcgtgtaaacaagatcgtcaatagcgaagcaagctcgctgttttacgggtctaattgtttcgacttccacaaggcgcaaaaggaggactcacttcactttctcgaaaagattggaggaagaaacgcagctttcatcagacacattgtcatcaactattcatgggcccgttttaaaacgtttcgatttccagtcgaagtatgggaggactacacaagctgtctcgtagcaatccaagctacttgcacaagcctaagcacgctcactatagatgttatctgcgttggagatatagagggttttcgatacgacgaaactctcgagcccgtagagcggtggatcatgcaatttggagtggtcaatacccagatccgaaacatcttctccctcgaaacgatcttcgctaggtcctacaggtataggggagatacttatgaaccatcgcgtcctatgcgaggattcatggatctccttggatggaccatccaaatcgacggaccgggcaagcatgatggcgagagtgagagaagcgagagtgagagaggcgagagtgagagaggcgagagtgagagaggcgagagtgagagaggcgagagtgagagaggcgagagtgagagaggcgagagtatgccaataatagattggatcatcaacatcgtcatcgcttgcttcggggtacctagataa

SEQ ID NO: 33692 - protein, 369 aa, Muscodor strobelii
  misc_feature: SGI Peptide ID NO. 571626
  misc_feature (89)..(307): NCBI GI: 256723009 Blast Desc: NECHADRAFT_86959 [Nectria haematococca mpVI 77-13-4]
  misc_feature (70)..(300): NCBI GI: 145252170 Blast Desc: An16g02860 [Aspergillus niger] gi|134083143|emb|CAK48595.1| [Aspergillus niger]
  misc_feature (311)..(350): NCBI GI: 17551156 Blast Desc: C53C11.4 [Caenorhabditis elegans] gi|1825707|gb|AAB42309.1| C53C11.4 [Caenorhabditis elegans]
  misc_feature (313)..(349): NCBI GI: 68532048 Blast Desc: [Plasmodium yoelii yoelii str. 17XNL] gi|23478083|gb|EAA15264.1| [Plasmodium yoelii yoelii]
  misc_feature (311)..(350): NCBI GI: 17551156 Blast Desc: C53C11.4 [Caenorhabditis elegans] gi|1825707|gb|AAB42309.1| C53C11.4 [Caenorhabditis elegans]
  misc_feature (311)..(350): NCBI GI: 2496818 Blast Desc: C53C11.4 [Caenorhabditis elegans] gi|1825707|gb|AAB42309.1| C53C11.4 [Caenorhabditis elegans]
  misc_feature (311)..(350): NCBI GI: 2496818 Blast Desc: C53C11.4 [Caenorhabditis elegans] gi|1825707|gb|AAB42309.1| C53C11.4 [Caenorhabditis elegans]
  misc_feature (311)..(350): NCBI GI: 2496818 Blast Desc: C53C11.4 [Caenorhabditis elegans] gi|1825707|gb|AAB42309.1| C53C11.4 [Caenorhabditis elegans]
  misc_feature (311)..(350): NCBI GI: 2496818 Blast Desc: C53C11.4 [Caenorhabditis elegans] gi|1825707|gb|AAB42309.1| C53C11.4 [Caenorhabditis elegans]
  misc_feature (311)..(350): NCBI GI: 2496818 Blast Desc: C53C11.4 [Caenorhabditis elegans] gi|1825707|gb|AAB42309.1| C53C11.4 [Caenorhabditis elegans]
MSANESIFSPDLLPAGATAPAESPPQCVQNKVACEDSHSTAAKPGDPEPSADNPNKISRDCRSEQWLDELIDSSSSLTIQQPTSSSSQVGFLDLPGEIRNQIYSLVLLCEVSIEIRKYDWALGGESEISWKHRQPRLGLELLRVNKIVNSEASSLFYGSNCFDFHKAQKEDSLHFLEKIGGRNAAFIRHIVINYSWARFKTFRFPVEVWEDYTSCLVAIQATCTSLSTLTIDVICVGDIEGFRYDETLEPVERWIMQFGVVNTQIRNIFSLETIFARSYRYRGDTYEPSRPMRGFMDLLGWTIQIDGPGKHDGESERSESERGESERGESERGESERGESERGESERGESMPIIDWIINIVIACFGVPR

SEQ ID NO: 33693 - DNA, 468 bp, Muscodor strobelii
  misc_feature: SGI EST ID NO. CUFF.79552.0
  misc_feature: Variant of the nucleotide sequence at SEQ ID NO 33691
ggtcaatacccagatccgaaacatcttctccctcgaaacgatcttcgctaggtcctacaggtataggggagatacttatgaaccatcgcgtcctatgcgaggattcatggatctccttggatggaccatccaaatcgacggaccgggcaagcatgatggcgagagtgagagaagcgagagtgagagaggcgagagtgagagaggcgagagtgagagaggcgagagtgagagaggcgagagtgagagaggcgagagtgagagaggcgagagtatgccaataatagattggatcatcaacatcgtcatcgcttgcttcggggtacctagataatgaatcgttcttgcattatggctctcgtaaacaagcaacacgcgcgcgtggagggttacgcctgatcgtgatagattatctcgataccttacagaatatgcacactgagacgttcaattgtcaatcgtacatcgact

SEQ ID NO: 33694 - DNA, 1296 bp, Muscodor strobelii
  misc_feature: SGI cDNA ID NO. 571627
  misc_feature: Encodes the peptide sequence at SEQ ID NO 33695
atggcagcccgagcgatctttctccccttatttctcacgcagctggttgttgctcatcccttcagtcacctatttcacaaacgcacgtttcccacatttgaagatgaaagcgatttcggaccaggacaggaagaccagataaaggctgcccttccagacgctatagatcttgtgacccgcctcacggaaaactatgacagctacagcgatatctgggccaagtacttcccggtgggtgaccacggcacggttatgaaagtattccagcagatcgtctccgacccgaccaaccctggccaaggagaggaccgcctgaaagattgccgggttgctgggtttgacttcttaccggtcgtctttggcgaggatgcctgcgccgaaggcgcggctgcgtatacctccaacttcctggagccagatcagacatatggcggcgtctcacggactcatttctgccctcccgcgtatcagcagcccgctagatactcggatattaactgcaacgatattggcgacaccgttaatgccaaaatggacttcctaggtgccaccatattgcacgagtggctgcataatgatgccgtcggcaaggctgccactggaacccacatcactgatgttggggggcaaaatggttatggaccctataatactcgtcgccttctccgagactcacccgacgattgcaagaacaatgcggacagctatacttggctcgccctcgaagtattctggacgaagaattgtatgagaaccacccgctacaatgaccctccagcgccgagcgctcctagctgtgagcacgctgcggatccatcagggggtgcgggttattgttctcgcttcgccgttgagggatggtgcgactgcggcgacgccggcgactttaatcaacttgacggtggtgacccatgtgcctacaccgccggcccgcagttcgcccctatcgacctcaactcggatagttgtggtattgtaccttccgctcccacgagcgccgagtgcacagactataacacaccggtggaggacgcacagaacatgaacaatcaactcgatgagtggggcgatggaacgctctgctgtaccaacggagatggcggctgcgccaatattgccgtcagcggtggtttcgcggtcgacctatgctcggcatcgacgacgaatcagcagtgtgttggatgtgcgcgtatggcaaactacttgtctggcatcatcggctcgtgccagcaagatggcaaggtaggaggaaaacaggatattgctgagaacccagggctttccatccaaatctga

SEQ ID NO: 33695 - protein, 431 aa, Muscodor strobelii
  misc_feature: SGI Peptide ID NO. 571627
  misc_feature (4)..(251): NCBI GI: 171679293 Blast Desc: protein product [Podospora anserina] gi|170939272|emb|CAP64500.1| protein product [Podospora anserina]
  misc_feature (127)..(259): NCBI GI: 46112791 Blast Desc: FG02897.1 [Gibberella zeae PH-1]
  misc_feature (169)..(251): NCBI GI: 171683091 Blast Desc: protein product [Podospora anserina] gi|170941505|emb|CAP67157.1| protein product [Podospora anserina]
MAARAIFLPLFLTQLVVAHPFSHLFHKRTFPTFEDESDFGPGQEDQIKAALPDAIDLVTRLTENYDSYSDIWAKYFPVGDHGTVMKVFQQIVSDPTNPGQGEDRLKDCRVAGFDFLPVVFGEDACAEGAAAYTSNFLEPDQTYGGVSRTHFCPPAYQQPARYSDINCNDIGDTVNAKMDFLGATILHEWLHNDAVGKAATGTHITDVGGQNGYGPYNTRRLLRDSPDDCKNNADSYTWLALEVFWTKNCMRTTRYNDPPAPSAPSCEHAADPSGGAGYCSRFAVEGWCDCGDAGDFNQLDGGDPCAYTAGPQFAPIDLNSDSCGIVPSAPTSAECTDYNTPVEDAQNMNNQLDEWGDGTLCCTNGDGGCANIAVSGGFAVDLCSASTTNQQCVGCARMANYLSGIIGSCQQDGKVGGKQDIAENPGLSIQI

SEQ ID NO: 33696 - DNA, 290 bp, Muscodor strobelii
  misc_feature: SGI EST ID NO. CUFF.79558.0
  misc_feature: Variant of the nucleotide sequence at SEQ ID NO 33694
tggggggcaaaatggttatggaccctataatactcgtcgccttctccgagactcacccgacgattgcaagaacaatgcggacagctatacttggctcgccctcgaagtattctggacgaagaattgtatgagaaccacccgctacaatgaccctccagcgccgagcgctcctagctgtgagcacgctgcggatccatcagggggtgcgggttattgttctcgcttcgccgttgagggatggtgcgactgcggcgacgccggcgactttaatcaacttgacggtggtgacc

SEQ ID NO: 33697 - DNA, 591 bp, Muscodor strobelii
  misc_feature: SGI cDNA ID NO. 571628
  misc_feature: Encodes the peptide sequence at SEQ ID NO 33698
atgtcagtaccccggatcattgccgaagcgcggctgtctgcgccggccatttcttttacagatggcccgagtccggatgtcatcctgtctctcaagctagaggattcagaagcccccattaccataaacaagtcgtcactgccgcagctattcctgcccataaatgcggtcgtcattcaagacacggctacgcaaaagcttatcgccacgccgactctcgacatcaacatgaagtcagcgcctctgctaagactggttcgtgagcaggcgaacaagtttatcacgctagagcctggtcagactactgaagccgtcaaggtttcgttcgacccgctaagagctcatagacacggagctgatactacagacactgcttccacgttggcgaagtactctggaggagcactaggaatgcacctgctgaagacggaacgagaatacaccataagcgttcgagatgacttgcacgtgcgctgctggatggagggaagagcggaggacttaatacaggcaggagctgagtggcagccatctgatgtcgacatcagggtagagcctgctaggagcttttgtttccaagtccgaacatag

SEQ ID NO: 33698 - protein, 196 aa, Muscodor strobelii
  misc_feature: SGI Peptide ID NO. 571628
MSVPRIIAEARLSAPAISFTDGPSPDVILSLKLEDSEAPITINKSSLPQLFLPINAVVIQDTATQKLIATPTLDINMKSAPLLRLVREQANKFITLEPGQTTEAVKVSFDPLRAHRHGADTTDTASTLAKYSGGALGMHLLKTEREYTISVRDDLHVRCWMEGRAEDLIQAGAEWQPSDVDIRVEPARSFCFQVRT

SEQ ID NO: 33699 - DNA, 1163 bp, Muscodor strobelii
  misc_feature: SGI EST ID NO. CUFF.79567.0
  misc_feature: Variant of the nucleotide sequence at SEQ ID NO 33697
gcgccggccatttcttttacagatggcccgagtccggatgtcatcctgtctctcaagctagaggattcagaagcccccattaccataaacaagtcgtcactgccgcagctattcctgcccataaatgcggtcgtcattcaagacacggctacgcaaaagcttatcgccacgccgactctcgacatcaacatgaagtcagcgcctctgctaagactggttcgtgagcaggcgaacaagtttatcacgctagagcctggtcagactactgaagccgtcaaggtttcgttcgacccgctaagagctcatagacacggagctgatactacagacactgcttccacgttggcgaagtactctggaggagcactaggaatgcacctgctgaagacggaacgagaatacaccataagcgttcgagatgacttgcacgtgcgctgctggatggagggaagagcggaggacttaatacaggcaggagctgagtggcagccatctgatgtcgacatcagggtagagcctgctaggagcttttgtttccaagtccgaacatagttcttcaatggtattcatatctgcagagtgtaattcatggtagtctcgtgatgtatcttataaagacagctagagcgcccatcgaaaagcaaaacggcgggtcaccgaagctacaagctggacgagattctcaagagtatgaagatgatgaaaattttatagaaatgcatcagccgtgagtcgaatactgggcctatcgatggcaacgatggattttactactaaactactgatgtttgtgttattatatgtaaaagagctagaatctgacatcaaatagagcttagttcgggtttataagtgactcgggtgtatttgtccattaacgcaaagtatattaagctataaatcttccggatttcaaaacttttatttcgaattgctataagccgtccgactatggctaatgtccttgtagtgggacctaagcagcgagcggagacgacggggcctaacgaaaagtcttaaaagagagcgtcccttgtatgatgtagccatttttagccaagccaatcacaccatcttgctcggggcggcaggctattcaaccttcagaatgccgatagagaaaagcaagacaggtcgtgacttgggtcaaaaggagactaaac

SEQ ID NO: 33700 - DNA, 390 bp, Muscodor strobelii
  misc_feature: SGI cDNA ID NO. 571629
  misc_feature: Encodes the peptide sequence at SEQ ID NO 33701
atgctcttcctaaagaccgtcgcccttcttcccgcctttgctgcttcggcatggtgtctcactgttccagcacatgagcgggacatcgatggggaagatagcacagacgcggttcaggttcagacctccatgacagcataccgggacatcaacttcggtggaggtggccaaatcttttatatcgagagtcagacgcagtgttacggtctcgacggaacagggtggtcgaacattattagttccgtgcaagtcgagactggattccgctgtcgactttgggactcgaactcttgcaacggagatagcacgggcgacatctacgctcctggcgccgcggacctcgggggcttcaacgacaaggcaaccagcttcaagtgctaccagaattga

SEQ ID NO: 33701 - protein, 129 aa, Muscodor strobelii
  misc_feature: SGI Peptide ID NO. 571629
  misc_feature (1)..(129): NCBI GI: 145234719 Blast Desc: An03g01060 [Aspergillus niger] gi|134057681|emb|CAK38079.1| [Aspergillus niger]
  misc_feature (22)..(126): NCBI GI: 39975169 Blast Desc: [Magnaporthe grisea 70-15] gi|145018859|gb|EDK03138.1| [Magnaporthe grisea 70-15]
MLFLKTVALLPAFAASAWCLTVPAHERDIDGEDSTDAVQVQTSMTAYRDINFGGGGQIFYIESQTQCYGLDGTGWSNIISSVQVETGFRCRLWDSNSCNGDSTGDIYAPGAADLGGFNDKATSFKCYQN

SEQ ID NO: 33702 - DNA, 1548 bp, Muscodor strobelii
  misc_feature: SGI cDNA ID NO. 571630
  misc_feature: Elevated expression when VOC is produced
  misc_feature: Encodes the peptide sequence at SEQ ID NO 33703
atggcgcataccagtagcctcatcttgttgctcgctattggcactttcgtactctggctggtgcgacctttcctatcgcccttgaggtctataccagggccgttcctcgcaagatggactgatctatggtatgcatggcaagtttacgaaggtcatttcgagaaacagaacatttcgttgcacaggaaatatggctcgatcatccgctacggttccaatcgttacagttttagtgaccctgaggcattaaacacaatctacggccatggcactcgtttcgtcaagtcatcctggtattcggccaactcacatccacagcggccaggtctcttcgcacaacaatccattcaaaagcactctgagaccagaagacaactccaaagcacgtataccatgacatcgctggtgtcgtacgagtcctacgttgactcgtgctctaacatcttttccgaaagactgagagagatgtctaacgcagggtctgtcatagacataggacgaactaacccaatacttctctggctactagattggcttcaatgctatgccttcgacgtgattggagaaatcacattcggcagacgcttcggattcttagatcagggcatagacattggcggtctcaagtccgcgattgataagacgttgtcatatgcctcactcgtcggtatctacgcacgattccatcctgtatgcttcaagatctttggctacatggcaggcaaaagcggtgcagggcgggagtatatactgaacttcgcccggaccagcgttgccgagcacgaggcagaacggaagatcaaccccgtgaaggacggagagatcgtgggaaccgaacctttcgtttccaagtttctaactaagcatgagaacaaccccgagaggttctccaaggtcaatgttttcgagggctgcgctgctaatatagcagctgggtcagatactactggtatcaccctttcagcaatcatttattatctggtgagacatccggactgtcttgcgaaattacgtgccgaaattgccgagtttcaggagaaaggtagtctttcacagtcagttctttcacaatcattcagtttcaaacagacacaggagatgccatatttgcaagctgttctcaaagagacgcttcgaatgcatcccgcgaccggactgcccttggaacgagtggttccagaaggcggtgctactatctccggcaaattctttcccgcgggtacaatcgtgggcatcaacacctgggtgttgcatcgagacaaagccgtttttggacaagatgcagatgcgttcaatcccgagagatggttctctgacgacgaaaacaagcttgcaatcatgaatcgccaatggataccgttcggcgtaggatcgcgcacatgtattggccgacatatatcaacgctggagatcagcaagcttatcccgcggattgttcgagattttgattttggtcgcacggatcaaggtactgcgtggtcgactcgaaaccacttctttgtcaagccgcaagatttcaaggtaacagtcacgcgtcgaaaatcgtga

SEQ ID NO: 33703 - protein, 515 aa, Muscodor strobelii
  misc_feature: SGI Peptide ID NO. 571630
  misc_feature (32)..(510): Pfam Id: PF00067 Pfam Desc: Cytochrome P450
  misc_feature (132)..(484): Pfam Id: PF00067 Pfam Desc: Cytochrome P450
  misc_feature (1)..(514): NCBI GI: 46114836 Blast Desc: FG03260.1 [Gibberella zeae PH-1]
  misc_feature (24)..(514): NCBI GI: 256729810 Blast Desc: NECHADRAFT_95420 [Nectria haematococca mpVI 77-13-4]
  misc_feature (3)..(514): NCBI GI: 189196883 Blast Desc: pisatin demethylase [Pyrenophora tritici-repentis Pt-1C-BFP] gi|187980727|gb|EDU47353.1| pisatin demethylase [Pyrenophora tritici-repentis Pt-1C-BFP]
  misc_feature (8)..(510): NCBI GI: 256733362 Blast Desc: NECHADRAFT_36590 [Nectria haematococca mpVI 77-13-4]
  misc_feature (7)..(515): NCBI GI: 256725852 Blast Desc: NECHADRAFT_43561 [Nectria haematococca mpVI 77-13-4]
  misc_feature (16)..(515): NCBI GI: 240111121 Blast Desc: Cytochrome P450 family protein [Coccidioides posadasii C735 delta SOWgp]
  misc_feature (28)..(515): NCBI GI: 169778009 Blast Desc: [Aspergillus oryzae RIB40] gi|83772207|dbj|BAE62337.1| protein product [Aspergillus oryzae]
  misc_feature (28)..(508): NCBI GI: 67901570 Blast Desc: AN7772.2 [Aspergillus nidulans FGSC A4] gi|40742370|gb|EAA61560.1| AN7772.2 [Aspergillus nidulans FGSC A4] gi|259484124|tpe|CBF80076.1| TPA: cytochrome P450, (Eurofung)
  misc_feature (28)..(513): NCBI GI: 119479803 Blast Desc: cytochrome P450 pisatin demethylase, [Neosartorya fischeri NRRL 181] gi|119408084|gb|EAW18033.1| cytochrome P450 pisatin demethylase, [Neosartorya fischeri NRRL 181]
  misc_feature (8)..(513): NCBI GI: 121715089 Blast Desc: cytochrome P450 pisatin demethylase, [Aspergillus clavatus NRRL 1] gi|119403310|gb|EAW13728.1| cytochrome P450 pisatin demethylase, [Aspergillus clavatus NRRL 1]
  misc_feature (28)..(514): SWISSPROT Homolog: EC 1.14.13.12 Benzoate 4-monooxygenase
  misc_feature: Useful for introducing or modulating the production of volatile compounds
MAHTSSLILLLAIGTFVLWLVRPFLSPLRSIPGPFLARWTDLWYAWQVYEGHFEKQNISLHRKYGSIIRYGSNRYSFSDPEALNTIYGHGTRFVKSSWYSANSHPQRPGLFAQQSIQKHSETRRQLQSTYTMTSLVSYESYVDSCSNIFSERLREMSNAGSVIDIGRTNPILLWLLDWLQCYAFDVIGEITFGRRFGFLDQGIDIGGLKSAIDKTLSYASLVGIYARFHPVCFKIFGYMAGKSGAGREYILNFARTSVAEHEAERKINPVKDGEIVGTEPFVSKFLTKHENNPERFSKVNVFEGCAANIAAGSDTTGITLSAIIYYLVRHPDCLAKLRAEIAEFQEKGSLSQSVLSQSFSFKQTQEMPYLQAVLKETLRMHPATGLPLERVVPEGGATISGKFFPAGTIVGINTWVLHRDKAVFGQDADAFNPERWFSDDENKLAIMNRQWIPFGVGSRTCIGRHISTLEISKLIPRIVRDFDFGRTDQGTAWSTRNHFFVKPQDFKVTVTRRKS

SEQ ID NO: 33704 - DNA, 1313 bp, Muscodor strobelii
  misc_feature: SGI EST ID NO. CUFF.79971.1
  misc_feature: Variant of the nucleotide sequence at SEQ ID NO 33702
attggagaaatcacattcggcagacgcttcggattcttagatcagggcatagacattggcggtctcaagtccgcgattgataagacgttgtcatatgcctcactcgtcggtatctacgcacgattccatcctgtatgcttcaagatctttggctacatggcaggcaaaagcggtgcagggcgggagtatatactgaacttcgcccggaccagcgttgccgagcacgaggcagaacggaagatcaaccccgtgaaggacggagagatcgtgggaaccgaacctttcgtttccaagtttctaactaagcatgagaacaaccccgagaggttctccaaggtcaatgttttcgagggctgcgctgctaatatagcagctgggtcagatactactggtatcaccctttcagcaatcatttattatctggtgagacatccggactgtcttgcgaaattacgtgccgaaattgccgagtttcaggagaaaggtagtctttcacagtcagttctttcacaatcattcagtttcaaacagacacaggagatgccatatttgcaagctgttctcaaagagacgcttcgaatgcatcccgcgaccggactgcccttggaacgagtggttccagaaggcggtgctactatctccggcaaattctttcccgcgggtacaatcgtgggcatcaacacctgggtgttgcatcgagacaaagccgtttttggacaagatgcagatgcgttcaatcccgagagatggttctctgacgacgaaaacaagcttgcaatcatgaatcgccaatggataccggtcagtcaaaaacacaattcaccatttataggttcgatactaaaaactatcatattgtggttgctccagttcggcgtaggatcgcgcacatgtattggccgacatatatcaacgctggagatcagcaagcttatcccgcggattgttcgagattttgattttggtcgcacggatcaaggtactgcgtggtcgactcgaaaccacttctttgtcaagccgcaagatttcaaggtaacagtcacgcgtcgaaaatcgtgacaggaaagctcgtgggccatgcacaaagcacataattatcatttggggctgattattaatgactattttacgtagtagataggttacaggtagtgacccggtaaacaacctggaatcttaatgattccaatctaaaagactgatattggtgactagggaggtggcaccagccataacgtcggttgaatcattgccaataagggtgtaccatccattacgatagctgatagtaattaaccatccatcttcatcca

SEQ ID NO: 33705 - DNA, 1617 bp, Muscodor strobelii
  misc_feature: SGI cDNA ID NO. 571631
  misc_feature: Elevated expression when VOC is produced
  misc_feature: Encodes the peptide sequence at SEQ ID NO 33706
atggcgcataccagtagcctcatcttgttgctcgctattggcactttcgtactctggctggtgcgacctttcctatcgcccttgaggtctataccagggccgttcctcgcaagatggactgatctatggtatgcatggcaagtttacgaaggtcatttcgagaaacagaacatttcgttgcacaggaaatatggctcgatcatccgctacggttccaatcgttacagttttagtgaccctgaggcattaaacacaatctacggccatggcactcgtttcgtcaagtcatcctggtattcggccaactcacatccacagcggccaggtctcttcgcacaacaatccattcaaaagcactctgagaccagaagacaactccaaagcacgtataccatgacatcgctggtgtcgtacgagtcctacgttgactcgtgctctaacatcttttccgaaagactgagagagatgtctaacgcagggtctgtcatagacataggacgaactaacccaatacttctctggctactagattggcttcaatgctatgccttcgacgtgattggagaaatcacattcggcagacgcttcggattcttagatcagggcatagacattggcggtctcaagtccgcgattgataagacgttgtcatatgcctcactcgtcggtatctacgcacgattccatcctgtatgcttcaagatctttggctacatggcaggcaaaagcggtgcagggcgggagtatatactgaacttcgcccggaccagcgttgccgagcacgaggcagaacggaagatcaaccccgtgaaggacggagagatcgtgggaaccgaacctttcgtttccaagtttctaactaagcatgagaacaaccccgagaggttctccaaggtcaatgttttcgagggctgcgctgctaatatagcagctgggtcagatactactggtatcaccctttcagcaatcatttattatctggtgagacatccggactgtcttgcgaaattacgtgccgaaattgccgagtttcaggagaaaggtagtctttcacagtcagttctttcacaatcattcagtttcaaacagacacaggagatgccatatttgcaagctgttctcaaagagacgcttcgaatgcatcccgcgaccggactgcccttggaacgagtggttccagaaggcggtgctactatctccggcaaattctttcccgcgggtacaatcgtgggcatcaacacctgggtgttgcatcgagacaaagccgtttttggacaagatgcagatgcgttcaatcccgagagatggttctctgacgacgaaaacaagcttgcaatcatgaatcgccaatggataccggtcagtcaaaaacacaattcaccatttataggttcgatactaaaaactatcatattgtggttgctccagttcggcgtaggatcgcgcacatgtattggccgacatatatcaacgctggagatcagcaagcttatcccgcggattgttcgagattttgattttggtcgcacggatcaaggtactgcgtggtcgactcgaaaccacttctttgtcaagccgcaagatttcaaggtaacagtcacgcgtcgaaaatcgtga

SEQ ID NO: 33706 - protein, 538 aa, Muscodor strobelii
  misc_feature: SGI Peptide ID NO. 571631
  misc_feature (32)..(533): Pfam Id: PF00067 Pfam Desc: Cytochrome P450
  misc_feature (132)..(436): Pfam Id: PF00067 Pfam Desc: Cytochrome P450
  misc_feature (477)..(507): Pfam Id: PF00067 Pfam Desc: Cytochrome P450
  misc_feature (1)..(537): NCBI GI: 46114836 Blast Desc: FG03260.1 [Gibberella zeae PH-1]
  misc_feature (3)..(537): NCBI GI: 189196883 Blast Desc: pisatin demethylase [Pyrenophora tritici-repentis Pt-1C-BFP] gi|187980727|gb|EDU47353.1| pisatin demethylase [Pyrenophora tritici-repentis Pt-1C-BFP]
  misc_feature (24)..(537): NCBI GI: 256729810 Blast Desc: NECHADRAFT_95420 [Nectria haematococca mpVI 77-13-4]
  misc_feature (8)..(533): NCBI GI: 256733362 Blast Desc: NECHADRAFT_36590 [Nectria haematococca mpVI 77-13-4]
  misc_feature (7)..(538): NCBI GI: 256725852 Blast Desc: NECHADRAFT_43561 [Nectria haematococca mpVI 77-13-4]
  misc_feature (16)..(538): NCBI GI: 240111121 Blast Desc: Cytochrome P450 family protein [Coccidioides posadasii C735 delta SOWgp]
  misc_feature (28)..(531): NCBI GI: 67901570 Blast Desc: AN7772.2 [Aspergillus nidulans FGSC A4] gi|40742370|gb|EAA61560.1| AN7772.2 [Aspergillus nidulans FGSC A4] gi|259484124|tpe|CBF80076.1| TPA: cytochrome P450, (Eurofung)
  misc_feature (28)..(538): NCBI GI: 169778009 Blast Desc: [Aspergillus oryzae RIB40] gi|83772207|dbj|BAE62337.1| protein product [Aspergillus oryzae]
  misc_feature (28)..(536): NCBI GI: 119479803 Blast Desc: cytochrome P450 pisatin demethylase, [Neosartorya fischeri NRRL 181] gi|119408084|gb|EAW18033.1| cytochrome P450 pisatin demethylase, [Neosartorya fischeri NRRL 181]
  misc_feature (8)..(536): NCBI GI: 121715089 Blast Desc: cytochrome P450 pisatin demethylase, [Aspergillus clavatus NRRL 1] gi|119403310|gb|EAW13728.1| cytochrome P450 pisatin demethylase, [Aspergillus clavatus NRRL 1]
  misc_feature (28)..(537): SWISSPROT Homolog: EC 1.14.13.12 Benzoate 4-monooxygenase
  misc_feature: Useful for introducing or modulating the production of volatile compounds
MAHTSSLILLLAIGTFVLWLVRPFLSPLRSIPGPFLARWTDLWYAWQVYEGHFEKQNISLHRKYGSIIRYGSNRYSFSDPEALNTIYGHGTRFVKSSWYSANSHPQRPGLFAQQSIQKHSETRRQLQSTYTMTSLVSYESYVDSCSNIFSERLREMSNAGSVIDIGRTNPILLWLLDWLQCYAFDVIGEITFGRRFGFLDQGIDIGGLKSAIDKTLSYASLVGIYARFHPVCFKIFGYMAGKSGAGREYILNFARTSVAEHEAERKINPVKDGEIVGTEPFVSKFLTKHENNPERFSKVNVFEGCAANIAAGSDTTGITLSAIIYYLVRHPDCLAKLRAEIAEFQEKGSLSQSVLSQSFSFKQTQEMPYLQAVLKETLRMHPATGLPLERVVPEGGATISGKFFPAGTIVGINTWVLHRDKAVFGQDADAFNPERWFSDDENKLAIMNRQWIPVSQKHNSPFIGSILKTIILWLLQFGVGSRTCIGRHISTLEISKLIPRIVRDFDFGRTDQGTAWSTRNHFFVKPQDFKVTVTRRKS

SEQ ID NO: 33707 - DNA, 1313 bp, Muscodor strobelii; identical to SEQ ID NO: 33704
  misc_feature: SGI EST ID NO. CUFF.79971.1
  misc_feature: Variant of the nucleotide sequence at SEQ ID NO 33705

SEQ ID NO: 33708 - DNA, 1116 bp, Muscodor strobelii
  misc_feature: SGI cDNA ID NO. 571632
  misc_feature: Reduced expression when VOC is produced
  misc_feature: Encodes the peptide sequence at SEQ ID NO 33709
atggtcctcctcaagagcttcgtgctcgccggcctgaccgccgtggtcgctgccaagtcagctgtcctcgatctcgtccccgacaacttcgataaagtcgttctcaagtccggcaagcccactcttgtcgagttcttcgctccctggtgcggccactgcaagaacctcgcccccgtctacgaggatctcgccaacgtcttcgccaccaacaaagatgtccagatcgcaaaggtcgacgccgatgccgagaagtccctcggaaagagatttggtgtccagggcttccccaccttaaaatggttcgacggcaagagtgacaagcccgaggagtacaacggtggccgggacctcgagagcttgaccaagttcatcacggagaagaccggagccaaggccaagagaaaggtcgagatgcctagtgtcgtggagatgttgaacgacaagaccttcaagcagaccattggcggcgacaaggacgttctcgtcgccttcactgccccctggtgcggccactgcaagagcttggctcccacatgggagactctggccaccgacttcatcaacgagccaggcgttgtcatcgccaaggtcgacgccgaggccgagaacagcaaggctaccgctagcgaacagagcgtcacttcctaccctaccatcaagttcttccccaagggctccaccgagcccgaggactacaacggcggccgcagcgaggccgacctgatcagcttcatcaacgagaaggccggcactcaccgtgtcgccggtggtggtcttgacctcaaggctggcactatcgacatcctgaaccacattgccatcaagtatgccgctggcaccgagaagctcgctgacttgaccgccgaggctcagaaggccgtcaagggccttaccgaagatgcccagtacaagtatgccgagtactacatccgcgtcttcgacaagctggcccagaacgagggctttgtggccaaggagtcggcccgcctcgacaacatcatccgcaagggtggtcttgcccccaccaagcttgacgagctccagagcaagagcaacatcctcaagcagtacatcaagtcggtggctgaggccgtcactggcaaggaggagctgtag

SEQ ID NO: 33709 - protein, 371 aa, Muscodor strobelii
  misc_feature: SGI Peptide ID NO. 571632
  misc_feature (264)..(358): Pfam Id: PF07749 Pfam Desc: Endoplasmic reticulum protein ERp29, C-terminal domain
  misc_feature (21)..(127): Pfam Id: PF00085 Pfam Desc: Thioredoxin
  misc_feature (141)..(248): Pfam Id: PF00085 Pfam Desc: Thioredoxin
  misc_feature (1)..(371): NCBI GI: 171694181 Blast Desc: protein product [Podospora anserina] gi|170947039|emb|CAP73844.1| protein product [Podospora anserina]
  misc_feature (1)..(371): NCBI GI: 156058700 Blast Desc: SS1G_03362 [Sclerotinia sclerotiorum 1980] gi|154701149|gb|EDO00888.1| SS1G_03362 [Sclerotinia sclerotiorum 1980]
  misc_feature (1)..(371): NCBI GI: 154303086 Blast Desc: BC1G_09563 [Botryotinia fuckeliana B05.10] gi|150855026|gb|EDN30218.1| BC1G_09563 [Botryotinia fuckeliana B05.10]
  misc_feature (7)..(371): NCBI GI: 39946088 Blast Desc: conserved [Magnaporthe grisea 70-15] gi|59802956|gb|AAX07681.1| disulfide isomerase-like protein [Magnaporthe grisea] gi|145019419|gb|EDK03647.1| conserved grisea
  misc_feature (1)..(358): NCBI GI: 46125605 Blast Desc: FG07180.1 [Gibberella zeae PH-1]
  misc_feature (1)..(367): NCBI GI: 116206484 Blast Desc: CHGG_02535 [Chaetomium globosum CBS 148.51] gi|88183132|gb|EAQ90600.1| CHGG_02535 [Chaetomium globosum CBS 148.51]
  misc_feature (9)..(371): NCBI GI: 121713810 Blast Desc: disulfide isomerase (TigA), [Aspergillus clavatus NRRL 1] gi|119402669|gb|EAW13090.1| disulfide isomerase (TigA), [Aspergillus clavatus NRRL 1]
  misc_feature (1)..(358): NCBI GI: 256731342 Blast Desc: [Nectria haematococca mpVI 77-13-4]
  misc_feature (1)..(365): NCBI GI: 261355690 Blast Desc: disulfide-isomerase erp38 [Verticillium albo-atrum VaMs.102]
  misc_feature (6)..(358): NCBI GI: 119478875 Blast Desc: disulfide isomerase (TigA), [Neosartorya fischeri NRRL 181] gi|119407625|gb|EAW17574.1| disulfide isomerase (TigA), [Neosartorya fischeri NRRL 181]
  misc_feature (1)..(358): SWISSPROT Homolog: EC 5.3.4.1 Protein disulfide-isomerase
  misc_feature: Useful for introducing or modulating the production of volatile compounds
MVLLKSFVLAGLTAVVAAKSAVLDLVPDNFDKVVLKSGKPTLVEFFAPWCGHCKNLAPVYEDLANVFATNKDVQIAKVDADAEKSLGKRFGVQGFPTLKWFDGKSDKPEEYNGGRDLESLTKFITEKTGAKAKRKVEMPSVVEMLNDKTFKQTIGGDKDVLVAFTAPWCGHCKSLAPTWETLATDFINEPGVVIAKVDAEAENSKATASEQSVTSYPTIKFFPKGSTEPEDYNGGRSEADLISFINEKAGTHRVAGGGLDLKAGTIDILNHIAIKYAAGTEKLADLTAEAQKAVKGLTEDAQYKYAEYYIRVFDKLAQNEGFVAKESARLDNIIRKGGLAPTKLDELQSKSNILKQYIKSVAEAVTGKEEL

SEQ ID NO: 33710 - DNA, 5700 bp, Muscodor strobelii
  misc_feature: SGI EST ID NO. CUFF.80380.0
  misc_feature: Variant of the nucleotide sequence at SEQ ID NO 33708
cgcaggtagcccttgagaggactggtctaggtggcatctttggggtgagcttgatttcaaagctgcgtttaaagtttacatcaacaaacagactcgttaatgcgaggctgaaattatttatacttttgatcattgcatttgtatataatatacaaaattcccgacttgtatatcgtacccatttgtgattctcccacccgctaccagacatacctctttcctcgctagctgacagtgctcctccatcaaaatggtcctcctcaagagcttcgtgctcgccggcctgaccgccgtggtcgctgccaagtcagctgtcctcgatctcgtccccgacaacttcgataaagtcgttctcaagtccggcaagcccactcttgtcgagttcttcgctccctggtgcggccactgcaagaacctcgcccccgtctacgaggatctcgccaacgtcttcgccaccaacaaagatgtccagatcgcaaaggtcgacgccgatgccgagaagtccctcggaaagagatttggtgtccagggcttccccaccttaaaatggttcgacggcaagagtgacaagcccgaggagtacaacggtggccgggacctcgagagcttgaccaagttcatcacggagaagaccggagccaaggccaagagaaaggtcgagatgcctagtgtcgtggagatgttgaacgacaagaccttcaagcagaccattggcggcgacaaggacgttctcgtcgccttcactgccccctggtgcggccactgcaagagcttggctcccacatgggagactctggccaccgacttcatcaacgagccaggcgttgtcatcgccaaggtcgacgccgaggccgagaacagcaaggctaccgctagcgaacagagcgtcacttcctaccctaccatcaagttcttccccaagggctccaccgagcccgaggactacaacggcggccgcagcgaggccgacctgatcagcttcatcaacgagaaggccggcactcaccgtgtcgccggtggtggtcttgacctcaaggctggcactatcgacatcctgaaccacattgccatcaagtatgccgctggcaccgagaagctcgctgacttgaccgccgaggctcagaaggccgtcaagggccttaccgaagatgcccagtacaagtatgccgagtactacatccgcgtcttcgacaagctggcccagaacgagggctttgtggccaaggagtcggcccgcctcgacaacatcatccgcaagggtggtcttgcccccaccaagcttgacgagctccagagcaagagcaacatcctcaagcagtacatcaagtcggtggctgaggccgtcactggcaaggaggagctgtagaagagctccccaagacaagcctttgacaagatagtggaagcaatgctgtacgggcgctgagaaaagcttgcggaaggcactcaaaatattagtgaaggatacctagtagaggatttgaattgccaggagtcagggcacagacatgaattatgacaacagagcctggcgggaagcaaccgatgggatccagaggagtagggataccgctaatagtcattaccgcacgccccgagttacctatgggtagaaagagatgttgccatagaacatcagataatcaacaacttgaatatgataccacttggtccgctatgatggactgtgtttgcgccactgaaacaaattagagaacctatcattgacatgaagactgtactgctcaatatgataatcaattggttcgtgactttatggtatctctcgcatcccactcacaaccggtcttccaatactgaaactccacaacgcctcgccttaggccgtcatcataaaattcctcatgaacgctactctgcatgaaatccacctgtcgccagactcaaacccaagatctcctctgatcgattcaactcgacttcgaaggcgagccaggagtgttgtccttgttcgcctgcatcgcggcctcaagattgtcaaggcgcttggacatctcatccactgatggctgtcagtccagaagatagatacgctcgcaagaggcctgcgtgtgagattacatacttttggcgaatatctcgcttgatacgccgttgaacttgcttgataaagagtttaggagatcttcgacgacagctgtcagctcgtctgaactcttctgggatttgagttagctctagcgtagacacgtggagactgggtcgtgtacgttgcctgttgtgtctgggacggtgttggttttcttggacgacattgtgatttgcgaggagggatatctacttagatatgtagcgacagttttattttgtcctgaaaagaggtttgatgtgaattgtgagtatgttataaatgtgaaggagccatgtgccgtttgttgattgattgtcgttgtggttggttgcatcgggacgggatggacccctgatgcaggctgcagcaatccactagtggagcttatgatgacaactcccatcgggcgcatttgaacttccatcgaaacttgcaagctatcctcctaatgtcttaatgttattttcttttcctacgtcgaacatcgctcccaccgatatcctgatttcgaatcttcagcgattcgtcgtcatgtcaccgaggtgacgtgatggacaccgttatccaccatgccgcaagctcaggataacgctcgcgtgttcatgctcatcgttatcctcctatggcttgcctctactcccgactcgtcgcccggtttcattgctggaccatcgcagattaagaatcgaattgcgcgccagagagatgcccacgccgttttaaatagtacgagctggggtgattttgcgccacgtcaggctagtgatccgatgcccgatgccgaaccactcgctgggacacccgatgttgaacccacggacgagaaagtcatcacacgccgtcaggctgatgctaaaatgggcgaagttgtagacgaagaacccgagaccgaactcgcgaacgaatataagtacctgaacctgacagggttcaggcaggaagatggtttcgcctgggaagatttaggacagtttaaaagccgttgtgaggaatggagtcgcaatgccgtgggcattcctgaagctcagcagcccgtttggcagaatgcgacaggcctggtccgaggattgtggaaccgcagaaatgcgactgtcacgagggatcactcggattacaacttgaccaagatcaatgacgacgttgcctggactggcttgaatgccgagtggaataggaatatcaccggcaaggagggcaagatacttgttcgaatcgacgacgctgatgattctggcacggaaccggaacatgtggatcggaggatcttgaaccaggatgagatcctcgcgcgggatgtgtcggcttcggtcacgatcgaggatatcaatggatctggtaatagctgggatcttcgcctccacggcatccattggcctaagcagggcgccatgctattcactaccacgagcgacaagtttgccggtatcttcggattgccgcatcttactactacgcccgagttcttcgaatcaagcaaggcattgttgaatcgaacgctgggcaagatattggacaggaaagagaaacgcatgctcactgatcagactgacccctgggcatcgaccatggacaccccgggagagacatggaatcccactccgcattgcgagtacttgctctacatccaggttcaccccttggatccgaatattcttaaggtccaaccaagtcttacagggcccgaaaacgttgtcaaggcaattcacgatatcgaagatgaacttcgattcccgcgtggcggcccaaagactgctacaccacgactccaaatgtctgctgttttgtactcgccggactgtgctttcttcatggagagcaagggtccgccttcatatcctgccatcgaaggcgagcatttactgggtgtgaaacaagaagttttcctacataatgtcagcacctggttcctgggactggcagctataatattcggacaagtccaactactcaagctgcagatgagagaaacatccaccccctctacactgggccgagtcagtctgtacactgctggcatgatgctctttgctgacgggataatcttcgctggctccgctgcatggacactatctgcttccaacactctactgccgtctctgatagtgacttgcgtctcattcctctctatgatgataggcgtctttttcgtttccgaaattcacaaaatccaggagcccgaatggcggcgtcaggaacgcgagagagaaagacagaattcgcctactcctcctagaacacagtctacgccccctaataactcagaaactaccccatcagccggcatccgcctaggaagcactcccgcagaaactccgtctgcaccaacgacgagacctccatccccacctataataatcccgtcagaccaagacatagacgccgaaatcgcagaagtaacaaacacatccactaccgccgccgccactcttcctgcccccgtaacagcaggtggcacccaaaccactcccgccaacaccccaacacccgtcacaacaatattcggccgcttcgtcttagcagggatatgcgtcctcttcctctccctcgcagccgcgacctggcggccctcattacgcgcttcatacttcaacacactagcatttttctacttctccctctggatcccacagatatacagaaacatataccgcaactgtcgacgagccctctcctggcgattcgtcgtcggacaaagcacgttaaggttactccctatagcttatttctatatcttcgaagagaatttcgcgtttgcggaacgggattatctcaccttctgcctactggttgcttgggtcggactacagatcggggtattagtagtgcagagtgtgctgggacctagatttggtgtcccgaggggttggtgtcccgaggcgtgggaatatcatccggtgcttagggaggataatattgaggctgggggtttacctattgggcttgttgctgcggcgagtgggggtgggagtccgagttcagagagagagaggaggaagagtgttgatgataagttgaaggagaagggtgtggtggttcattcgattgattgtgcgatttgtagggaggtgcttgaggttcctgttcttaaggctggggagacggagagtggcattggggggttgggtgggagtatggggatgagcatgggggcgggaatggcgggtgtgggtggtgtgctcgcgaggaggatgtatatggttacgccttgtagacatatttttcattcggggtgtttggagggttggatgaggtttaggcttcagtgtcctatttgtcgggaggaactacctcctctttaggggttgggattgttgggattgaatcgatggtttaagaatatcccatgtgagagcgctttactcgggctgtgatacggcttgggtgttgacctgatgagtcgcgctacccgacatccgaccttgacacatggacagtatttagtatgagtacctagtgttgatccggcaggatactcggcaaggggttcaggtcggattatgtttcaggaattatttcattctgctctctcaggcgtcaatgggcttggctaagacgctgactagatgttgaatacccttaaaacatcagagccatgaacgatatttgat

SEQ ID NO: 33711 - DNA, 231 bp, Muscodor strobelii
  misc_feature: SGI cDNA ID NO. 571633
  misc_feature: Encodes the peptide sequence at SEQ ID NO 33712
atgtcgtccaagaaaaccaacaccgtcccagacacaacaggcaacaagagttcagacgagctgacagctgtcgtcgaagatctcctaaactctttatcaagcaagttcaacggcgtatcaagcgagatattcgccaaaatggatgagatgtccaagcgccttgacaatcttgaggccgcgatgcaggcgaacaaggacaacactcctggctcgccttcgaagtcgagttga

SEQ ID NO: 33712 - protein, 76 aa, Muscodor strobelii
  misc_feature: SGI Peptide ID NO. 571633
  misc_feature (18)..(69): Pfam Id: PF06825 Pfam Desc: Heat shock factor binding protein 1
  misc_feature (18)..(61): Pfam Id: PF06825 Pfam Desc: Heat shock factor binding protein 1
  misc_feature (3)..(66): NCBI GI: 171694179 Blast Desc: protein product [Podospora anserina] gi|170947038|emb|CAP73843.1| protein product [Podospora anserina]
  misc_feature (12)..(74): NCBI GI: 156058702 Blast Desc: [Sclerotinia sclerotiorum 1980] gi|154701150|gb|EDO00889.1| [Sclerotinia sclerotiorum 1980]
  misc_feature (3)..(66): NCBI GI: 261355689 Blast Desc: [Verticillium albo-atrum VaMs.102]
  misc_feature (16)..(73): NCBI GI: 189199926 Blast Desc: PTRG_05967 [Pyrenophora tritici-repentis Pt-1C-BFP] gi|187983399|gb|EDU48887.1| PTRG_05967 [Pyrenophora tritici-repentis Pt-1C-BFP]
  misc_feature (10)..(62): NCBI GI: 46125603 Blast Desc: FG07179.1 [Gibberella zeae PH-1]
  misc_feature (14)..(65): NCBI GI: 169613717 Blast Desc: SNOG_09991 [Phaeosphaeria nodorum SN15] gi|111061206|gb|EAT82326.1| SNOG_09991 [Phaeosphaeria nodorum SN15]
  misc_feature (20)..(76): NCBI GI: 255954063 Blast Desc: Pc21g07440 [Penicillium chrysogenum Wisconsin 54-1255] gi|211589495|emb|CAP95641.1| Pc21g07440 [Penicillium chrysogenum Wisconsin 54-1255]
  misc_feature (12)..(61): NCBI GI: 261191153 Blast Desc: BDBG_07824 [Ajellomyces dermatitidis SLH14081] gi|239591029|gb|EEQ73610.1| BDBG_07824 [Ajellomyces dermatitidis SLH14081] gi|239613065|gb|EEQ90052.1| BDCG_05172 [Ajellomyces
  misc_feature (20)..(67): NCBI GI: 242777206 Blast Desc: conserved [Talaromyces stipitatus ATCC 10500] gi|218722606|gb|EED22024.1| conserved [Talaromyces stipitatus ATCC 10500]
  misc_feature (10)..(61): NCBI GI: 225684474 Blast Desc: PABG_04969 [Paracoccidioides brasiliensis Pb03]
MSSKKTNTVPDTTGNKSSDELTAVVEDLLNSLSSKFNGVSSEIFAKMDEMSKRLDNLEAAMQANKDNTPGSPSKSS

SEQ ID NO: 33713 - DNA, 5648 bp, Muscodor strobelii
  misc_feature: SGI EST ID NO. CUFF.80381.1
  misc_feature: Variant of the nucleotide sequence at SEQ ID NO 33711
atcaaatatcgttcatggctctgatgttttaagggtattcaacatctagtcagcgtcttagccaagcccattgacgcctgagagagcagaatgaaataattcctgaaacataatccgacctgaaccccttgccgagtatcctgccggatcaacactaggtactcatactaaatactgtccatgtgtcaaggtcggatgtcgggtagcgcgactcatcaggtcaacacccaagccgtatcacagcccgagtaaagcgctctcacatgggatattcttaaaccatcgattcaatcccaacaatcccaacccctaaagaggaggtagttcctcccgacaaataggacactgaagcctaaacctcatccaaccctccaaacaccccgaatgaaaaatatgtctacaaggcgtaaccatatacatcctcctcgcgagcacaccacccacacccgccattcccgcccccatgctcatccccatactcccacccaaccccccaatgccactctccgtctccccagccttaagaacaggaacctcaagcacctccctacaaatcgcacaatcaatcgaatgaaccaccacacccttctccttcaacttatcatcaacactcttcctcctctctctctctgaactcggactcccacccccactcgccgcagcaacaagcccaataggtaaacccccagcctcaatattatcctccctaagcaccggatgatattcccacgcctcgggacaccaacccctcgggacaccaaatctaggtcccagcacactctgcactactaataccccgatctgtagtccgacccaagcaaccagtaggcagaaggtgagataatcccgttccgcaaacgcgaaattctcttcgaagatatagaaataagctatagggagtaaccttaacgtgctttgtccgacgacgaatcgccaggagagggctcgtcgacagttgcggtatatgtttctgtatatctgtgggatccagagggagaagtagaaaaatgctagtgtgttgaagtatgaagcgcgtaatgagggccgccaggtcgcggctgcgagggagaggaagaggacgcatatccctgctaagacgaagcggccgaatattgttgtgacgggtgttggggtgttggcgggagtggtttgggtgccacctgctgttacgggggcaggaagagtggcggcggcggtagtggatgtgtttgttacttctgcgatttcggcgtctatgtcttggtctgacgggattattataggtggggatggaggtctcgtcgttggtgcagacggagtttctgcgggagtgcttcctaggcggatgccggctgatggggtagtttctgagttattagggggcgtagactgtgttctaggaggagtaggcgaattctgtctttctctctcgcgttcctgacgccgccattcgggctcctggattttgtgaatttcggaaacgaaaaagacgcctatcatcatagagaggaatgagacgcaagtcactatcagagacggcagtagagtgttggaagcagatagtgtccatgcagcggagccagcgaagattatcccgtcagcaaagagcatcatgccagcagtgtacagactgactcggcccagtgtagagggggtggatgtttctctcatctgcagcttgagtagttggacttgtccgaatattatagctgccagtcccaggaaccaggtgctgacattatgtaggaaaacttcttgtttcacacccagtaaatgctcgccttcgatggcaggatatgaaggcggacccttgctctccatgaagaaagcacagtccggcgagtacaaaacagcagacatttggagtcgtggtgtagcagtctttgggccgccacgcgggaatcgaagttcatcttcgatatcgtgaattgccttgacaacgttttcgggccctgtaagacttggttggaccttaagaatattcggatccaaggggtgaacctggatgtagagcaagtactcgcaatgcggagtgggattccatgtctctcccggggtgtccatggtcgatgcccaggggtcagtctgatcagtgagcatgcgtttctctttcctgtccaatatcttgcccagcgttcgattcaacaatgccttgcttgattcgaagaactcgggcgtagtagtaagatgcggcaatccgaagataccggcaaacttgtcgctcgtggtagtgaatagcatggcgccctgcttaggccaatggatgccgtggaggcgaagatcccagctattaccagatccattgatatcctcgatcgtgaccgaagccgacacatcccgcgcgaggatctcatcctggttcaagatcctccgatccacatgttccggttccgtgccagaatcatcagcgtcgtcgattcgaacaagtatcttgccctccttgccggtgatattcctattccactcggcattcaagccagtccaggcaacgtcgtcattgatcttggtcaagttgtaatccgagtgatccctcgtgacagtcgcatttctgcggttccacaatcctcggaccaggcctgtcgcattctgccaaacgggctgctgagcttcaggaatgcccacggcattgcgactccattcctcacaacggcttttaaactgtcctaaatcttcccaggcgaaaccatcttcctgcctgaaccctgtcaggttcaggtacttatattcgttcgcgagttcggtctcgggttcttcgtctacaacttcgcccattttagcatcagcctgacggcgtgtgatgactttctcgtccgtgggttcaacatcgggtgtcccagcgagtggttcggcatcgggcatcggatcactagcctgacgtggcgcaaaatcaccccagctcgtactatttaaaacggcgtgggcatctctctggcgcgcaattcgattcttaatctgcgatggtccagcaatgaaaccgggcgacgagtcgggagtagaggcaagccataggaggataacgatgagcatgaacacgcgagcgttatcctgagcttgcggcatggtggataacggtgtccatcacgtcacctcggtgacatgacgacgaatcgctgaagattcgaaatcaggatatcggtgggagcgatgttcgacgtaggaaaagaaaataacattaagacattaggaggatagcttgcaagtttcgatggaagttcaaatgcgcccgatgggagttgtcatcataagctccactagtggattgctgcagcctgcatcaggggtccatcccgtcccgatgcaaccaaccacaacgacaatcaatcaacaaacggcacatggctccttcacatttataacatactcacaattcacatcaaacctcttttcaggacaaaataaaactgtcgctacatatctaagtagatatccctcctcgcaaatcacaatgtcgtccaagaaaaccaacaccgtcccagacacaacaggcaacaagagttcagacgagctgacagctgtcgtcgaagatctcctaaactctttatcaagcaagttcaacggcgtatcaagcgagatattcgccaaaatggatgagatgtccaagcgccttgacaatcttgaggccgcgatgcaggcgaacaaggacaacactcctggctcgccttcgaagtcgagttgaatcgatcagaggagatcttgggtttgagtctggcgacaggtggatttcatgcagagtagcgttcatgaggaattttatgatgacggcctaaggcgaggcgttgtggagtttcagtattggaagaccggttgtgagtgggatgcgagagataccataaagtcacgaaccaattgattatcatattgagcagtacagtcttcatgtcaatgataggttctctaatttgtttcagtggcgcaaacacagtccatcatagcggaccaagtggtatcatattcaagttgttgattatctgatgttctatggcaacatctctttctacccataggtaactcggggcgtgcggtaatgactattagcggtatccctactcctctggatcccatcggttgcttcccgccaggctctgttgtcataattcatgtctgtgccctgactcctggcaattcaaatcctctactaggtatccttcactaatattttgagtgccttccgcaagcttttctcagcgcccgtacagcattgcttccactatcttgtcaaaggcttgtcttggggagctcttctacagctcctccttgccagtgacggcctcagccaccgacttgatgtactgcttgaggatgttgctcttgctctggagctcgtcaagcttggtgggggcaagaccacccttgcggatgatgttgtcgaggcgggccgactccttggccacaaagccctcgttctgggccagcttgtcgaagacgcggatgtagtactcggcatacttgtactgggcatcttcggtaaggcccttgacggccttctgagcctcggcggtcaagtcagcgagcttctcggtgccagcggcatacttgatggcaatgtggttcaggatgtcgatagtgccagccttgaggtcaagaccaccaccggcgacacggtgagtgccggccttctcgttgatgaagctgatcaggtcggcctcgctgcggccgccgttgtagtcctcgggctcggtggagcccttggggaagaacttgatggtagggtaggaagtgacgctctgttcgctagcggtagccttgctgttctcggcctcggcgtcgaccttggcgatgacaacgcctggctcgttgatgaagtcggtggccagagtctcccatgtgggagccaagctcttgcagtctgcattggggttagcgcatccttctgacgtaggggcacgatgatgccgggggagcactcacggccgcaccagggggcagtgaaggcgacgagaacgtccttgtcgccgccaatggtctgcttgaaggtcttgtcgttcaacatctccacgacactaggcatctcgacctttctcttggccttggctccggtcttctccgtgatgaacttggtcaagctctcgaggtcccggccaccgttgtactcctcgggcttgtcactcttgccgtcgaaccattttaaggtggggaagccctggacaccaaatctctttccgagggacttctcggcatcggcgtcgacctttgcgatctggacatctttgttggtggcgaagacgttggcgagatcctcgtagacgggggcgaggttcttgcagtggccgcaccagggagcgaagaactcgacaagagtgggcttgccggacttgagaacgactttatcgaagttgtcggggacgagatcgaggacagctgacttggcagcgaccacggcggtcaggccggcgagcacgaagctcttgaggaggaccattttgatggaggagcactgtcagctagcgaggaaagaggtatgtctggtagcgggtgggagaatcacaaatgggtacgatatacaagtcgggaattttgtatattatatacaaatgcaatgatcaaaagtataaataatttcagcctcgcattaacgagtctgtttgttgatgtaaactttaaacgcagctttgaaatcaagctcaccccaaagatgccacctagaccagtcctctcaagggctacctgcg

SEQ ID NO: 33714 - DNA, 2730 bp, Muscodor strobelii
  misc_feature: SGI cDNA ID NO. 571634
  misc_feature: Encodes the peptide sequence at SEQ ID NO 33715
atgccgcaagctcaggataacgctcgcgtgttcatgctcatcgttatcctcctatggcttgcctctactcccgactcgtcgcccggtttcattgctggaccatcgcagattaagaatcgaattgcgcgccagagagatgcccacgccgttttaaatagtacgagctggggtgattttgcgccacgtcaggctagtgatccgatgcccgatgccgaaccactcgctgggacacccgatgttgaacccacggacgagaaagtcatcacacgccgtcaggctgatgctaaaatgggcgaagttgtagacgaagaacccgagaccgaactcgcgaacgaatataagtacctgaacctgacagggttcaggcaggaagatggtttcgcctgggaagatttaggacagtttaaaagccgttgtgaggaatggagtcgcaatgccgtgggcattcctgaagctcagcagcccgtttggcagaatgcgacaggcctggtccgaggattgtggaaccgcagaaatgcgactgtcacgagggatcactcggattacaacttgaccaagatcaatgacgacgttgcctggactggcttgaatgccgagtggaataggaatatcaccggcaaggagggcaagatacttgttcgaatcgacgacgctgatgattctggcacggaaccggaacatgtggatcggaggatcttgaaccaggatgagatcctcgcgcgggatgtgtcggcttcggtcacgatcgaggatatcaatggatctggtaatagctgggatcttcgcctccacggcatccattggcctaagcagggcgccatgctattcactaccacgagcgacaagtttgccggtatcttcggattgccgcatcttactactacgcccgagttcttcgaatcaagcaaggcattgttgaatcgaacgctgggcaagatattggacaggaaagagaaacgcatgctcactgatcagactgacccctgggcatcgaccatggacaccccgggagagacatggaatcccactccgcattgcgagtacttgctctacatccaggttcaccccttggatccgaatattcttaaggtccaaccaagtcttacagggcccgaaaacgttgtcaaggcaattcacgatatcgaagatgaacttcgattcccgcgtggcggcccaaagactgctacaccacgactccaaatgtctgctgttttgtactcgccggactgtgctttcttcatggagagcaagggtccgccttcatatcctgccatcgaaggcgagcatttactgggtgtgaaacaagaagttttcctacataatgtcagcacctggttcctgggactggcagctataatattcggacaagtccaactactcaagctgcagatgagagaaacatccaccccctctacactgggccgagtcagtctgtacactgctggcatgatgctctttgctgacgggataatcttcgctggctccgctgcatggacactatctgcttccaacactctactgccgtctctgatagtgacttgcgtctcattcctctctatgatgataggcgtctttttcgtttccgaaattcacaaaatccaggagcccgaatggcggcgtcaggaacgcgagagagaaagacagaattcgcctactcctcctagaacacagtctacgccccctaataactcagaaactaccccatcagccggcatccgcctaggaagcactcccgcagaaactccgtctgcaccaacgacgagacctccatccccacctataataatcccgtcagaccaagacatagacgccgaaatcgcagaagtaacaaacacatccactaccgccgccgccactcttcctgcccccgtaacagcaggtggcacccaaaccactcccgccaacaccccaacacccgtcacaacaatattcggccgcttcgtcttagcagggatatgcgtcctcttcctctccctcgcagccgcgacctggcggccctcattacgcgcttcatacttcaacacactagcatttttctacttctccctctggatcccacagatatacagaaacatataccgcaactgtcgacgagccctctcctggcgattcgtcgtcggacaaagcacgttaaggttactccctatagcttatttctatatcttcgaagagaatttcgcgtttgcggaacgggattatctcaccttctgcctactggttgcttgggtcggactacagatcggggtattagtagtgcagagtgtgctgggacctagatttggtgtcccgaggggttggtgtcccgaggcgtgggaatatcatccggtgcttagggaggataatattgaggctgggggtttacctattgggcttgttgctgcggcgagtgggggtgggagtccgagttcagagagagagaggaggaagagtgttgatgataagttgaaggagaagggtgtggtggttcattcgattgattgtgcgatttgtagggaggtgcttgaggttcctgttcttaaggctggggagacggagagtggcattggggggttgggtgggagtatggggatgagcatgggggcgggaatggcgggtgtgggtggtgtgctcgcgaggaggatgtatatggttacgccttgtagacatatttttcattcggggtgtttggagggttggatgaggtttaggcttcagtgtcctatttgtcgggaggaactacctcctctttag

SEQ ID NO: 33715 - protein, 909 aa, Muscodor strobelii
  misc_feature: SGI Peptide ID NO. 571634
  misc_feature (827)..(902): Pfam Id: PF00097 Pfam Desc: Zinc finger, C3HC4 type (RING finger)
  misc_feature (1)..(909): NCBI GI: 145612221 Blast Desc: MGG_08165 [Magnaporthe grisea 70-15] gi|145019421|gb|EDK03649.1| MGG_08165 [Magnaporthe grisea 70-15]
  misc_feature (12)..(909): NCBI GI: 261355688 Blast Desc: transmembrane E3 ubiquitin-protein ligase [Verticillium albo-atrum VaMs.102]
  misc_feature (1)..(909): NCBI GI: 46125601 Blast Desc: FG07178.1 [Gibberella zeae PH-1]
  misc_feature (1)..(813): NCBI GI: 256731341 Blast Desc: [Nectria haematococca mpVI 77-13-4]
  misc_feature (6)..(909): NCBI GI: 171694177 Blast Desc: protein product [Podospora anserina] gi|170947037|emb|CAP73842.1| protein product [Podospora anserina]
  misc_feature (1)..(764): NCBI GI: 156058704 Blast Desc: SS1G_03364 [Sclerotinia sclerotiorum 1980] gi|154701151|gb|EDO00890.1| SS1G_03364 [Sclerotinia sclerotiorum 1980]
  misc_feature (6)..(909): NCBI GI: 121701591 Blast Desc: RING finger ubiquitin ligase (Tul1), [Aspergillus clavatus NRRL 1] gi|119397203|gb|EAW07634.1| RING finger ubiquitin ligase (Tul1), [Aspergillus clavatus NRRL 1]
  misc_feature (111)..(909): NCBI GI: 189207867 Blast Desc: conserved [Pyrenophora tritici-repentis Pt-1C-BFP] gi|187976360|gb|EDU42986.1| conserved [Pyrenophora tritici-repentis Pt-1C-BFP]
  misc_feature (6)..(909): NCBI GI: 70995642 Blast Desc: RING finger ubiquitin ligase (Tul1) [Aspergillus fumigatus Af293] gi|41581287|emb|CAE47936.1| RING finger protein [Aspergillus fumigatus] gi|66850211|gb|EAL90538.1| RING finger
  misc_feature (6)..(909): NCBI GI: 119495537 Blast Desc: RING finger ubiquitin ligase (Tul1), [Neosartorya fischeri NRRL 181] gi|119412713|gb|EAW22654.1| RING finger ubiquitin ligase (Tul1), [Neosartorya fischeri NRRL 181]
MPQAQDNARVFMLIVILLWLASTPDSSPGFIAGPSQIKNRIARQRDAHAVLNSTSWGDFAPRQASDPMPDAEPLAGTPDVEPTDEKVITRRQADAKMGEVVDEEPETELANEYKYLNLTGFRQEDGFAWEDLGQFKSRCEEWSRNAVGIPEAQQPVWQNATGLVRGLWNRRNATVTRDHSDYNLTKINDDVAWTGLNAEWNRNITGKEGKILVRIDDADDSGTEPEHVDRRILNQDEILARDVSASVTIEDINGSGNSWDLRLHGIHWPKQGAMLFTTTSDKFAGIFGLPHLTTTPEFFESSKALLNRTLGKILDRKEKRMLTDQTDPWASTMDTPGETWNPTPHCEYLLYIQVHPLDPNILKVQPSLTGPENVVKAIHDIEDELRFPRGGPKTATPRLQMSAVLYSPDCAFFMESKGPPSYPAIEGEHLLGVKQEVFLHNVSTWFLGLAAIIFGQVQLLKLQMRETSTPSTLGRVSLYTAGMMLFADGIIFAGSAAWTLSASNTLLPSLIVTCVSFLSMMIGVFFVSEIHKIQEPEWRRQERERERQNSPTPPRTQSTPPNNSETTPSAGIRLGSTPAETPSAPTTRPPSPPIIIPSDQDIDAEIAEVTNTSTTAAATLPAPVTAGGTQTTPANTPTPVTTIFGRFVLAGICVLFLSLAAATWRPSLRASYFNTLAFFYFSLWIPQIYRNIYRNCRRALSWRFVVGQSTLRLLPIAYFYIFEENFAFAERDYLTFCLLVAWVGLQIGVLVVQSVLGPRFGVPRGWCPEAWEYHPVLREDNIEAGGLPIGLVAAASGGGSPSSERERRKSVDDKLKEKGVVVHSIDCAICREVLEVPVLKAGETESGIGGLGGSMGMSMGAGMAGVGGVLARRMYMVTPCRHIFHSGCLEGWMRFRLQCPICREELPPL

SEQ ID NO: 33716 - DNA, 5700 bp, Muscodor strobelii; identical to SEQ ID NO: 33710
  misc_feature: SGI EST ID NO. CUFF.80380.0
  misc_feature: Variant of the nucleotide sequence at SEQ ID NO 33714

SEQ ID NO: 33717 - DNA, 2280 bp, Muscodor strobelii
  misc_feature: SGI cDNA ID NO. 571635
  misc_feature: Encodes the peptide sequence at SEQ ID NO 33718
atggacagtttccacggaagcattcacgaggctcgtccatgccgcctacggtctagcgagaccaagttgagataccgaaactcatatccggagggtgctattgagcctgctcgcaagtcctcatgtgccgaatctccttccagtaaacaggtgccagaagtctcgtacgtgccactcgaggctagcacagctaaacaacatttcgtgaagagattgccgatgtccgagtcgattggagccaccggttcctgtatgatatttggtggagcaatggcgatgcttgggtctattgcctttctcaccttcctttggttcggggctggtccggagccggaagcacgaagcgcttcgtgggtttggcgtagcatcgcgctacactctttcatccctcaggctgcagcattgattgctctggctattcgtactgttgttgccgcacaagcagctatatgcacatctatgctgtccgccatagtcattgagaaacactgcattcccagatccaaagctgcgcatctgtcgattatgcgagccgtcaacaatggaccaaggagcatcatatggctacttgtatcttcgaaataccaggtcactgaggcaattctcgccattttattgtttcttagctctttgggcctgcaattttcctcgacgctcttgctatcagatctcaaaacatttggaattacaagtaatgcattaccggggcaagttctggggttattgtcggattcacaagatacacatactgaggctatcggtggcttttcgtttctggaccccgtgttctctgtctacggagaggcaaagtcacccgactcactctccgagaatagaaagctcaatgcctccggtgtaagcgatacaggaatgatgaggcgagcatttctcccattcagcggagcaacagagagaaccaaaatccgatcatacgacggaccggcaacggtgctaagctcccggactacctgcatgacacccaatatcacagatgttcgatacacaacccacgtatggctagagtgggaagggacatactggggccgtctcaatggaacactagactatggtacaagcctcgaacaagacataggcgtgaagccctgcggcccagaaggctgcgcttcgcttccattctggtgcgaaataccgggcgttgtatcgggaaatccactcttatggcaaaccaacatttgctttctcactggagtaggtaactccttatggtcgggcgatgatggtcctataggcggcatcgttcctgatccgtgggcaatcaattctacgatctatcttgtcttctctacaaacatgagagcgcaagactggggccttatttgggacggggaaagccatgtgccaatcgccgtggacttcgaagacgaatggagacgctacacagcactgccgggcaggttcatcaaagcatcactgtgtttcaacagtttcaacctggactataacttcgtccgcatgacagccagtggaaataccacggagcccagtgtaacctataatcgtagcacaggggattcggaggctggcagcgtcacgaaatatttcggagtggataatacgactctggcatttgatgatagaggaatcatgaatctttacaacgtgaccaccgttccaagccacttagaccacgttggacatcgtgtcaacatcgatcgcaccctaggaattatttggaaggatatctacgcggagacggttctaggagtgaatccaaacgataccatcatcgcttgtacccactgcaacggcggctgggctgccggcagtagtagggatctaggggcagtcctagacgctactatcgcagctaccgatagacccgctgatttgattcagacttgggtgacagcttatgccctgattatctataattggtaccagaaaactttcacagtcgcccaagatgcaattgtcacaggggtaataccagtcctagttggcagccattgtcaagagcacaataagtgtgctggtttcgtctcggttgtgacactaacggtcctgcactccttgacggtctgcgctatcgtggttctgtacatcaaacaaacacgtcattcaaggctcgccaatgtgtggcacacggtgtcgcaactttgtacggacgacgttagcaacatcatggattcctcccatgatgtcagcgataaaacagtcacgagaaccttgagaaatatgaataaagactacatggtgcagattgggagatcgccagcacaaggcaggattggcgcgcagaagtacagcgattgtttatga

SEQ ID NO: 33718 - protein, 759 aa, Muscodor strobelii
  misc_feature: SGI Peptide ID NO. 571635
  misc_feature (70)..(750): NCBI GI: 145605162 Blast Desc: MGG_02132 [Magnaporthe grisea 70-15] gi|145013020|gb|EDJ97661.1| MGG_02132 [Magnaporthe grisea 70-15]
  misc_feature (69)..(728): NCBI GI: 46139113 Blast Desc: FG11071.1 [Gibberella zeae PH-1]
  misc_feature (81)..(751): NCBI GI: 119474385 Blast Desc: NFIA_005330 [Neosartorya fischeri NRRL 181] gi|119407221|gb|EAW17171.1| conserved [Neosartorya fischeri NRRL 181]
  misc_feature (57)..(751): NCBI GI: 256722986 Blast Desc: NECHADRAFT_52602 [Nectria haematococca mpVI 77-13-4]
  misc_feature (76)..(332): NCBI GI: 256733978 Blast Desc: NECHADRAFT_77642 [Nectria haematococca mpVI 77-13-4]
  misc_feature (34)..(324): NCBI GI: 256726575 Blast Desc: NECHADRAFT_79667 [Nectria haematococca mpVI 77-13-4]
  misc_feature (57)..(757): NCBI GI: 46127455 Blast Desc: FG08105.1 [Gibberella zeae PH-1]
  misc_feature (120)..(326): NCBI GI: 119482479 Blast Desc: NFIA_093340 [Neosartorya fischeri NRRL 181] gi|119409422|gb|EAW19371.1| [Neosartorya fischeri NRRL 181]
  misc_feature (473)..(753): NCBI GI: 256733978 Blast Desc: NECHADRAFT_77642 [Nectria haematococca mpVI 77-13-4]
MDSFHGSIHEARPCRLRSSETKLRYRNSYPEGAIEPARKSSCAESPSSKQVPEVSYVPLEASTAKQHFVKRLPMSESIGATGSCMIFGGAMAMLGSIAFLTFLWFGAGPEPEARSASWVWRSIALHSFIPQAAALIALAIRTVVAAQAAICTSMLSAIVIEKHCIPRSKAAHLSIMRAVNNGPRSIIWLLVSSKYQVTEAILAILLFLSSLGLQFSSTLLLSDLKTFGITSNALPGQVLGLLSDSQDTHTEAIGGFSFLDPVFSVYGEAKSPDSLSENRKLNASGVSDTGMMRRAFLPFSGATERTKIRSYDGPATVLSSRTTCMTPNITDVRYTTHVWLEWEGTYWGRLNGTLDYGTSLEQDIGVKPCGPEGCASLPFWCEIPGVVSGNPLLWQTNICFLTGVGNSLWSGDDGPIGGIVPDPWAINSTIYLVFSTNMRAQDWGLIWDGESHVPIAVDFEDEWRRYTALPGRFIKASLCFNSFNLDYNFVRMTASGNTTEPSVTYNRSTGDSEAGSVTKYFGVDNTTLAFDDRGIMNLYNVTTVPSHLDHVGHRVNIDRTLGIIWKDIYAETVLGVNPNDTIIACTHCNGGWAAGSSRDLGAVLDATIAATDRPADLIQTWVTAYALIIYNWYQKTFTVAQDAIVTGVIPVLVGSHCQEHNKCAGFVSVVTLTVLHSLTVCAIVVLYIKQTRHSRLANVWHTVSQLCTDDVSNIMDSSHDVSDKTVTRTLRNMNKDYMVQIGRSPAQGRIGAQKYSDCL

SEQ ID NO: 33719 - DNA, 801 bp, Muscodor strobelii
  misc_feature: SGI EST ID NO. CUFF.79582.0
  misc_feature: Variant of the nucleotide sequence at SEQ ID NO 33717
gcaattctcgccattttattgtttcttagctctttgggcctgcaattttcctcgacgctcttgctatcagatctcaaaacatttggaattacaagtaatgcattaccggggcaagttctggggttattgtcggattcacaagatacacatactgaggctatcggtggcttttcgtttctggaccccgtgttctctgtctacggagaggcaaagtcacccgactcactctccgagaatagaaagctcaatgcctccggtgtaagcgatacaggaatgatgaggcgagcatttctcccattcagcggagcaacagagagaaccaaaatccgatcatacgacggaccggcaacggtgctaagctcccggactacctgcatgacacccaatatcacagatgttcgatacacaacccacgtatggctagagtgggaagggacatactggggccgtctcaatggaacactagactatggtacaagcctcgaacaagacataggcgtgaagccctgcggcccagaaggctgcgcttcgcttccattctggtgcgaaataccgggcgttgtatcgggaaatccactcttatggcaaaccaacatttgctttctcactggagtaggtaactccttatggtcgggcgatgatggtcctataggcggcatcgttcctgatccgtgggcaatcaattctacgatctatcttgtcttctctacaaacatgagagcgcaagactggggccttatttgggacggggaaagccatgtgccaatcgccgtggacttcgaagacgaatggagacgctac

SEQ ID NO: 33720 - DNA, 351 bp, Muscodor strobelii
  misc_feature: SGI cDNA ID NO. 571636
  misc_feature: Encodes the peptide sequence at SEQ ID NO 33721
atggctaaacttggatttgttgtttacgccacagtcgctttcacggcagggcttgtccgaagcgattgcgagattggagtcaaatattgcggatacaacctcttgactatcggcccagactacctggacgacatgaaagcggctctctcgaaagatcacgagcctgtggatgatacagagctgctagcatctctattcaaatgcaaagatgcccacaccgactccgacaacctcgagtggttggagacctgtaacatcaaggagttccaggtctgcatgacaggtggggcgagtgaaggcgatgaatgtaaatccttggatgatgtgacaaagctgattgcacgcgcctga

SEQ ID NO: 33721 - protein, 116 aa, Muscodor strobelii
  misc_feature: SGI Peptide ID NO. 571636
  misc_feature (22)..(103): NCBI GI: 119495721 Blast Desc: NFIA_014320 [Neosartorya fischeri NRRL 181] gi|119412801|gb|EAW22742.1| conserved [Neosartorya fischeri NRRL 181]
  misc_feature (6)..(70): NCBI GI: 154299754 Blast Desc: [Botryotinia fuckeliana B05.10] gi|150857193|gb|EDN32385.1| [Botryotinia fuckeliana B05.10]
  misc_feature (1)..(69): NCBI GI: 115390416 Blast Desc: conserved [Aspergillus terreus NIH2624] gi|114195109|gb|EAU36809.1| conserved [Aspergillus terreus NIH2624]
  misc_feature (22)..(103): NCBI GI: 121719743 Blast Desc: conserved [Aspergillus clavatus NRRL 1] gi|119404782|gb|EAW15144.1| conserved [Aspergillus clavatus NRRL 1]
  misc_feature (22)..(69): NCBI GI: 159122750 Blast Desc: conserved [Aspergillus fumigatus A1163]
  misc_feature (22)..(69): NCBI GI: 70981492 Blast Desc: conserved [Aspergillus fumigatus Af293] gi|66843897|gb|EAL84238.1| conserved [Aspergillus fumigatus Af293]
  misc_feature (22)..(69): NCBI GI: 70995472 Blast Desc: conserved [Aspergillus fumigatus Af293] gi|41581203|emb|CAE47852.1| [Aspergillus fumigatus] gi|66850126|gb|EAL90453.1| conserved [Aspergillus fumigatus
  misc_feature (22)..(69): NCBI GI: 121715111 Blast Desc: conserved [Aspergillus clavatus NRRL 1] gi|119403321|gb|EAW13739.1| conserved [Aspergillus clavatus NRRL 1]
MAKLGFVVYATVAFTAGLVRSDCEIGVKYCGYNLLTIGPDYLDDMKAALSKDHEPVDDTELLASLFKCKDAHTDSDNLEWLETCNIKEFQVCMTGGASEGDECKSLDDVTKLIARA

SEQ ID NO: 33722 - DNA, 1155 bp, Muscodor strobelii
  misc_feature: SGI cDNA ID NO. 571637
  misc_feature: Encodes the peptide sequence at SEQ ID NO 33723
atggcttttctccagacctctgtttctcccaatgtctcagacaaagctactggcaaaggcgagcttgtcatcgttggaaccggcctggccagtgttcgccagttgactctggaggctatttcttacatcgagtcagctgactccgtcttctacctcgtctcagatgtctgtactggtctcttcatcgaagagcacaacaagaacacgtttgatctccactgcatgtacggggaaaccaaaagccgcgcggacacttatattcagatggcagagatcgctcgtgaggagggttacaaggccaaaatgttgcccggtatatctgcagaagactgcttgtttgcggatatcggaatcgatccggcgacctctagttgcgtgtctcacgaggcatcggctatgctgcttcacaagaaggtcatcgatactagcagtcacatgatcgtgtggcagcccggtgcagttggggctcccgctatgcagtttgagaacaagcatttcctccagttgatcgaccttctcgaggagcactacggggccaaccatccactgatcaactatatggctggcacctcgccttttcagaaatcagtgattgatcgtcatactattggtgcgatgcgtgaccctgatgtcatgaagacggtcacgccagcctccacattctatgtcccgcccaaggagctgccaattcacgatttcgagactcattgcaagtggtcaggtacctcagttaatgagattccccaggtcaatggtatggtcttggcacctacctcggtgttcagaatggtgttcccagacctaaaaatcgccaaactctacggagagcatgagctggatgtcatccgccaaatggacgagtcgcgagccgcgcccaagaagacatcagatcagccagtctcggaagcctttcgcaaggccttaatccagttagcgctctgccaccatcgccttgagggcctcaagccacaagagcggctcacagctttgggcgatcatgcgacacttttgagtcctagagaaaggtccctgatcgagtctgaaaacggtataatgagcgtgcacaaccgtttcgacaccgtcatcatattgattctagccgcagtagccgatgtcgaggagcctgatccacgggagctcatactggtatcctag

SEQ ID NO: 33723 - protein, 384 aa, Muscodor strobelii
  misc_feature: SGI Peptide ID NO. 571637
  misc_feature (21)..(204): Pfam Id: PF00590 Pfam Desc: Tetrapyrrole (Corrin/Porphyrin) Methylases
  misc_feature (21)..(58): Pfam Id: PF00590 Pfam Desc: Tetrapyrrole (Corrin/Porphyrin) Methylases
  misc_feature (20)..(238): NCBI GI: 284038580 Blast Desc: Uroporphyrin-III C/tetrapyrrole (Corrin/Porphyrin) methyltransferase [Spirosoma linguale DSM 74] gi|283817873|gb|ADB39711.1| Uroporphyrin-III C/tetrapyrrole DSM
  misc_feature (19)..(228): NCBI GI: 209966810 Blast Desc: tetrapyrrole (Corrin/Porphyrin) Methylases domain protein [Rhodospirillum centenum SW] gi|209960276|gb|ACJ00913.1| tetrapyrrole (Corrin/Porphyrin) Methylases domain protein SW]
  misc_feature (16)..(349): NCBI GI: 83645909 Blast Desc: HCH_03156 [Hahella chejuensis KCTC 2396] gi|83633952|gb|ABC29919.1| conserved [Hahella chejuensis KCTC 2396]
  misc_feature (60)..(313): NCBI GI: 238580487 Blast Desc: MPER_11585 [Moniliophthora perniciosa FA553] gi|215451423|gb|EEB90231.1| MPER_11585 [Moniliophthora perniciosa FA553]
  misc_feature (17)..(231): NCBI GI: 196155720 Blast Desc: methylase [Alteromonas macleodii 'Deep ecotype'] gi|196111499|gb|ACG65215.1| methylase [Alteromonas macleodii 'Deep ecotype']
  misc_feature (19)..(225): NCBI GI: 256821591 Blast Desc: uroporphyrin-III C/tetrapyrrole methyltransferase [Kangiella koreensis DSM 16069] gi|256795130|gb|ACV25786.1| uroporphyrin-III C/tetrapyrrole methyltransferase [Kangiella DSM
  misc_feature (19)..(232): NCBI GI: 239996284 Blast Desc: uroporphyrin-III C/tetrapyrrole (corrin/porphyrin) methyltransferase [Alteromonas macleodii ATCC 27126]
  misc_feature (20)..(239): NCBI GI: 37519601 Blast Desc: gll0032 [Gloeobacter violaceus PCC 7421] gi|35210592|dbj|BAC87973.1| gll0032 [Gloeobacter violaceus PCC 7421]
  misc_feature (15)..(225): NCBI GI: 127512204 Blast Desc: uroporphyrin-III C/tetrapyrrole methyltransferase [Shewanella loihica PV-4] gi|126637499|gb|ABO23142.1| Uroporphyrin-III C/tetrapyrrole (Corrin/Porphyrin) [Shewanella
  misc_feature (9)..(225): NCBI GI: 114562276 Blast Desc: uroporphyrin-III C/tetrapyrrole methyltransferase [Shewanella frigidimarina NCIMB 400] gi|114333569|gb|ABI70951.1| Uroporphyrin-III C/tetrapyrrole (Corrin/Porphyrin) [Shewanella
MAFLQTSVSPNVSDKATGKGELVIVGTGLASVRQLTLEAISYIESADSVFYLVSDVCTGLFIEEHNKNTFDLHCMYGETKSRADTYIQMAEIAREEGYKAKMLPGISAEDCLFADIGIDPATSSCVSHEASAMLLHKKVIDTSSHMIVWQPGAVGAPAMQFENKHFLQLIDLLEEHYGANHPLINYMAGTSPFQKSVIDRHTIGAMRDPDVMKTVTPASTFYVPPKELPIHDFETHCKWSGTSVNEIPQVNGMVLAPTSVFRMVFPDLKIAKLYGEHELDVIRQMDESRAAPKKTSDQPVSEAFRKALIQLALCHHRLEGLKPQERLTALGDHATLLSPRERSLIESENGIMSVHNRFDTVIILILAAVADVEEPDPRELILVS

SEQ ID NO: 33724 - DNA, 561 bp, Muscodor strobelii
  misc_feature: SGI cDNA ID NO. 571638
  misc_feature: Elevated expression when VOC is produced
  misc_feature: Encodes the peptide sequence at SEQ ID NO 33725
aaatgtaaaccgtctggcagtgatgatgatctaccatttcctattctccacgacgacgaggctactattgttcaatcaccgaggttagcaactgagtcagaggtacagatgactgaaggaccgcaagagctggcggagatggaaccaaacagacagaacctcatcactatacgaatcagcaatgctgaagaagttcggaatttgtatctgggttacttccagcaatgcaagcaggacatgtgcaagataattgccaaagcatgggttaaggttatcgagcctaaaaaacagtctacgcatccctattcaagtggagagacatctagaccagagtggtggccgcagtcctggggcgatagagttgaccaaaaggtcccacataaagagcctgaccatatcaagaagcccgcacgtattcacttacttgtgcacattctgcgcattgtgatggaacctcctgataggcaacatttcgccatacgtgatcaaagactcaatatccaagcactcaaggataccgcttccaacgctctagtgggggaaagcgattgcctcgcctga

SEQ ID NO: 33725 - protein, 186 aa, Muscodor strobelii
  misc_feature: SGI Peptide ID NO. 571638
  misc_feature (57)..(180): NCBI GI: 46122381 Blast Desc: FG05568.1 [Gibberella zeae PH-1]
  misc_feature (55)..(177): NCBI GI: 171686294 Blast Desc: protein product [Podospora anserina] gi|170943108|emb|CAP68761.1| protein product [Podospora anserina]
  misc_feature (54)..(180): NCBI GI: 256729679 Blast Desc: NECHADRAFT_101281 [Nectria haematococca mpVI 77-13-4]
  misc_feature (55)..(178): NCBI GI: 154309822 Blast Desc: BC1G_07381 [Botryotinia fuckeliana B05.10] gi|150851842|gb|EDN27035.1| BC1G_07381 [Botryotinia fuckeliana B05.10]
  misc_feature (57)..(180): NCBI GI: 164423137 Blast Desc: NCU09010 [Neurospora crassa OR74A] gi|157069963|gb|EAA28772.2| [Neurospora crassa OR74A]
  misc_feature (73)..(178): NCBI GI: 145613409 Blast Desc: MGG_01673 [Magnaporthe grisea 70-15] gi|145020487|gb|EDK04616.1| MGG_01673 [Magnaporthe grisea 70-15]
  misc_feature (55)..(178): NCBI GI: 156052096 Blast Desc: SS1G_07456 [Sclerotinia sclerotiorum 1980] gi|154705233|gb|EDO04972.1| SS1G_07456 [Sclerotinia sclerotiorum 1980]
  misc_feature (13)..(150): NCBI GI: 119180190 Blast Desc: CIMG_08753 [Coccidioides immitis RS]
  misc_feature (55)..(148): NCBI GI: 154287580 Blast Desc: [Ajellomyces capsulatus NAm1] gi|150408226|gb|EDN03767.1| [Ajellomyces capsulatus NAm1]
  misc_feature (63)..(147): NCBI GI: 58263164 Blast Desc: [Cryptococcus neoformans var. neoformans JEC21] gi|134107774|ref|XP_777498.1| CNBB0720 [Cryptococcus neoformans var. neoformans B-3501A] gi|50260190|gb|EAL22851.1| CNBB0720 var.
  misc_feature: Useful for introducing or modulating the production of volatile compounds
KCKPSGSDDDLPFPILHDDEATIVQSPRLATESEVQMTEGPQELAEMEPNRQNLITIRISNAEEVRNLYLGYFQQCKQDMCKIIAKAWVKVIEPKKQSTHPYSSGETSRPEWWPQSWGDRVDQKVPHKEPDHIKKPARIHLLVHILRIVMEPPDRQHFAIRDQRLNIQALKDTASNALVGESDCLA

SEQ ID NO: 33726 - DNA, 948 bp, Muscodor strobelii
  misc_feature: SGI EST ID NO. CUFF.79670.1
  misc_feature: Variant of the nucleotide sequence at SEQ ID NO 33724
aatgtaaaccgtctggcagtgatgatgatctaccatttcctattctccacgacgacgaggctactattgttcaatcaccgaggttagcaactgagtcagaggtacagatgactgaaggaccgcaagagctggcggagatggaaccaaacagacagaacctcatcactatacgaatcagcaatgctgaagaagttcggaatttgtatctgggttacttccagcaatgcaagcaggacatgtgcaagataattgccaaagcatgggttaaggttatcgagcctaaaaaacagtctacgcatccctattcaagtggagagacatctagaccagagtggtggccgcagtcctggggcgatagagttgaccaaaaggtcccacataaagagcctgaccatatcaagaagcccgcacgtattcacttacttgtgcacattctgcgcattgtgatggaacctcctgataggcaacatttcgccatacgtgatcaaagactcaatatccaagcactcaaggataccgcttccaacgctctagtgggggaaagcgattgcctcgcctgaatcttcgatgagatatctcaaccaactgtttagaatcgcgctcctggaagagcagtacaagcttggcaaaatcggtgaaataactagcataaatgtcctgaatatagtcgatcctaaacaaaaaagacatagtgttccttgcaactataacattgagtcgggcgcttgcgaccgtgagttgaatacgcatataacttgtgtatcacgttcgactcaaaccgagacctgtcagattcaatcaagcgatcaaatcgagatagggccacctccaactagcttcctccacgactgccattggcgtacttgtcaccagggacagatctggagtcctcctaatggtccagacgaaagtccaatcttctactataatcactgtgaaccaatctca

SEQ ID NO: 33727 - DNA, 636 bp, Muscodor strobelii
  misc_feature: SGI cDNA ID NO. 571639
  misc_feature: Encodes the peptide sequence at SEQ ID NO 33728
atgagcgacagcaagaaccaggttcctttctggagccccgccacctacaaagagagcattctcgacgaggctacctgggtccaagcatgggatatacgtgacgcctttgccgtcttggaacgcgaccagcccttgaacatcgccaccaccatgacagaggtcggcttccccgccatcaagctggaagatattgagcgatggaccaatacggatggcacattcggccccgccacccaagcccacgacgccttcgatctgtcggccaccgaaaccttacgccaactcgagcgatgcgccgacaaagccatgaccctgtccaaccccggccggcttggtcaagtcctgctcgctgccgaggcccaacagaagtccctcgctacgtcgtggcccgaataccgcaagatcaacaaggagcagggccgctgggtctctccggtccgtctcgatgctggagactcgggtcgcatgcaatggtggacgagagcgtgcagcaaggataccagaggtgccgaccaagagctgtcgactgcccgcaagactaggattgccagggtcctcgtgcctttcatcgtggcctggcgtgctggcagccgtgcccataccatgagcaatgctgtttgtaagagttgtatgtga

SEQ ID NO: 33728 - protein, 211 aa, Muscodor strobelii
  misc_feature: SGI Peptide ID NO. 571639
MSDSKNQVPFWSPATYKESILDEATWVQAWDIRDAFAVLERDQPLNIATTMTEVGFPAIKLEDIERWTNTDGTFGPATQAHDAFDLSATETLRQLERCADKAMTLSNPGRLGQVLLAAEAQQKSLATSWPEYRKINKEQGRWVSPVRLDAGDSGRMQWWTRACSKDTRGADQELSTARKTRIARVLVPFIVAWRAGSRAHTMSNAVCKSCM

SEQ ID NO: 33729 - DNA, 1725 bp, Muscodor strobelii
  misc_feature: SGI EST ID NO. CUFF.79655.0
  misc_feature: Variant of the nucleotide sequence at SEQ ID NO 33727
tggggaacattatgcgattggcggggggcaaagtgatgaagcggcacactaggaagtagaagcaggctgtgcaaggtgaggcgtttttaatgtcgtgtcgtggtagacatcacaggtagtcattagtcggcttagagttatatataggtatagaggttggataggaaatggtactactccagcttggtctatgcttagaggctaccgtatatgttgtcaagataaactgactgtcctagttgacttggaagtagcgaagctagccagagacatgtccaagatacatgcgctcacatccaggtctcgaacgtctgtgcggataatagaaagtgtgaacacgagcgagaccatctcgaattcatctcaatcctcacacagtattgtagagacgcgatctcctatcggtggctgatggcgatgctgtcgcgacacgtctcccctagcctgagttatcgatgcctgttggtaaggaggaacgcgtgtgtgggctgacagggaatactataatgggaccatcgcgaccgccgcgatcgcagtagcctcgcaccgtacaagtgctagaccattcattattccattctacaatttccaagtatgttaggaaggagttgatgttgattttgatcatgtcgggtaggagcgcattgcaaagtcacgacttttgtacagagtgatgatttgtggcagccaccccgcactacagcaattagttactgcctttcccttccaccccgccagccgtctttccctttacctctcccacatccacatcctcctccacgcttgtcaccctcgtcacctgtctcacgtcctgcaaccacatccattcctgcacagccaaacaggaaaaagtctcaaaggccacaccatgagcgacagcaagaaccaggttcctttctggagccccgccacctacaaagtcagcatcgtcgccacctgtccaacatgcggcaatgaccacatcccgactagcaagcaggcgaccatccaagtggtttgctctagtccgaaggagctctaggagagcattctcgacgaggctacctgggtccaagcatgggatatacgtgacgcctttgccgtcttggaacgcgaccagcccttgaacatcgccaccaccatgacagaggtcggcttccccgccatcaagctggaagatattgagcgatggaccaatacggatggcacattcggccccgccacccaagcccacgacgccttcgatctgtcggccaccgaaaccttacgccaactcgagcgatgcgccgacaaagccatgaccctgtccaaccccggccggcttggtcaagtcctgctcgctgccgaggcccaacagaagtccctcgctacgtcgtggcccgaataccgcaagatcaacaaggagcagggccgctgggtctctccggtccgtctcgatgctggagactcgggtcgcatgcaatggtggacgagagcgtgcagcaaggataccagaggtgccgaccaagagctgtcgactgcccgcaagactaggattgccagggtcctcgtgcctttcatcgtggcctggcgtgctggcagccgtgcccataccatgagcaatgctgtttgtaagagttgtatgtgagcaggataagacagttgcctacatgctatcgatacaagagctgatgagcggtatacgagaagcattctagaggaaacgaaagagagattacattttagctatgtagctcgctagctgga

SEQ ID NO: 33730 - DNA, 1005 bp, Muscodor strobelii
  misc_feature: SGI cDNA ID NO. 571640
  misc_feature: Elevated expression when VOC is produced
  misc_feature: Encodes the peptide sequence at SEQ ID NO 33731
atgccccctaaattacccagtggtacgaaagcaacagcagcaggccgtcgagataaaaagatgacgactcgaagcctggcgaaaggtatggctgatcaacgggaagagatcatcaagctcaaagagaaactttccgaactgcaggacaagtcaaagaccgatccagaggcccaaaaagaggcagatgcactccagaaaagcatcgacgcaatggagattgatattaaagacgaggacccagctggtgccaagtccgaccttttcgtaagccaaaagcgagagttagatgaagcatccaagtcccaggaatccgcgtctgaagctaaggatagtggcgatgatgatgcgggtatcgatatcgaagatattatgcaagccttgaacctcggttctagctatcaagatgagagcgaccaacgctatgtgggctgggccaaggccggactcgggcatccattcgtcatcgtccagtacggaccggagaacataggcaaataccgaatgaaacgatcggccgacgttgttacgaccattaccaacgatcgtgagatgaacgtcgcacgcaataacctcggtgaagagaaagatgacgatggtaaatatattttacaaaaaggctgcatcaagtctatctacggcgtcgcttgggactaccccgacaaccacgagaaccctcttgaactcttgaatcccgacaagtggccagagggaaaaacgcgaagaattcccccatatactcgaatcaaggtcaagttgaccagcggagccaaaacgtggttgactcggtcgagattccgagcgctgtggaatctaccattatcaacgccagaagatattgagatgagcgacaaggtaatttggccgaaagtccagactgccaagcactctggtgatttagcaattgtgattgccgccaagaagtacgaagagaaataccaagcctatgttcaagggggtagggaaggtggcgaggaacgatctccttcgccggacccgcttccataa

SEQ ID NO: 33731 - protein, 334 aa, Muscodor strobelii
  misc_feature: SGI Peptide ID NO. 571640
  misc_feature: Useful for introducing or modulating the production of volatile compounds
MPPKLPSGTKATAAGRRDKKMTTRSLAKGMADQREEIIKLKEKLSELQDKSKTDPEAQKEADALQKSIDAMEIDIKDEDPAGAKSDLFVSQKRELDEASKSQESASEAKDSGDDDAGIDIEDIMQALNLGSSYQDESDQRYVGWAKAGLGHPFVIVQYGPENIGKYRMKRSADVVTTITNDREMNVARNNLGEEKDDDGKYILQKGCIKSIYGVAWDYPDNHENPLELLNPDKWPEGKTRRIPPYTRIKVKLTSGAKTWLTRSRFRALWNLPLSTPEDIEMSDKVIWPKVQTAKHSGDLAIVIAAKKYEEKYQAYVQGGREGGEERSPSPDPLP

SEQ ID NO: 33732 - DNA, 1563 bp, Muscodor strobelii
  misc_feature: SGI EST ID NO. CUFF.79664.0
  misc_feature: Variant of the nucleotide sequence at SEQ ID NO 33730
ccggatagtttgatactgaaagagctataatataatccattaaaactatagatctagaaactgctagagtatgggtatggctttctataaatctgggacattcctttaccattatgattcgaattccatcaggcattccatcttcgaaattcaacatgccccctaaattacccagtggtacgaaagcaacagcagcaggccgtcgagataaaaagatgacgactcgaagcctggcgaaaggtatggctgatcaacgggaagagatcatcaagctcaaagagaaactttccgaactgcaggacaagtcaaagaccgatccagaggcccaaaaagaggcagatgcactccagaaaagcatcgacgcaatggagattgatattaaagacgaggacccagctggtgccaagtccgaccttttcgtaagccaaaagcgagagttagatgaagcatccaagtcccaggaatccgcgtctgaagctaaggatagtggcgatgatgatgcgggtatcgatatcgaagatattatgcaagccttgaacctcggttctagctatcaagatgagagcgaccaacgctatgtgggctgggccaaggccggactcgggcatccattcgtcatcgtccagtacggaccggagaacataggcaaataccgaatgaaacgatcggccgacgttgttacgaccattaccaacgatcgtgagatgaacgtcgcacgcaataacctcggtgaagagaaagatgacgatggtaaatatattttacaaaaaggctgcatcaagtctatctacggcgtcgcttgggactaccccgacaaccacgagaaccctcttgaactcttgaatcccgacaagtggccagagggaaaaacgcgaagaattcccccatatactcgaatcaaggtcaagttgaccagcggagccaaaacgtggttgactcggtcgagattccgagcgctgtggaatctaccattatcaacgccagaagatattgagatgagcgacaaggtaatttggccgaaagtccagactgccaagcactctggtgatttagcaattgtgattgccgccaagaagtacgaagagaaataccaagcctatgttcaagggggtagggaaggtggcgaggaacgatctccttcgccggacccgcttccataagagacggacgacatgattgaatagatgggttgatatatcagcagccgggccggtcccactgttttgccgagagtttctggctatgtttttctttccttttctgcgctctacaatcgctatctttgatctcttgtctttcggacgcgagtgttctattctatatgacatggcactggaattattcctttctttcgtttttgcactcaaatagtagttgcgaggtcgaagtttgcagattaatatcaatagagtttcgttatcactgtcgcaacctaaaggacgaacatataccttgtattcaatcaaagtactactgcgtatgcgtgaagttactacatcctggccgaacgctagcccgtgatgtatcagagcgctacttgataacagtacatgtctagccact

SEQ ID NO: 33733 - DNA, 583 bp, Muscodor strobelii
  misc_feature: SGI cDNA ID NO. 571641
  misc_feature: Elevated expression when VOC is produced
  misc_feature: Encodes the peptide sequence at SEQ ID NO 33734
atgatattgatccaattggcccgtattctatatcgaaataagcgctggggaagaccatctacgcgagccaccatcagcagtctatatggggcgattcatgttaacatccaattatcacgacctttgaagctcgatgcaggacagtatgtcctcctgtggatgcctatcgatgtccgctctatcctgcagctccatcctttcgtcgttacatcctgggccgaggtcccacaacttagcctcgacttgtatgtccaaccacagagagggtttaccttcagactgctgcgctcatgcccgcctggagagacggctgtgtcacagcatcgagctctcatcagcggtccacatggcatcagcgagcccgtgtgggactacccctctgtcctgatgatttcgaccggtacaggcatagctgcgatgctaccatatctgaccaaggtgatctatggctaccgagccgggcggggtcgcaccagaagggtacaccttgtctggcaagtcccgaatcttgagtcgctcaatgctgcgcgccagctgctaaactccgccctggatgacgatagcctgggccaaggcaatgtag

SEQ ID NO: 33734 - protein, 194 aa, Muscodor strobelii
  misc_feature: SGI Peptide ID NO. 571641
  misc_feature (15)..(120): Pfam Id: PF08022 Pfam Desc: FAD-binding domain
  misc_feature (125)..(177): Pfam Id: PF08030 Pfam Desc: Ferric reductase NAD binding domain
  misc_feature (3)..(194): NCBI GI: 70996817 Blast Desc: cell surface metalloreductase (FreA) [Aspergillus fumigatus Af293] gi|66850799|gb|EAL91125.1| cell surface metalloreductase (FreA), [Aspergillus fumigatus Af293] cell
  misc_feature (2)..(194): NCBI GI: 255935033 Blast Desc: Pc13g00960 [Penicillium chrysogenum Wisconsin 54-1255] gi|211583163|emb|CAP91165.1| Pc13g00960 [Penicillium chrysogenum Wisconsin 54-1255]
  misc_feature (6)..(194): NCBI GI: 70996430 Blast Desc: ferric-chelate reductase [Aspergillus fumigatus Af293] gi|66850605|gb|EAL90932.1| ferric-chelate reductase, [Aspergillus fumigatus Af293]
  misc_feature (3)..(194): NCBI GI: 159122690 Blast Desc: conserved [Aspergillus fumigatus A1163]
  misc_feature (32)..(191): NCBI GI: 242797832 Blast Desc: conserved [Talaromyces stipitatus ATCC 10500] gi|218716388|gb|EED15809.1| conserved [Talaromyces stipitatus ATCC 10500]
  misc_feature (17)..(191): NCBI GI: 154274215 Blast Desc: [Ajellomyces capsulatus NAm1] gi|150415567|gb|EDN10920.1| [Ajellomyces capsulatus NAm1]
  misc_feature (2)..(194): NCBI GI: 238492561 Blast Desc: cell surface metalloreductase FreA-like, [Aspergillus flavus NRRL3357] gi|220696011|gb|EED52353.1| cell surface metalloreductase FreA-like, [Aspergillus flavus NRRL3357]
  misc_feature (9)..(191): NCBI GI: 212547026 Blast Desc: cell surface metalloreductase (FreA), [Penicillium marneffei ATCC 18224] gi|210064426|gb|EEA18522.1| cell surface metalloreductase (FreA), [Penicillium marneffei ATCC 18224]
  misc_feature (9)..(191): NCBI GI: 242763376 Blast Desc: conserved [Talaromyces stipitatus ATCC 10500] gi|218723759|gb|EED23176.1| conserved [Talaromyces stipitatus ATCC 10500]
  misc_feature (32)..(191): NCBI GI: 242821008 Blast Desc: conserved [Talaromyces stipitatus ATCC 10500] gi|218712515|gb|EED11940.1| conserved [Talaromyces stipitatus ATCC 10500]
  misc_feature: Useful for introducing or modulating the production of volatile compounds
MILIQLARILYRNKRWGRPSTRATISSLYGAIHVNIQLSRPLKLDAGQYVLLWMPIDVRSILQLHPFVVTSWAEVPQLSLDLYVQPQRGFTFRLLRSCPPGETAVSQHRALISGPHGISEPVWDYPSVLMISTGTGIAAMLPYLTKVIYGYRAGRGRTRRVHLVWQVPNLESLNAARQLLNSALDDDSLGQGNV

SEQ ID NO: 33735 - DNA, 636 bp, Muscodor strobelii
  misc_feature: SGI EST ID NO. CUFF.79694.0
  misc_feature: Variant of the nucleotide sequence at SEQ ID NO 33733
cgagatcgtctgtgcctaagtggtcgatttttggggttttaggcatttcagtggccatgatattgatccaattggcccgtattctatatcgaaataagcgctggggaagaccatctacgcgagccaccatcagcagtctatatggggcgattcatgttaacatccaattatcacgacctttgaagctcgatgcaggacagtatgtcctcctgtggatgcctatcgatgtccgctctatcctgcagctccatcctttcgtcgttacatcctgggccgaggtcccacaacttagcctcgacttgtatgtccaaccacagagagggtttaccttcagactgctgcgctcatgcccgcctggagagacggctgtgtcacagcatcgagctctcatcagcggtccacatggcatcagcgagcccgtgtgggactacccctctgtcctgatgatttcgaccggtacaggcatagctgcgatgctaccatatctgaccaaggtgatctatggctaccgagccgggcggggtcgcaccagaagggtacaccttgtctggcaagtcccgaatcttgagtcgctcaatgctgcgcgccagctgctaaactccgccctggatgacgatagcctgggccaaggcaatg

SEQ ID NO: 33736 - DNA, 606 bp, Muscodor strobelii
  misc_feature: SGI cDNA ID NO. 571642
  misc_feature: Elevated expression when VOC is produced
  misc_feature: Encodes the peptide sequence at SEQ ID NO 33737
atcggttatagctttcttacggcagaccaagcgactaacgtcgccaacacctttggtcgtgccattcaggccgtgatagagatccccggtagcacagtcagtgatgttgatctctttagcactcatgactacgagcagattctggcatggaatgtggaacagccaggcgccacaagcgaaactgtgcacgatttgattgaaacccaggccagggctcgccctgataaccaggccgtttgtggatgggacggtgctctcacctacgccgagctgtccatccagtcaagccgtctagctcagcatctacttacgtgcggattacaatcgcaaatgccggtcttaaccgtgttcagcaatagtaaatgggcagtcatcgccgtggttgcggtcatgaaggcaggggccatattagtgcctatcgacagcgagaggcatgcaatggtgcattgggtagtcaagaaaacaacggcgaagatgattctaacctctgataatagtttgcaacctgcagacaatatgaaaatgcaggttttccacattaacgaaagaacaatgtcgaagatacctacttaccacgctccggagcgcctctccgtggagatctag

SEQ ID NO: 33737 - protein, 201 aa, Muscodor strobelii
  misc_feature: SGI Peptide ID NO. 571642
  misc_feature (87)..(170): Pfam Id: PF00501 Pfam Desc: AMP-binding enzyme
  misc_feature (1)..(194): NCBI GI: 116205980 Blast Desc: CHGG_02283 [Chaetomium globosum CBS 148.51] gi|88182880|gb|EAQ90348.1| CHGG_02283 [Chaetomium globosum CBS 148.51]
  misc_feature (1)..(189): NCBI GI: 164425711 Blast Desc: NCU04531 [Neurospora crassa OR74A] gi|157071032|gb|EAA27706.2| [Neurospora crassa OR74A]
  misc_feature (1)..(189): NCBI GI: 171678561 Blast Desc: protein product [Podospora anserina] gi|170937350|emb|CAP62008.1| protein product [Podospora anserina]
  misc_feature (4)..(188): NCBI GI: 39942642 Blast Desc: MGG_03401 [Magnaporthe grisea 70-15] gi|145015580|gb|EDK00070.1| MGG_03401 [Magnaporthe grisea 70-15]
  misc_feature (3)..(188): NCBI GI: 242798980 Blast Desc: nonribosomal peptide synthase, [Talaromyces stipitatus ATCC 10500] gi|218716625|gb|EED16046.1| nonribosomal peptide synthase, [Talaromyces stipitatus ATCC 10500]
  misc_feature (6)..(163): NCBI GI: 212541344 Blast Desc: nonribosomal peptide synthase, [Penicillium marneffei ATCC 18224] gi|210068126|gb|EEA22218.1| nonribosomal peptide synthase, [Penicillium marneffei ATCC 18224]
  misc_feature (10)..(190): NCBI GI: 189208862 Blast Desc: HC-toxin synthetase [Pyrenophora tritici-repentis Pt-1C-BFP] gi|187976857|gb|EDU43483.1| HC-toxin synthetase [Pyrenophora tritici-repentis Pt-1C-BFP]
  misc_feature (10)..(191): NCBI GI: 240108806 Blast Desc: nonribosomal peptide synthetase, [Coccidioides posadasii C735 delta SOWgp]
  misc_feature (10)..(163): NCBI GI: 189208864 Blast Desc: HC-toxin synthetase [Pyrenophora tritici-repentis Pt-1C-BFP] gi|187976858|gb|EDU43484.1| HC-toxin synthetase [Pyrenophora tritici-repentis Pt-1C-BFP]
  misc_feature (6)..(164): NCBI GI: 189211621 Blast Desc: HC-toxin synthetase [Pyrenophora tritici-repentis Pt-1C-BFP] gi|187979339|gb|EDU45965.1| HC-toxin synthetase [Pyrenophora tritici-repentis Pt-1C-BFP]
  misc_feature (55)..(162): SWISSPROT Homolog: EC 5.1.1.11 Phenylalanine racemase (ATP-hydrolyzing)
  misc_feature: Useful for introducing or modulating the production of volatile compounds
IGYSFLTADQATNVANTFGRAIQAVIEIPGSTVSDVDLFSTHDYEQILAWNVEQPGATSETVHDLIETQARARPDNQAVCGWDGALTYAELSIQSSRLAQHLLTCGLQSQMPVLTVFSNSKWAVIAVVAVMKAGAILVPIDSERHAMVHWVVKKTTAKMILTSDNSLQPADNMKMQVFHINERTMSKIPTYHAPERLSVEI

SEQ ID NO: 33738 - DNA, 658 bp, Muscodor strobelii
  misc_feature: SGI EST ID NO. CUFF.79734.1
  misc_feature: Variant of the nucleotide sequence at SEQ ID NO 33736
atagctttcttacggcagaccaagcgactaacgtcgccaacacctttggtcgtgccattcaggccgtgatagagatccccggtagcacagtcagtgatgttgatctctttagcactcatgactacgagcagattctggcatggaatgtggaacagccaggcgccacaagcgaaactgtgcacgatttgattgaaacccaggccagggctcgccctgataaccaggccgtttgtggatgggacggtgctctcacctacgccgagctgtccatccagtcaagccgtctagctcagcatctacttacgtgcggattacaatcgcaaatgccggtcttaaccgtgttcagcaatagtaaatgggcagtcatcgccgtggttgcggtcatgaaggcaggggccatattagtgcctatcgacagcgagaggcatgcaatggtgcattgggtagtcaagaaaacaacggcgaagatgattctaacctctgataatagtttgcaacctgcagacaatatgaaaatgcaggttttccacattaacgaaagaacaatgtcgaagatacctacttaccacgctccggagcgcctctccgtggagatctagatgatccagatcaaagagcctgcattctcttctcgcgagggagcaaaggctcgcaggcg

SEQ ID NO: 33739 - DNA, 1050 bp, Muscodor strobelii
  misc_feature: SGI cDNA ID NO. 571644
  misc_feature: Encodes the peptide sequence at SEQ ID NO 33740
atgatactcgcgcttgacgaatactacttcatagtacctagttgtacgcgaggcgaaccgtacgcgatcgtcccgagcttcgaagaatggtcgttccctcacaatcaggtcccatcactctggcggccaatccaatcaacttacactgctgccgatgagcgtggaagtggaagcggaactgggagcgtgggggtgcaaggttcgactcgttgtgctgtggccaatgccccctgggccctcgacaggtgccacatcatcccaaagcatcaggagctatggttttacaggaacgggatggatcgatacgcatctacgggctgcctcgacatcgacgacccggccaatctttgtattttccgcaaagacatccacactgccttcgattactggattttcgcaatcgtacccaaaggcggtcggtacgttgtgcactctcttcaggcctggaatgagtggtccgagttcgcggctgagttccacaacgtccctttttacgacgccgtccaagtcagatatctatttgcacgatttgctgccgccgttttccggctcgtgaagcctttcattgccaacgccaccatcagtcgtcgcgtcgcgctgcgcgttgagtgcctcagtgaaagccagagtacgacgttcgagactcagattaagtggacgaccggcagagaactaaacaaccggtatggtggtggcaagtctagaagctccagtcctcgcaaaagagccagaggcgacgacagcaatcccactctacaacattgccgtcggggatctacagatagatcaccagttgggttggatagcagggagagcattagcgaactcgaaagtttggagactccaattgaaccgccgtatcataacttttggaatcatgtgcccacggatgacgaagagtgggaagccgaggggcccaggggcaggacccggaagcgtgcctccagtatatttgatcataagagccgtgaggactcaacgcgacggaaacgacattgcatatcaattggcactggtggtcaagccaacgatgaaggggtgatacaatga

SEQ ID NO: 33740 - protein, 349 aa, Muscodor strobelii
  misc_feature: SGI Peptide ID NO. 571644
  misc_feature (2)..(327): NCBI GI: 225563022 Blast Desc: conserved [Ajellomyces capsulatus G186AR]
  misc_feature (2)..(251): NCBI GI: 225561703 Blast Desc: conserved [Ajellomyces capsulatus G186AR]
  misc_feature (2)..(249): NCBI GI: 261201025 Blast Desc: conserved [Ajellomyces dermatitidis SLH14081] gi|239593985|gb|EEQ76566.1| conserved [Ajellomyces dermatitidis SLH14081] gi|239607139|gb|EEQ84126.1| conserved [Ajellomyces
  misc_feature (2)..(251): NCBI GI: 240275306 Blast Desc: conserved [Ajellomyces capsulatus H143]
  misc_feature (2)..(307): NCBI GI: 240279842 Blast Desc: conserved [Ajellomyces capsulatus H143]
  misc_feature (1)..(247): NCBI GI: 256724872 Blast Desc: NECHADRAFT_66931 [Nectria haematococca mpVI 77-13-4]
  misc_feature (21)..(249): NCBI GI: 154283163 Blast Desc: [Ajellomyces capsulatus NAm1] gi|150410557|gb|EDN05945.1| [Ajellomyces capsulatus NAm1]
  misc_feature (2)..(249): NCBI GI: 240282322 Blast Desc: conserved [Ajellomyces capsulatus H143]
  misc_feature (2)..(235): NCBI GI: 46127749 Blast Desc: FG08252.1 [Gibberella zeae PH-1]
  misc_feature (2)..(238): NCBI GI: 225559386 Blast Desc: conserved [Ajellomyces capsulatus G186AR]
MILALDEYYFIVPSCTRGEPYAIVPSFEEWSFPHNQVPSLWRPIQSTYTAADERGSGSGTGSVGVQGSTRCAVANAPWALDRCHIIPKHQELWFYRNGMDRYASTGCLDIDDPANLCIFRKDIHTAFDYWIFAIVPKGGRYVVHSLQAWNEWSEFAAEFHNVPFYDAVQVRYLFARFAAAVFRLVKPFIANATISRRVALRVECLSESQSTTFETQIKWTTGRELNNRYGGGKSRSSSPRKRARGDDSNPTLQHCRRGSTDRSPVGLDSRESISELESLETPIEPPYHNFWNHVPTDDEEWEAEGPRGRTRKRASSIFDHKSREDSTRRKRHCISIGTGGQANDEGVIQ

SEQ ID NO: 33741 - DNA, 3187 bp, Muscodor strobelii
  misc_feature: SGI EST ID NO. CUFF.79710.0
  misc_feature: Variant of the nucleotide sequence at SEQ ID NO 33739
gttaaattcaacatgcttttcgtatatgattctgaaaatcctaacaaaggcgattcaactccaaacagatgcaaagtatagctcgcgattatttggggactatctgcatcgaatactgcgtcgattctcccccgaggaaaagcccaggtatagacaatattagagtaaactagtctcaaagcactctcccgagtctcctttcaaagagtatctcatgtgcactaaaatctagactgtgaggcttcgtgcagttaagcagcttaagatattctttatccatcctgctccagggtttacatatagaacattcacatggtccgtcaggagggaagacccgtcttgcctcattccagtcatgccgctgatatgaaacctcttgtactcggtgtgcccacttccaacaccaatctagatcatgtcgcgtaaatgtactccctcgggcattgcgatagaatatcatctcgcagaagtcggagcaatcgtgacagagagctcggatccagtcgcctttagcttcattatcttcatcatagcctttctccacgctacaacgatgacatgtaacgcacacacggcgaacccctagtctgctgaatttctcaatctgtttacaggctagtgtcggttctttccccagcttgcggtttgcctccgcgtctagcgctgggtttgacctgctggtctgccataaccaccactttcgcttttgaattaaaaagatgtcgtaatccagcgaaagaggtatacttctatgtttatcattatccatagaggcgagttcgcccatcagcaggttgcagtttcgaccgcataactgcagccgctggtaaacattctcaacgcaggtcttggattcccgacacactaggaatagtacggggcacggtgcattcttaattcttctgaatgatgggcaatcgatgaaacgattctgggcaggcacggccagctgccagataatcaaccgaagttcgggaggcaggcgtgggaacctggtaaattcggtcgctacagtttgcagtgaaggatcatggatgtggtcggccatggtggatgtcgatagccaaagctactgggttaaattttgaatgaacagttgcaacagaacgagataggggccttaaatacattaaatgcggggtaatcatatgagaagacggagatggaaagatcgatggccgggcaggggtatggacccgctggtcgtggttgccttgttccgctgctgattgtaggacccatagattcaaacaacgggtgcccaaagtagtcaagtaaacaaacatcaacgtctgcaacagcagtacacacatcttcaatcttgccttatgatccagtctacccttctacatttctacatacttcaaccagaggaacacaacacacctatcattttatcaaaatcatagctgcagttaatgctggatcaatgtgccctcccgccgcggttgcagcaaaagctccgaccgcgaaggcgaccatcaccgtctcgattaccagcgatatctcgagacgtcatactctttctacaccctgcttacagtccgccatgtaacgtgcttttcaagcttccacgagtggattccgagtttcagacgccagatgcgaacacggcggacgcgacagacacatcctccgtcacgtacggcgcacaccatgcgaccgcgcttatcgcttgccatatcattgcaaataatgcctttgatggatatctatcatgcgatgtcgagggcacacagcccgtcatagattaaaaacccggcgcagctaacagcgagatgatactcgcgcttgacgaatactacttcatagtacctagttgtacgcgaggcgaaccgtacgcgatcgtcccgagcttcgaagaatggtcgttccctcacaatcaggtcccatcactctggcggccaatccaatcaacttacactgctgccgatgagcgtggaagtggaagcggaactgggagcgtgggggtgcaaggttcgactcgttgtgctgtggccaatgccccctgggccctcgacaggtgccacatcatcccaaagcatcaggagctatggttttacaggaacgggatggatcgatacgcatctacgggctgcctcgacatcgacgacccggccaatctttgtattttccgcaaagacatccacactgccttcgattactggattttcgcaatcgtacccaaaggcggtcggtacgttgtgcactctcttcaggcctggaatgagtggtccgagttcgcggctgagttccacaacgtccctttttacgacgccgtccaagtcagatatctatttgcacgatttgctgccgccgttttccggctcgtgaagcctttcattgccaacgccaccatcagtcgtcgcgtcgcgctgcgcgttgagtgcctcagtgaaagccagagtacgacgttcgagactcagattaagtggacgaccggcagagaactaaacaaccggtatggtggtggcaagtctagaagctccagtcctcgcaaaagagccagaggcgacgacagcaatcccactctacaacattgccgtcggggatctacagatagatcaccagttgggttggatagcagggagagcattagcgaactcgaaagtttggagactccaattgaaccgccgtatcataacttttggaatcatgtgcccacggatgacgaagagtgggaagccgaggggcccaggggcaggacccggaagcgtgcctccagtatatttgatcataagagccgtgaggactcaacgcgacggaaacgacattgcatatcaattggcactggtggtcaagccaacgatgaaggggtgatacaatgaacacattgcggtcttccgccccaatcaatctgcttctctagaccccctgtgatgccgtatacaaattctctagcctgtagaccccatctgagccactttcgcaattctagatagttagcgatcaagtactttcacgagaggcatctgcgtaagatcttaagcaagattgcagactgagaaaatagcttggcaaaatgatccaaggcttttgtttccggcaaccaaccatgaagacaggctcaggtgtgcacgcatcagtaaccaagagacgatggcgtaccacccgaaactcccacagctggaaaacgcttcgtgcccagatggttcgcaagagtagtgagatgagctgaccagtcaag

SEQ ID NO: 33742 - DNA, 2958 bp, Muscodor strobelii
  misc_feature: SGI cDNA ID NO. 571645
  misc_feature: Encodes the peptide sequence at SEQ ID NO 33743
atgtatagcgtcataaccaagctggcacgcccaggcttcgccctgaagctgcccacctcgataccagctcgagcgcctatcactctccgaagatgctatgcttcctcgcagctcgacctaccaaccctagatcgatcatggcgccaaagatggaccgaaaacaaggccaggacgctggaccaagctgacagccttgcgccaacttcatcgcccgtccttcgatccgaatccgatctcgccgcagctcgcgcccgtcatatgtacattctgtccatgtttccatacccctcaggaaacttgcacttgggacatctgcgggtctacactatcgtcgacgttgttgcgagatatcacaggctgaaaggacaaaatgtcttgctcccgatgggatgggacgcctttggtcttccggccgaaaacgccgcgatcgaacgaggcattgacccggcagattggaccaaagacaatattgctcggatgaaggagcagctagaggtcatgaacgcgaacttcgactggtcgagagaactggcgacttgcgatcccgacttttacaagcacactcaaaagctcttcatccagatgtaccaggacgggcttgtcacccggcagcgtgctgttgttaactgggaccctgtggacaagacagtactagcaaatgagcaggtagattccgagggccgatcgtggagatccggtgcactggtcgaaaagaagcctctcgagcaatggtttttccgcatcacggaattcaaagaagcattgcttcgcgaccttgatgtgctggccaacgaaaataattggccggagcgagttttgacgatgcagaagaactggcttggcaagtcaatgggcgcaagatatcgattccctctcgcgatcgagaatccggcacaatttcgatgccccgaaaatcttgagatttacactactagacctgaaactatatttggagtccagttcatagccatctctccagacagcaagcttgcgaaaaccctcgccgagtctgacccgcgagttcgtgcagctttggaaaatttcgagaatgggcccgagagggatatgcgaggatacaggataccgtacatttcagctactaatccaattagtcgtcttgcggacgactctgcttctcgtgctgagcctttgcctgttttcattgccccctatgtccggggtgattatgaaactggagcagtgatgggagttcccgcgcatgatgcgagagattttgcattctggaagcaaaattccgagactggcgaggtgaaatatgctgtaacgccggatccttcgggtttagcaccgcagaaggagggtccatatctcgactctgggtatatgaccgagctggctggagagtattgcggaaggcagtccgaagcagttgtgacacatctcgtggaacgcatcaaggaacaaacaggcctagccgagattcgcgagaaatggaaacttcgagactggctaatcagcaggcagaggtattggggcacaccaattcctgttgtccactgccagacctgcgggcctcagcccgtcccagatgaccagcttcccgttgaactccccaagatcgatcatcattgggcaggcggccgagctggcaatcctctagaatcggcgactgactgggtcaatacatcgtgccccaagtgtcatggtcccgcaaaacgagacacggatactatggacacattcgtggattccagctggtattatatgagattcgcagacccacacaataaagatgcgcccgtttctgagctagcagcgaagactcagcttcccgtagacatctacatcggaggcgttgagcacgcgatcttgcatttgctctatgcgcggttcttctataaagccttcatgggcactttgtacccgaaccaaacgcctgaaggcttgcctgagcctctaaaagagtcctcgcatgaacctttcaaacgtctcatcacacaagggatggtccacggcaagacatatttagatccagacagtggacgcttcctcaaaccagacgaagtcgacttatcaaacccctcagagccaaaattgatatctacaggtaaacagcctatcgtcacatatgaaaaaatgtcaaagtcaaaatacaacggcgtcgacccaacgacattcatcggcaaatacggagccgatgccactcgtgcccacattctcttccaagccccagtcggcgaggtgctcaactgggatgaacacaaaatcaccggcatcactcgatggcttggtcgagtacacgatcacgtacagaacttcgtcctgacgacggatagagtgacgatgcattggatacatcagaatccattcaacagcaagtcgtacttcgccaaggagcgacggatcgatttggtcggtaaacaggcgatactgtgggagaagaatatggagacctggcgtgcagtgcaaatggccattgcggacgtcacaacggcgtgcgagaaagtgtatcccctgaatactgctgtttcgacactgatgagtcttacgaacgcgataatggacaacaccatggcttcggaccttatcagatttgaagccttaacggtgctcgttcgattgatggcgccgattgccccggcatttgcagaggaatgctggagtattctacgacctggatctgggatgctgtttgacgagacatcgcctgtaccttggccagtcgttgatgggtcattgcctctgctgcaagtcgatcatcaaccctgtactgtggcgatagacggcaagaagcgatatgtgctcgagattcccaaaccggctgatatcgacggaccagaacttaccgcctggttcaacgagcaggttctacaggctcctgaggtccagaagaggctgcatatgcctgagtacgatgtacgccgggcgacgaaaatgttcttgatgaagggtggcaaagggatcaactatttgatgccgaaagaagcaaaaccatga

SEQ ID NO: 33743 - protein, 985 aa, Muscodor strobelii
  misc_feature: SGI Peptide ID NO. 571645
  misc_feature (46)..(739): Pfam Id: PF00133 Pfam Desc: tRNA synthetases class I (I, L, M and V)
  misc_feature (87)..(750): Pfam Id: PF09334 Pfam Desc: tRNA synthetases class I (M)
  misc_feature (852)..(889): Pfam Id: PF08264 Pfam Desc: Anticodon-binding domain
  misc_feature (488)..(504): Pfam Id: PF00133 Pfam Desc: tRNA synthetases class I (I, L, M and V)
  misc_feature (699)..(739): Pfam Id: PF00133 Pfam Desc: tRNA synthetases class I (I, L, M and V)
  misc_feature (94)..(139): Pfam Id: PF00133 Pfam Desc: tRNA synthetases class I (I, L, M and V)
  misc_feature (87)..(172): Pfam Id: PF09334 Pfam Desc: tRNA synthetases class I (M)
  misc_feature (698)..(723): Pfam Id: PF09334 Pfam Desc: tRNA synthetases class I (M)
  misc_feature (3)..(979): NCBI GI: 116198217 Blast Desc: CHGG_07264 [Chaetomium globosum CBS 148.51] gi|88178543|gb|EAQ86011.1| CHGG_07264 [Chaetomium globosum CBS 148.51]
  misc_feature (30)..(981): NCBI GI: 256730936 Blast Desc: [Nectria haematococca mpVI 77-13-4]
  misc_feature (30)..(979): NCBI GI: 46125501 Blast Desc: FG07128.1 [Gibberella zeae PH-1]
  misc_feature (30)..(979): NCBI GI: 85101721 Blast Desc: leucyl-tRNA synthetase [Neurospora crassa OR74A] gi|135142|sp|P15181.1|SYLM_NEUCR RecName: Full=Leucyl-tRNA synthetase, mitochondrial; AltName: Full=Leucine--tRNA ligase;
  misc_feature (48)..(981): NCBI GI: 145607167 Blast Desc: MGG_04042 [Magnaporthe grisea 70-15] gi|145014765|gb|EDJ99333.1| MGG_04042 [Magnaporthe grisea 70-15]
  misc_feature (30)..(953): NCBI GI: 171693671 Blast Desc: protein product [Podospora anserina] gi|170946784|emb|CAP73588.1| protein product [Podospora anserina]
  misc_feature (35)..(926): NCBI GI: 119467784 Blast Desc: leucyl-tRNA synthetase [Neosartorya fischeri NRRL 181] gi|119405850|gb|EAW15801.1| leucyl-tRNA synthetase [Neosartorya fischeri NRRL 181]
  misc_feature (5)..(979): NCBI GI: 255931483 Blast Desc: Pc12g04280 [Penicillium chrysogenum Wisconsin 54-1255] gi|211581917|emb|CAP80055.1| Pc12g04280 [Penicillium chrysogenum Wisconsin 54-1255]
  misc_feature (35)..(979): NCBI GI: 115398550 Blast Desc: leucyl-tRNA synthetase, mitochondrial precursor [Aspergillus terreus NIH2624] gi|114191747|gb|EAU33447.1| leucyl-tRNA synthetase, mitochondrial precursor [Aspergillus
  misc_feature (35)..(926): NCBI GI: 159122373 Blast Desc: leucyl-tRNA synthetase [Aspergillus fumigatus A1163]
  misc_feature (30)..(979): SWISSPROT Homolog: EC 6.1.1.4 Leucine--tRNA ligase
MYSVITKLARPGFALKLPTSIPARAPITLRRCYASSQLDLPTLDRSWRQRWTENKARTLDQADSLAPTSSPVLRSESDLAAARARHMYILSMFPYPSGNLHLGHLRVYTIVDVVARYHRLKGQNVLLPMGWDAFGLPAENAAIERGIDPADWTKDNIARMKEQLEVMNANFDWSRELATCDPDFYKHTQKLFIQMYQDGLVTRQRAVVNWDPVDKTVLANEQVDSEGRSWRSGALVEKKPLEQWFFRITEFKEALLRDLDVLANENNWPERVLTMQKNWLGKSMGARYRFPLAIENPAQFRCPENLEIYTTRPETIFGVQFIAISPDSKLAKTLAESDPRVRAALENFENGPERDMRGYRIPYISATNPISRLADDSASRAEPLPVFIAPYVRGDYETGAVMGVPAHDARDFAFWKQNSETGEVKYAVTPDPSGLAPQKEGPYLDSGYMTELAGEYCGRQSEAVVTHLVERIKEQTGLAEIREKWKLRDWLISRQRYWGTPIPVVHCQTCGPQPVPDDQLPVELPKIDHHWAGGRAGNPLESATDWVNTSCPKCHGPAKRDTDTMDTFVDSSWYYMRFADPHNKDAPVSELAAKTQLPVDIYIGGVEHAILHLLYARFFYKAFMGTLYPNQTPEGLPEPLKESSHEPFKRLITQGMVHGKTYLDPDSGRFLKPDEVDLSNPSEPKLISTGKQPIVTYEKMSKSKYNGVDPTTFIGKYGADATRAHILFQAPVGEVLNWDEHKITGITRWLGRVHDHVQNFVLTTDRVTMHWIHQNPFNSKSYFAKERRIDLVGKQAILWEKNMETWRAVQMAIADVTTACEKVYPLNTAVSTLMSLTNAIMDNTMASDLIRFEALTVLVRLMAPIAPAFAEECWSILRPGSGMLFDETSPVPWPVVDGSLPLLQVDHQPCTVAIDGKKRYVLEIPKPADIDGPELTAWFNEQVLQAPEVQKRLHMPEYDVRRATKMFLMKGGKGINYLMPKEAKP

SEQ ID NO: 33744 - DNA, 3261 bp, Muscodor strobelii
  misc_feature: SGI EST ID NO. CUFF.79728.0
  misc_feature: Variant of the nucleotide sequence at SEQ ID NO 33742
agaagaaccaacaataccgttgttgcaacctctcactcgcgatctagtcagtagattcaatgcagttcaattgatctgctagatttttttcttgttctggctgcacgaccttcgcgaccatgaaagctccccgatgtatagcgtcataaccaagctggcacgcccaggcttcgccctgaagctgcccacctcgataccagctcgagcgcctatcactctccgaagatgctatgcttcctcgcagctcgacctaccaaccctagatcgatcatggcgccaaagatggaccgaaaacaaggccaggacgctggaccaagctgacagccttgcgccaacttcatcgcccgtccttcgatccgaatccgatctcgccgcagctcgcgcccgtcatatgtacattctgtccatgtttccatacccctcaggaaacttgcacttgggacatctgcgggtctacactatcgtcgacgttgttgcgagatatcacaggctgaaaggacaaaatgtcttgctcccgatgggatgggacgcctttggtcttccggccgaaaacgccgcgatcgaacgaggcattgacccggcagattggaccaaagacaatattgctcggatgaaggagcagctagaggtcatgaacgcgaacttcgactggtcgagagaactggcgacttgcgatcccgacttttacaagcacactcaaaagctcttcatccagatgtaccaggacgggcttgtcacccggcagcgtgctgttgttaactgggaccctgtggacaagacagtactagcaaatgagcaggtagattccgagggccgatcgtggagatccggtgcactggtcgaaaagaagcctctcgagcaatggtttttccgcatcacggaattcaaagaagcattgcttcgcgaccttgatgtgctggccaacgaaaataattggccggagcgagttttgacgatgcagaagaactggcttggcaagtcaatgggcgcaagatatcgattccctctcgcgatcgagaatccggcacaatttcgatgccccgaaaatcttgagatttacactactagacctgaaactatatttggagtccagttcatagccatctctccagacagcaagcttgcgaaaaccctcgccgagtctgacccgcgagttcgtgcagctttggaaaatttcgagaatgggcccgagagggatatgcgaggatacaggataccgtacatttcagctactaatccaattagtcgtcttgcggacgactctgcttctcgtgctgagcctttgcctgttttcattgccccctatgtccggggtgattatgaaactggagcagtgatgggagttcccgcgcatgatgcgagagattttgcattctggaagcaaaattccgagactggcgaggtgaaatatgctgtaacgccggatccttcgggtttagcaccgcagaaggagggtccatatctcgactctgggtatatgaccgagctggctggagagtattgcggaaggcagtccgaagcagttgtgacacatctcgtggaacgcatcaaggaacaaacaggcctagccgagattcgcgagaaatggaaacttcgagactggctaatcagcaggcagaggtattggggcacaccaattcctgttgtccactgccagacctgcgggcctcagcccgtcccagatgaccagcttcccgttgaactccccaagatcgatcatcattgggcaggcggccgagctggcaatcctctagaatcggcgactgactgggtcaatacatcgtgccccaagtgtcatggtcccgcaaaacgagacacggatactatggacacattcgtggattccagctggtattatatgagattcgcagacccacacaataaagatgcgcccgtttctgagctagcagcgaagactcagcttcccgtagacatctacatcggaggcgttgagcacgcgatcttgcatttgctctatgcgcggttcttctataaagccttcatgggcactttgtacccgaaccaaacgcctgaaggcttgcctgagcctctaaaagagtcctcgcatgaacctttcaaacgtctcatcacacaagggatggtccacggcaagacatatttagatccagacagtggacgcttcctcaaaccagacgaagtcgacttatcaaacccctcagagccaaaattgatatctacaggtaaacagcctatcgtcacatatgaaaaaatgtcaaagtcaaaatacaacggcgtcgacccaacgacattcatcggcaaatacggagccgatgccactcgtgcccacattctcttccaagccccagtcggcgaggtgctcaactgggatgaacacaaaatcaccggcatcactcgatggcttggtcgagtacacgatcacgtacagaacttcgtcctgacgacggatagagtgacgatgcattggatacatcagaatccattcaacagcaagtcgtacttcgccaaggagcgacggatcgatttggtcggtaaacaggcgatactgtgggagaagaatatggagacctggcgtgcagtgcaaatggccattgcggacgtcacaacggcgtgcgagaaagtgtatcccctgaatactgctgtttcgacactgatgagtcttacgaacgcgataatggacaacaccatggcttcggaccttatcagatttgaagccttaacggtgctcgttcgattgatggcgccgattgccccggcatttgcagaggaatgctggagtattctacgacctggatctgggatgctgtttgacgagacatcgcctgtaccttggccagtcgttgatgggtcattgcctctgctgcaagtcgatcatcaaccctgtactgtggcgatagacggcaagaagcgatatgtgctcgagattcccaaaccggctgatatcgacggaccagaacttaccgcctggttcaacgagcaggttctacaggctcctgaggtccagaagaggctgcatatgcctgagtacgatgtacgccgggcgacgaaaatgttcttgatgaagggtggcaaagggatcaactatttgatgccgaaagaagcaaaaccatgaaaagcttgtaaaagattctgtaaaaacacgactgtaccggatgcgattagcttgtatatatctgtgtatcataaagcatcaaatctacatctagactagaacagtcaaagaagagatcacttctcatcttcttcccattttcggctcatctcatctcatcaacgacgcca

SEQ ID NO: 33745 - DNA, 1296 bp, Muscodor strobelii
  misc_feature: SGI cDNA ID NO. 571646
  misc_feature: Encodes the peptide sequence at SEQ ID NO 33746
atgccccgtctcccaccctcactcttccaccgcgcagccagaatatcaccccacctagcaaccctcctaccaatctgtcggaccatcgagtcagcacaacatgagctacgatggattcgcgagcacgtcacatcgtcttataaccaatccacctctcaaactctcacatctcatttgggtaattccacgtcgaagaggaaaattgcaacggagcataagataaaagctctagtccgtcgtcgcggcgcgggcgaaccgctgcagtacatcctaggatctcaacccttcgggacattggacattaagtgtcgaacaggtgtattgatccctcggcctgagactgaggattggggtttacggctagtgggacggattgagcactacttactacctcactgctcccatgtaagacccgagaaggccgaactggctagaggcctgaagattcttgacttgtgttcaggaacgggatgtataggtctcttgctttactcccagctagtgcaaagactctgcaaactgcacaatttgggaaggtcagggaacgtggaaaaagtgagaccgagagtatggggtcttgacatcgaaggccgcgcagtgaaactgggacggtcaaaccttctgcggaatttgacgcccggtgcgctcttaccctcaaccgagtatgtaacagagcgtgagtgtatcgatatcgatccaagagaagacatacaattcatcaaagacgacatcttcgatgcttcctttatggacaggctccgctcaaatctcactacccccaccaccgctaccgaaccatcaattggggaaaaagaagaagaaatagacatcctagtatccaatcccccctacatatcccaacacggcttcaacacctccacagagcgcagcgtccgcactcacgagccgaaacttgctctcgttcctcctctcccacctcccctttcccactccccttcttcccacacctcctccaccccctcctcctacaaaacactcctcaacccctcaaaccccgaagatatcttctacgctcgcctcctccaaatcgcggcaaatctcaaacccaaaatcgtcgcctttgaagttggggacctgggacaggcgatgagagtcatgcagatggctctctcagatagagggcaagacatgggactcaaatgggaagtagcggagatttggtgcgatgacatggacgggagtcagcgtttagagaaagtggatgggagagatgtagaagtgcctattatggggagtgggaatgggagggtcgtgtttttggttaggggttgttga

SEQ ID NO: 33746 - protein, 431 aa, Muscodor strobelii
  misc_feature: SGI Peptide ID NO. 571646
  misc_feature (1)..(429): NCBI GI: 171693673 Blast Desc: protein product [Podospora anserina] gi|170946785|emb|CAP73589.1| protein product [Podospora anserina]
  misc_feature (1)..(398): NCBI GI: 85101730 Blast Desc: NCU03816 [Neurospora crassa OR74A] gi|16944575|emb|CAC18256.2| conserved [Neurospora crassa] gi|28922746|gb|EAA31969.1| [Neurospora crassa OR74A]
  misc_feature (1)..(412): NCBI GI: 238842890 Blast Desc: S-adenosylmethionine-dependent methyltransferase [Microsporum canis CBS 113480]
  misc_feature (1)..(403): NCBI GI: 242824194 Blast Desc: n6-DNA-methyltransferase, [Talaromyces stipitatus ATCC 10500] gi|218713130|gb|EED12555.1| n6-DNA-methyltransferase, [Talaromyces stipitatus ATCC 10500]
  misc_feature (1)..(372): NCBI GI: 121714762 Blast Desc: ACLA_077240 [Aspergillus clavatus NRRL 1] gi|119403146|gb|EAW13565.1| ACLA_077240 [Aspergillus clavatus NRRL 1]
  misc_feature (1)..(430): NCBI GI: 240110861 Blast Desc: CPC735_037230 [Coccidioides posadasii C735 delta SOWgp]
  misc_feature (1)..(390): NCBI GI: 225554311 Blast Desc: conserved [Ajellomyces capsulatus G186AR]
  misc_feature (1)..(394): NCBI GI: 255931547 Blast Desc: Pc12g04610 [Penicillium chrysogenum Wisconsin 54-1255] gi|211581949|emb|CAP80088.1| Pc12g04610 [Penicillium chrysogenum Wisconsin 54-1255]
  misc_feature (1)..(411): NCBI GI: 119196521 Blast Desc: CIMG_02635 [Coccidioides immitis RS]
  misc_feature (1)..(430): NCBI GI: 189195984 Blast Desc: PTRG_03997 [Pyrenophora tritici-repentis Pt-1C-BFP] gi|187980209|gb|EDU46835.1| PTRG_03997 [Pyrenophora tritici-repentis Pt-1C-BFP]
  misc_feature (35)..(307): SWISSPROT Homolog: EC 2.1.1.33 tRNA (guanine-N(7)-)-methyltransferase
MPRLPPSLFHRAARISPHLATLLPICRTIESAQHELRWIREHVTSSYNQSTSQTLTSHLGNSTSKRKIATEHKIKALVRRRGAGEPLQYILGSQPFGTLDIKCRTGVLIPRPETEDWGLRLVGRIEHYLLPHCSHVRPEKAELARGLKILDLCSGTGCIGLLLYSQLVQRLCKLHNLGRSGNVEKVRPRVWGLDIEGRAVKLGRSNLLRNLTPGALLPSTEYVTERECIDIDPREDIQFIKDDIFDASFMDRLRSNLTTPTTATEPSIGEKEEEIDILVSNPPYISQHGFNTSTERSVRTHEPKLALVPPLPPPLSHSPSSHTSSTPSSYKTLLNPSNPEDIFYARLLQIAANLKPKIVAFEVGDLGQAMRVMQMALSDRGQDMGLKWEVAEIWCDDMDGSQRLEKVDGRDVEVPIMGSGNGRVVFLVRGC

SEQ ID NO: 33747 - DNA, 3722 bp, Muscodor strobelii
  misc_feature: SGI EST ID NO. CUFF.79731.0
  misc_feature: Variant of the nucleotide sequence at SEQ ID NO 33745
ataatcatggctcaattgcagacctcgggatggatctcaaccaaaattcagctcaacactgcactcactcactcacccactctcgctcacctgtcgcttacctcactaccacttctcagagcataaactgattctcaatcatttattcttttatcattcatctaaccctcatttccacaaattcatcacactacctcacagcaccgttctacctcatgacaccccttgaatgccccgtctcccaccctcactcttccaccgcgcagccagaatatcaccccacctagcaaccctcctaccaatctgtcggaccatcgagtcagcacaacatgagctacgatggattcgcgagcacgtcacatcgtcttataaccaatccacctctcaaactctcacatctcatttgggtaattccacgtcgaagaggaaaattgcaacggagcataagataaaagctctagtccgtcgtcgcggcgcgggcgaaccgctgcagtacatcctaggatctcaacccttcgggacattggacattaagtgtcgaacaggtgtattgatccctcggcctgagactgaggattggggtttacggctagtgggacggattgagcactacttactacctcactgctcccatgtaagacccgagaaggccgaactggctagaggcctgaagattcttgacttgtgttcaggaacgggatgtataggtctcttgctttactcccagctagtgcaaagactctgcaaactgcacaatttgggaaggtcagggaacgtggaaaaagtgagaccgagagtatggggtcttgacatcgaaggccgcgcagtgaaactgggacggtcaaaccttctgcggaatttgacgcccggtgcgctcttaccctcaaccgagtatgtaacagagcgtgagtgtatcgatatcgatccaagagaagacatacaattcatcaaagacgacatcttcgatgcttcctttatggacaggctccgctcaaatctcactacccccaccaccgctaccgaaccatcaattggggaaaaagaagaagaaatagacatcctagtatccaatcccccctacatatcccaacacggcttcaacacctccacagagcgcagcgtccgcactcacgagccgaaacttgctctcgttcctcctctcccacctcccctttcccactccccttcttcccacacctcctccaccccctcctcctacaaaacactcctcaacccctcaaaccccgaagatatcttctacgctcgcctcctccaaatcgcggcaaatctcaaacccaaaatcgtcgcctttgaagttggggacctgggacaggcgatgagagtcatgcagatggctctctcagatagagggcaagacatgggactcaaatgggaagtagcggagatttggtgcgatgacatggacgggagtcagcgtttagagaaagtggatgggagagatgtagaagtgcctattatggggagtgggaatgggagggtcgtgtttttggttaggggttgttgatgagttgagtgtaaggaatggcgatagcggagggggcagtgtgtgttatctgtgtactatttctgtatatcatgcacagtaggaatcgtgatgctaagaaagcaggaattttggccctcgagaattcaaagcagtgctaacttcaatgcatggctatctagcttgtagccaactccacaacgcctgttccaatcgtaaccagtttccttgaccctatatcctacagcgtcatgtcctttatccatatccatatccatattgcatttttaagtaacctttacctttttcctgataagtcccgcgccaagagtattgacttttgcctcatcgcctcccttctcggttgccggtccctcatccgtggccttcgccttcttcctcaccaggccgctccccagcatgttgaccgagttgtcctgcttaggctcgtctacagcctttctcctcttgactgcagataaaatgttcaccgcatcagagtttggagtgacattagcctgtttcacctcaatggctttctccccttttataatctgtccccagctctctcccataccaacttcagtagtccatctagcagtgctagcaatagcctgctcgagaccacggaactcgagatgtagcaacaactcgacggctcttttataaccgttgtcgtctaggacaacctttcctctccctgcttcgggccagtagtaatgtggtgtcttaatcttttccggatatttgatgcggtgatgtgtttttatgtgcgcctttcttgttatgataggacctgtgagcttcttcggtttcttttttcggggtgtcagcttgtggtttgcggcggatttcgaaggcgaagcggtgggggttactagggatgcgattgatcgctttcgtttcttaggtgttgatggggtgtcgtcggaggctaaaggagctgagaaggatgctgcaggggtaggaattaagtttgtagtttttgcctgttgattcgaggcttcagatggttcgaagactacccatatgaacccagtcatgcggccactagagcattcttgtctgtatgccatcatctcccagaactgttctatagtcctcggtgtcttccagccgcctacaagtttcgctttttggggtgttgagtcttcaagttcttctacgaatcgcgcttttgggtcgtccggatatgtcggtatcagacaccgtatagggacgtttttgccgaaattttcagtgtctttggtatatggtgatgcaagctccagcggatgaccgagcgaccagttctgagaggcttgtggggtccgaggtacgaatgcgcgtgtctcgtagtcgtctagacccggtatcaccatgtatccgtgtatgcgctcccagtcccgcgtcgatttgctcttgccctgatcctcaagaaggggattgagcacccgacaccaccattttatcaaacccctgtcatcaaggatatgcttcttgtcgtttttgacacttcctgggaagagatattgcgactgggcgcgtgcgaaaagatttatgaccagttgcttcgaggggcgtctgcggttttcgactagaaagtctatgaaggctacggtgatggctcgaattggagacaagccgcttggtgaagtctgtaggtaaaggtatcccgtcgaatcggccttggcaacgaagataatggtcgaaaatgcggtggtataaatgtagatttcgatcccaaggactaatgcctcttttgaagatttcgggtcggagatggacacggccaggaagtgcttttcgcagtatgtcttcaatggtctgcttggtcgtttatccggcgtcgagtggagcgccggcgggtagcagagggcttcggttatggcaggcactgttgagaggtgccatgctgtaaattgggagtctttcggtaatgctttcgacaaggcttcgactaatggggaatgcttgggcagcggattggaagatattggaattgacattctgtcatttaagaattgatagaatcttagaagcttcaaaggaggctatttcgattccttgaaaatgctgattggagtgtcgtggtagtttctaagtcattgatgcaagagggagcaggtgcaggtttggacatgagttcatgcgccgtgctgccgtttaggcgtccgcgcgaagcaaaggaggtgcacctgtggcttattttataggaatataaccaaccggatgaaac

SEQ ID NO: 33748 - DNA, 795 bp, Muscodor strobelii
  misc_feature: SGI cDNA ID NO. 571648
  misc_feature: Reduced expression when VOC is produced
  misc_feature: Encodes the peptide sequence at SEQ ID NO 33749
atggctttcaaatcctctcggtctgctgcgtccatatcgcgacaagccttaaaaagatacagaccgcaaaatgctgctcccataacccgccccgtcgcatcgacctgctccttttccacctcgtcaccacgatgcgaagagcctgccgaagaagtgccacgatgggccaagactcccgaacgcatgaaagcgcccttctctcagcacataaccaaagaccctcggcggagcatatggcacgttaacgaggaccccaacaagctcgatgaggcgctggacaacttcctcggccgcgatggcagcaagctgctccccgaagagctgaagtggcaggctgtaacccacaaaaccttcgatcatggcaggagaggattcaatgatcgcctggcctttctcggtcgtcaaatatgcgtccaggaagctgtccaatacatcatcaactcgcctaaagccgaactccccagcgacaaattctccgatctccgcgaacccatacaagacccagctctccgcaacgtcgacaatcttgccaagattcagccaagtgatatctggtcgttaccacagatggcaaaggtagctttggacacgggattgtccgacgttgtaaggtggaagcctaggctgcccgaaaatctgccgggatctggtcttcacgccgtcttagtcggtaccatgtattccctcattggggccattgcgctgcagcatggcggccgagtcgccagtcgagttgttcgcgagaggattttgaaaaagttgcggcctgctacatccgcatcacctgcatcataa

SEQ ID NO: 33749 - protein, 264 aa, Muscodor strobelii
  misc_feature: SGI Peptide ID NO. 571648
  misc_feature (1)..(254): NCBI GI: 261357903 Blast Desc: RNase III domain-containing protein [Verticillium albo-atrum VaMs.102]
  misc_feature (1)..(254): NCBI GI: 116200546 Blast Desc: CHGG_10818 [Chaetomium globosum CBS 148.51] gi|88175532|gb|EAQ83000.1| CHGG_10818 [Chaetomium globosum CBS 148.51]
  misc_feature (25)..(254): NCBI GI: 85090664 Blast Desc: NCU09826 [Neurospora crassa OR74A] gi|28919895|gb|EAA29289.1| conserved [Neurospora crassa OR74A]
  misc_feature (62)..(255): NCBI GI: 46132944 Blast Desc: FG09009.1 [Gibberella zeae PH-1]
  misc_feature (1)..(254): NCBI GI: 154293059 Blast Desc: BC1G_14795 [Botryotinia fuckeliana B05.10] gi|150845699|gb|EDN20892.1| BC1G_14795 [Botryotinia fuckeliana B05.10]
  misc_feature (1)..(254): NCBI GI: 156063260 Blast Desc: SS1G_01746 [Sclerotinia sclerotiorum 1980] gi|154697082|gb|EDN96820.1| SS1G_01746 [Sclerotinia sclerotiorum 1980]
  misc_feature (62)..(254): NCBI GI: 256727865 Blast Desc: NECHADRAFT_46356 [Nectria haematococca mpVI 77-13-4]
  misc_feature (38)..(260): NCBI GI: 119479385 Blast Desc: RNase III domain protein [Neosartorya fischeri NRRL 181] gi|119407875|gb|EAW17824.1| RNase III domain protein [Neosartorya fischeri NRRL 181]
  misc_feature (38)..(260): NCBI GI: 70997880 Blast Desc: RNase III domain protein [Aspergillus fumigatus Af293] gi|66851308|gb|EAL91634.1| RNase III domain protein [Aspergillus fumigatus Af293] gi|159126595|gb|EDP51711.1| RNase III domain
  misc_feature (38)..(260): NCBI GI: 121712950 Blast Desc: RNase III domain protein [Aspergillus clavatus NRRL 1] gi|119402239|gb|EAW12660.1| RNase III domain protein [Aspergillus clavatus NRRL 1]
  misc_feature: Useful for introducing or modulating the production of volatile compounds
MAFKSSRSAASISRQALKRYRPQNAAPITRPVASTCSFSTSSPRCEEPAEEVPRWAKTPERMKAPFSQHITKDPRRSIWHVNEDPNKLDEALDNFLGRDGSKLLPEELKWQAVTHKTFDHGRRGFNDRLAFLGRQICVQEAVQYIINSPKAELPSDKFSDLREPIQDPALRNVDNLAKIQPSDIWSLPQMAKVALDTGLSDVVRWKPRLPENLPGSGLHAVLVGTMYSLIGAIALQHGGRVASRVVRERILKKLRPATSASPAS

SEQ ID NO: 33750 - DNA, 2885 bp, Muscodor strobelii
  misc_feature: SGI EST ID NO. CUFF.80013.0
  misc_feature: Variant of the nucleotide sequence at SEQ ID NO 33748
gggaaagtgcagagtggagaactgcaggggtctggctcagggaagccggggccgtcgacctgcagcaagagccctcctacgattggctgtgacagctaggatgcgacccgcccttcaaaaaaaagtgacttcttgtcgattgaagcaccaacgcgatatctccagtagatcttcgctgtaagacaaccatctctcgacgacgacctacccccaatcggagctccgatggctttcaaatcctctcggtctgctgcgtccatatcgcgacaagccttaaaaagatacagaccgcaaaatgctgctcccataacccgccccgtcgcatcgacctgctccttttccacctcgtcaccacgatgcgaagagcctgccgaagaagtgccacgatgggccaagactcccgaacgcatgaaagcgcccttctctcagcacataaccaaagaccctcggcggagcatatggcacgttaacgaggaccccaacaagctcgatgaggcgctggacaacttcctcggccgcgatggcagcaagctgctccccgaagagctgaagtggcaggctgtaacccacaaaaccttcgatcatggcaggagaggattcaatgatcgcctggcctttctcggtaaggcatcacacattcgactgcaatgtccagttggcagtactcactaaccttcgcccaaggtcgtcaaatatgcgtccaggaagctgtccaatacatcatcaactcgcctaaagccgaactccccagcgacaaattctccgatctccgcgaacccatacaagacccagctctccgcaacgtcgacaatcttgccaagattcagccaagtgatatctggtcgttaccacagatggcaaaggtagctttggacacgggattgtccgacgttgtaaggtggaagcctaggctgcccgaaaatctgccgggatctggtcttcacgccgtcttagtcggtaccatgtattccctcattggggccattgcgctgcagcatggcggccgagtcgccagtcgagttgttcgcgagaggattttgaaaaagttgcggcctgctacatccgcatcacctgcatcataaacagcagttttatcatcgatccggcgtgtgaattccacacatactccatcccagctggacatggactataccgctctgtgggccaggtgataatgcccgaaatttcagttgcatagctctttcgcgaaagtcttacgacgagctggtttgctctctatcgaaattcaaagactatctgagcgagggacgtagtttgaatacgtgttgataaaggtatagagggcggtctgtagaaatatgtatcaacaattgtacactgtagcataagccaaggtgcaataccaactagtaaatacacttcatcaaccaaaaatcgtttggacgatctctccatagcacccggcctctactttcgacatcattcggggacttataaacactaatcgatgctctgtctatagtcgttattatttagacattagtcttgagagtttttctaaatacacttgtcgtctaatagtctagatcagtctgtctatatttacacaaagcactaaacaaagcactccctagatcatagcaatggcgtattctcatgcacagtactatcatcctcatcactctcctcacccgcactttccgcctctcctttaccatccgccaacgcaaaagcaacaataacattctccctcaacggccaaacaacacacaatgctgctccaggacctatcacaaaacccaacacaaccaaaacagcagcgggtatccatccagactcgacaaacacccaatacactatcgtagccgcgatgaacgcaaagtcaatctcgatgaactttagcgctgtcctcgtcatctcccgactatcgtcgtcgaaaaagaggttatagatggtgaaaacatggaacgcaatcgacgccataacgggcacagcgtacaaaatcgcaagcgagcgcatctcggaatcgacgtacaccggtccattctcatggacaatacgtctcgcctcgaacaccacaatccaatgcacggcttccacccaaagcggaaagaaaagccaaatcagcaccgatagcgcatcgtggaaaaccagcatcaaaatactaggtattccgaaccctagcaagaccgcgatggggatcgcgaagatctctgctttttctcgcagactcctctctgagatgattcgttgttggtcttcgtagacatccctcgcattttcagtcccgtttgatagtaaaccatcatcttttcctcgcgaggaatgattgactttcgcctgtgacaggaacacgggaacaatccaaagatcccataccacggtcccacccgcgaggttaaaaaccagccaggagatcgtcggatgggtaatgttccaacttcccttattacacttcctcgccgcctcaattctcgtaacagtgagcaacgcggcgacgaacgccagaatggcgccgagctgcgcgattgctcgcgtggatgagcaagcgaagatgaagaatgagacgaggaagcaggacggtgccccgattatggggatgtgtgagagtgagggcagacgagaccgcgcgtggcattgagagtacaggagcggtgtgtttatgtcgctgtgtagggacaagatgaggaaggcgaggagtgagaagaggatgagagggatgctgaggtactttaagggcaggcggtggactagcggttggttgctggtgcttggggtgaatgataacattttgaagggttatgcactctgcagagcgatgaagatgagaggcgctgcgtgaatttgtgagtcgccaccccctctcgtgtgaggtcgacgaggtgaatgagtgagggttttgtagtggtgagagggaagtaaga

SEQ ID NO: 33751 - DNA, 1155 bp, Muscodor strobelii
  misc_feature: SGI cDNA ID NO. 571649
  misc_feature: Encodes the peptide sequence at SEQ ID NO 33752
atgttatcattcaccccaagcaccagcaaccaaccgctagtccaccgcctgcccttaaagtacctcagcatccctctcatcctcttctcactcctcgccttcctcatcttgtccctacacagcgacataaacacaccgctcctgtactctcaatgccacgcgcggtctcgtctgccctcactctcacacatccccataatcggggcaccgtcctgcttcctcgtctcattcttcatcttcgcttgctcatccacgcgagcaatcgcgcagctcggcgccattctggcgttcgtcgccgcgttgctcactgttacgagaattgaggcggcgaggaagtgtaataagggaagttggaacattacccatccgacgatctcctggctggtttttaacctcgcgggtgggaccgtggtatgggatctttggattgttcccgtgttcctgtcacaggcgaaagtcaatcattcctcgcgaggaaaagatgatggtttactatcaaacgggactgaaaatgcgagggatgtctacgaagaccaacaacgaatcatctcagagaggagtctgcgagaaaaagcagagatcttcgcgatccccatcgcggtcttgctagggttcggaatacctagtattttgatgctggttttccacgatgcgctatcggtgctgatttggcttttctttccgctttgggtggaagccgtgcattggattgtggtgttcgaggcgagacgtattgtccatgagaatggaccggtgtacgtcgattccgagatgcgctcgcttgcgattttgtacgctgtgcccgttatggcgtcgattgcgttccatgttttcaccatctataacctctttttcgacgacgatagtcgggagatgacgaggacagcgctaaagttcatcgagattgactttgcgttcatcgcggctacgatagtgtattgggtgtttgtcgagtctggatggatacccgctgctgttttggttgtgttgggttttgtgataggtcctggagcagcattgtgtgttgtttggccgttgagggagaatgttattgttgcttttgcgttggcggatggtaaaggagaggcggaaagtgcgggtgaggagagtgatgaggatgatagtactgtgcatgagaatacgccattgctatga

SEQ ID NO: 33752 - protein, 384 aa, Muscodor strobelii
  misc_feature: SGI Peptide ID NO. 571649
  misc_feature (10)..(384): NCBI GI: 46132942 Blast Desc: FG09008.1 [Gibberella zeae PH-1]
  misc_feature (14)..(361): NCBI GI: 171676368 Blast Desc: protein product [Podospora anserina] gi|170936250|emb|CAP60909.1| protein product [Podospora anserina]
  misc_feature (14)..(384): NCBI GI: 256728029 Blast Desc: NECHADRAFT_83418 [Nectria haematococca mpVI 77-13-4]
  misc_feature (5)..(384): NCBI GI: 145616514 Blast Desc: MGG_10630 [Magnaporthe grisea 70-15] gi|145010070|gb|EDJ94726.1| MGG_10630 [Magnaporthe grisea 70-15]
  misc_feature (6)..(384): NCBI GI: 85100547 Blast Desc: NCU08855 [Neurospora crassa OR74A] gi|18375963|emb|CAD21262.1| [Neurospora crassa] gi|28922520|gb|EAA31749.1| [Neurospora crassa OR74A]
  misc_feature (36)..(283): NCBI GI: 261357906 Blast Desc: conserved [Verticillium albo-atrum VaMs.102]
  misc_feature (99)..(374): NCBI GI: 116200488 Blast Desc: CHGG_10789 [Chaetomium globosum CBS 148.51] gi|88175503|gb|EAQ82971.1| CHGG_10789 [Chaetomium globosum CBS 148.51]
MLSFTPSTSNQPLVHRLPLKYLSIPLILFSLLAFLILSLHSDINTPLLYSQCHARSRLPSLSHIPIIGAPSCFLVSFFIFACSSTRAIAQLGAILAFVAALLTVTRIEAARKCNKGSWNITHPTISWLVFNLAGGTVVWDLWIVPVFLSQAKVNHSSRGKDDGLLSNGTENARDVYEDQQRIISERSLREKAEIFAIPIAVLLGFGIPSILMLVFHDALSVLIWLFFPLWVEAVHWIVVFEARRIVHENGPVYVDSEMRSLAILYAVPVMASIAFHVFTIYNLFFDDDSREMTRTALKFIEIDFAFIAATIVYWVFVESGWIPAAVLVVLGFVIGPGAALCVVWPLRENVIVAFALADGKGEAESAGEESDEDDSTVHENTPLL

SEQ ID NO: 33753 - DNA, 1029 bp, Muscodor strobelii
  misc_feature: SGI cDNA ID NO. 571650
  misc_feature: Encodes the peptide sequence at SEQ ID NO 33754
atggtttcactttcagatgttgttgcttcgaaccaacgcattgccactacgcttccacgaggactcgtagccgtcttcgttggtggcacaagcggcgtgggcgaatatactctcaaagccttcgcacgatatgctgatcaacctcgagtatacatcatcggacgttcccaagagtctgcagatcgcattatcaacgaatgccggacgctcagtccgaagggacagttcgagtttatcaaggcagacgtgagttcactgaagaatgtggacgatgtctgtcgcgagataaagcaaaaagaaacattaatcaatatcctattcgaatcacagggaactatggcctttaatgaaaaatcacctgatggtttgcccatgtcgtttgccgtaggcaatcactcccgtctgcggtttgccctcaatctgcttccattattggaaagtgcaaactcactgcgccgtgttgtttctgtcggagcggcaacatgtgagggaccgatcgacctcaacaacatacccggggaaggcttccaattgcaacaatggcgagaccagctagcctcgatctcaacgctatggctcgaagaacttcagcgacgagcaccaagcgtctcattcattcacactgttcccggcgttgttgagagcggtataatgcgagatgttaagcccgactttcgtctatcaatcatcatcgggatctctcgcctcctaaagcctttcatcaacactccacctgctgagtccggggagcgtcatactttcgctattacaagtgccatgttcgctcctgctgagggtggcacagagcatgctggtgtatctctggatacggcggttgggaccggtgcgcgtggaacgaatggacaagcggggactgggatttattctattgatgtgaagaatgaagccgctccgtcaaaggtcgtagacattctacgtaagttccatcaagatggtactgcggacaagatttgggtatacttcatgtcggacttcaggagaatcactgggacagagacaatgatgtag

SEQ ID NO: 33754 - protein, 342 aa, Muscodor strobelii
  misc_feature: SGI Peptide ID NO. 571650
  misc_feature (1)..(342): NCBI GI: 212526408 Blast Desc: short-chain dehydrogenases/reductase, [Penicillium marneffei ATCC 18224] gi|210072759|gb|EEA26846.1| short-chain dehydrogenases/reductase, [Penicillium marneffei ATCC 18224]
  misc_feature (1)..(336): NCBI GI: 255932335 Blast Desc: Pc12g08960 [Penicillium chrysogenum Wisconsin 54-1255] gi|211582343|emb|CAP80523.1| Pc12g08960 [Penicillium chrysogenum Wisconsin 54-1255]
  misc_feature (1)..(341): NCBI GI: 145248247 Blast Desc: An13g02340 [Aspergillus niger] gi|134081123|emb|CAK41633.1| protein product [Aspergillus niger]
  misc_feature (1)..(341): NCBI GI: 116198989 Blast Desc: CHGG_07650 [Chaetomium globosum CBS 148.51] gi|88178929|gb|EAQ86397.1| CHGG_07650 [Chaetomium globosum CBS 148.51]
  misc_feature (1)..(337): NCBI GI: 46134165 Blast Desc: FG09222.1 [Gibberella zeae PH-1]
  misc_feature (1)..(338): NCBI GI: 256732276 Blast Desc: NECHADRAFT_80716 [Nectria haematococca mpVI 77-13-4]
  misc_feature (1)..(341): NCBI GI: 121719480 Blast Desc: conserved [Aspergillus clavatus NRRL 1] gi|119404637|gb|EAW15013.1| conserved [Aspergillus clavatus NRRL 1]
  misc_feature (1)..(338): NCBI GI: 119487451 Blast Desc: NFIA_030540 [Neosartorya fischeri NRRL 181] gi|119410675|gb|EAW20621.1| conserved [Neosartorya fischeri NRRL 181]
  misc_feature (1)..(337): NCBI GI: 212546503 Blast Desc: short-chain dehydrogenases/reductase, [Penicillium marneffei ATCC 18224] gi|210064925|gb|EEA19020.1| short-chain dehydrogenases/reductase, [Penicillium marneffei ATCC 18224]
  misc_feature (1)..(335): NCBI GI: 67523837 Blast Desc: AN2374.2 [Aspergillus nidulans FGSC A4] gi|40745329|gb|EAA64485.1| AN2374.2 [Aspergillus nidulans FGSC A4] gi|259487778|tpe|CBF86716.1| TPA: conserved [Aspergillus FGSC
MVSLSDVVASNQRIATTLPRGLVAVFVGGTSGVGEYTLKAFARYADQPRVYIIGRSQESADRIINECRTLSPKGQFEFIKADVSSLKNVDDVCREIKQKETLINILFESQGTMAFNEKSPDGLPMSFAVGNHSRLRFALNLLPLLESANSLRRVVSVGAATCEGPIDLNNIPGEGFQLQQWRDQLASISTLWLEELQRRAPSVSFIHTVPGVVESGIMRDVKPDFRLSIIIGISRLLKPFINTPPAESGERHTFAITSAMFAPAEGGTEHAGVSLDTAVGTGARGTNGQAGTGIYSIDVKNEAAPSKVVDILRKFHQDGTADKIWVYFMSDFRRITGTETMM

SEQ ID NO: 33755 - DNA, 1285 bp, Muscodor strobelii
  misc_feature: SGI EST ID NO. CUFF.79744.0
  misc_feature: Variant of the nucleotide sequence at SEQ ID NO 33753
caacgaatgccggacgctcagtccgaagggacagttcgagtttatcaaggcagacgtgagttcactgaagaatgtggacgatgtctgtcgcgagataaagcaaaaagaaacattaatcaatatcctattcgaatcacagggaactatggcctttaatgaaaaatcacctgatggtttgcccatgtcgtttgccgtaggcaatcactcccgtctgcggtttgccctcaatctgcttccattattggaaagtgcaaactcactgcgccgtgttgtttctgtcggagcggcaacatgtgagggaccgatcgacctcaacaacatacccggggaaggcttccaattgcaacaatggcgagaccagctagcctcgatctcaacgctatggctcgaagaacttcagcgacgagcaccaagcgtctcattcattcacactgttcccggcgttgttgagagcggtataatgcgagatgttaagcccgactttcgtctatcaatcatcatcgggatctctcgcctcctaaagcctttcatcaacactccacctgctgagtccggggagcgtcatactttcgctattacaagtgccatgttcgctcctgctgagggtggcacagagcatgctggtgtatctctggatacggcggttgggaccggtgcgcgtggaacgaatggacaagcggggactgggatttattctattgatgtgaagaatgaagccgctccgtcaaaggtcgtagacattctacgtaagttccatcaagatggtactgcggacaagatttgggtatacttcatgtcggacttcaggagaatcactgggacagagacaatgatgtagtgacctttcaaatcagaccgtcgtgggtacaatttgtttcaattgagaccctaacatagtgtgatgtcatatttccctgccaataatctcttttaatatagtagtaccagtcgcgaggataatcttttgtcttgaacaacctagtgtcctgctgattctggtggcaaacttcttgaccttcaagttccaagccataagagcccattgtcttctatcgggtaatcaaatatcctcagctgtgaggggtgtaacagtctgactgggtggtctgctgaatttactagagagtttgtttctgacggattgttgccatacgtttcgtgcaatgatctgaaggctagaaaatctagtgttaggtcttgatcaggaggtatcgaacgtgggcatgccacattttcaggcactggggcatgagactcccgatcattcttatcctctatgtctcgc

SEQ ID NO: 33756 - DNA, 1095 bp, Muscodor strobelii
  misc_feature: SGI cDNA ID NO. 571651
  misc_feature: Encodes the peptide sequence at SEQ ID NO 33757
atgccaactccagctctgaggtctagattggggccagcagatgccaaggcaaacctgctgcgcatggaactctttcatcatttccaagccgtcactcgtgagactttactgattgcatacgaggcttgggactacgcgctacaactctccttcgagtttgactacctaatggatgcagtcctgtgcatcgcagcgcggcacctcgccgttcttcatcccaatgataccatgtatgaactagtggcggcgtcgcacatatgtcaagcttcttctagcttaagaaaggcattgtctaaaggcgttcgatgcattcatttcgatgccttcatcgccacatctatacttttctactatgatacgtggtgtagtgctgagtactatgcacctttcaacaccagttttcaagcatcggatatgtggacggaccgtgtttttggattcagttccagtctgaagaaaactcttctaacaggtttcgaccgaccccctgcttcgcattttgcacagtatctcatccatgaccctggtgccgccctttccactgtggctcaagccaacgggaatgtcgtgccaagatgtcgagaattcttctcttatgatcgcccaattgcaatggagatgttgaacacgcctcacttagagatgtctgagctatcgactaaacacccgacatgttcatcggatacgcattcaacgatgtccctgtccagtatcacctcgctcaccggtacggaagacttggttgaatgtgcatacaatcccgtcgtcgatagactttcttctatacttccatacctcccagaggcacggaccaaaggtcaagatttgatcgccgtgagaagcatcattccgctcttagcacgatatatcttgagcttaccacttcttggttggaactcattcccggtcatggtcgatcgagcagatccccatgcactcctcgtgctctatcatttttatcgtgccgcaagaatattgctcgatgatgatcagtggtggtgggcacgaagacgatcagctgccgccgagaaagcattgcggcatcaattgtcgagtcagatcgcaatgcaggcaaaccacgagttggtcagctag

SEQ ID NO: 33757 - protein, 364 aa, Muscodor strobelii
  misc_feature: SGI Peptide ID NO. 571651
  misc_feature (14)..(360): NCBI GI: 212526406 Blast Desc: PMAA_017590 [Penicillium marneffei ATCC 18224] gi|210072758|gb|EEA26845.1| PMAA_017590 [Penicillium marneffei ATCC 18224]
  misc_feature (14)..(121): NCBI GI: 242800958 Blast Desc: TSTA_015300 [Talaromyces stipitatus ATCC 10500] gi|218717021|gb|EED16442.1| TSTA_015300 [Talaromyces stipitatus ATCC 10500]
  misc_feature (4)..(118): NCBI GI: 46108588 Blast Desc: FG01176.1 [Gibberella zeae PH-1]
  misc_feature (228)..(350): NCBI GI: 212540718 Blast Desc: PMAA_056940 [Penicillium marneffei ATCC 18224] gi|210067813|gb|EEA21905.1| PMAA_056940 [Penicillium marneffei ATCC 18224]
  misc_feature (245)..(363): NCBI GI: 116207290 Blast Desc: [Chaetomium globosum CBS 148.51] gi|88183535|gb|EAQ91003.1| [Chaetomium globosum CBS 148.51]
  misc_feature (4)..(118): NCBI GI: 256734378 Blast Desc: [Nectria haematococca mpVI 77-13-4]
MPTPALRSRLGPADAKANLLRMELFHHFQAVTRETLLIAYEAWDYALQLSFEFDYLMDAVLCIAARHLAVLHPNDTMYELVAASHICQASSSLRKALSKGVRCIHFDAFIATSILFYYDTWCSAEYYAPFNTSFQASDMWTDRVFGFSSSLKKTLLTGFDRPPASHFAQYLIHDPGAALSTVAQANGNVVPRCREFFSYDRPIAMEMLNTPHLEMSELSTKHPTCSSDTHSTMSLSSITSLTGTEDLVECAYNPVVDRLSSILPYLPEARTKGQDLIAVRSIIPLLARYILSLPLLGWNSFPVMVDRADPHALLVLYHFYRAARILLDDDQWWWARRRSAAAEKALRHQLSSQIAMQANHELVS

SEQ ID NO: 33758 - DNA, 2906 bp, Muscodor strobelii
  misc_feature: SGI EST ID NO. CUFF.79746.0
  misc_feature: Variant of the nucleotide sequence at SEQ ID NO 33756
tttgagagtatattcgcccacgccgcttgtgccaccaacgaagacggctacgagtcctcgtggaagcgtagtggcaatgcgttggttcgaagcaacaacatctgaaagtgaaaccatattgtcctaactttccgaaagtttcgcgagacgtcgttcgattcttgtaatcattgaagaaccataacatagtaccaacacggcattgctcgcgtctttgtattccatctcgtcttcatacaattgccaaggttaactcactaacaccggcgtagtcgtcatttctgaacactaagtcattttcgcgctagactgaactaagcgatacgagcccaggccggattagcctcgaagcatcggacgattcaccgggtctctaatatgattcgaaaatggagatgcgaggcgttgcataccgaaaagggcagagcaaatagataatgaccatttaccaaaggagccgatcagagcgtcgttgagcaatggactacgagaagttgtcgaacgccatcgtatgcgctaggcctaatacagcgatacgagattggaccgcaagatcgcggagcggagttagcgagagcatgccgccggcccctggccaggttcttgagtttctgttcgcgttatcaacagcatagatggtatgttgatggctacgaagccagttcgtcctaaatccggcgttcggcggccatctgctgtttcaaaatcgatatggtgtattattccgccttcgctccttggtcggaggcacgcgttgcccctagagagactgtcgtggatctgtcctccggttcagggagttcagcaccaactctgaaagatctcaccaatacgttcatattatcatctgcgtgcaaatcaagcgaacaacagacacttttacaaattcctaagtcttggaaactcgacccgtcacggaagcgtagatcgcacaagaaatccagtgccggctgcaaaaactgcaagagtcgacgcgtcaaagtgcgtataggtctgaacgcctcaagcacttactaccttcattggctgttcgtgattaacgtgataggttggtagtgcgacgaagcatcaccatgtagcaattgtacaagaagaggagaacagtgtgagcttctccatcgtgaacagggctctcacccgtgtcccacgatgccaactccagctctgaggtctagattggggccagcagatgccaaggcaaacctgctgcgcatggaactctttcatcatttccaagccgtcactcgtgagactttactgattgcatacgaggcttgggactacgcgctacaactctccttcgagtttgactacctaatggatgcagtcctgtgcatcgcagcgcggcacctcgccgttcttcatcccaatgataccatgtatgaactagtggcggcgtcgcacatatgtcaagcttcttctagcttaagaaaggcattgtctaaaggcgttcgatgcattcatttcgatgccttcatcgccacatctatacttttctactatgatacgtggtgtagtgctgagtactatgcacctttcaacaccagttttcaagcatcggatatgtggacggaccgtgtttttggattcagttccagtctgaagaaaactcttctaacaggtttcgaccgaccccctgcttcgcattttgcacagtatctcatccatgaccctggtgccgccctttccactgtggctcaagccaacgggaatgtcgtgccaagatgtcgagaattcttctcttatgatcgcccaattgcaatggagatgttgaacacgcctcacttagagatgtctgagctatcgactaaacacccgacatgttcatcggatacgcattcaacgatgtccctgtccagtatcacctcgctcaccggtacggaagacttggttgaatgtgcatacaatcccgtcgtcgatagactttcttctatacttccatacctcccagaggcacggaccaaaggtcaagatttgatcgccgtgagaagcatcattccgctcttagcacgatatatcttgagcttaccacttcttggttggaactcattcccggtcatggtcgatcgagcagatccccatgcactcctcgtgctctatcatttttatcgtgccgcaagaatattgctcgatgatgatcagtggtggtgggcacgaagacgatcagctgccgccgagaaagcattgcggcatcaattgtcgagtcagatcgcaatgcaggcaaaccacgagttggtcagctagccgaatatctccccgcatcctgtaggcatgcttaatagccatgggcatacgtacggtcgttgaagcatgccggacgaactgcataccccgcgatgcgggttgcacaccggtgtgtgcttcgcagacttctggatttggagaagtgtagctaatctgtagcccgctacttgatcgctccttcactttcctcgtcctcggaatgacatggcgcgcatgttacgcgatgcacttcatatgatactattgctttatcgctttgccacgtcacagaccgttgtacgtcgctgcgctccgttgataatgaccactagtacgtgtaccgcacaaagtttgcattgagaggtcttccccgggttgggggagactgccgtgtaacttgcatgccccgacccgaaaatcgtgaatcggatcgtatattgtgcagcgcggactgatgcacgatacgacgcccaatctgcgagacaagttttcgagtcgtagtggcaaactggaagggaatggctattctcgtcgtttaaatgagcgagtaacacattataaacattgacacacagatattatccctagacctgcacatcgacgtgttctactttttgagcactcgctcagacatcactaatcattgtcatggttaataccaatcgttctatcatgaagttctc

SEQ ID NO: 33759 - DNA, 1332 bp, Muscodor strobelii
  misc_feature: SGI cDNA ID NO. 571652
  misc_feature: Encodes the peptide sequence at SEQ ID NO 33760
atggttaataccaatcgttctatcatgaagttctctaccctaaatgttcttattatcactcttatcgtgagtgtggactatgcttttggaataaagcctgaaagtcagcatcctctcgggtcgaccagccacctggataccgaatcctcagacctaggggcttctagatatagatgcgatcttccacgtcctctcgagcctgatgatggactactaaattgggaagaactgttctctgaagatgaagctatccagttactggttgatcgacatcaaccgctcgttagcataccctcaatttgttacgatgaccttggtgacttcgacaaggacgaaagatgggagcctttcaagaaaatacctgaggtcctgagagacaaatatccgaagctatccgtgttcaatgagacggttaatcgctatggtcttgtatacactgtcgaaggcagtgatgattccctcagtcctattctcctgaccgctcatcaagacgtcgttcccgtcgagaacgaaactttggatcggtgggactatccgccatttggagcacactacgacgatgatggatatctctggggccgcggtgcctcggatgacaaatctgctattacagccttgatgactgcaatggaagcccttcttgaacaagacgagtatgagccacgccgcaccgtgatttttgcttttggcttcgatgaagaatgctctggttatcgaggtgcagctgaaatttcgaagtttctagaaaataaatatggtgaaggtggcattgcagtcatccttgatgagggcggagctggccttcagactctgggcgatacgatgtatgcattacccgccgtctacgagaaaggctacctcgatgtttggtttgatctcgaggtcataggcgggcacagttctgttcccacgccacacacagcaattgggatcatgtctgaaatcaccactgctttagaggcaagcccttttcaacctgaaattgaatgggacagccccattcatcgggctctgatatgtctcgcacgctactcgccccgcgcataccctgagctcaccgaagtgatccgctatggagatctcgatgaagcagcgcgtctcgtttctcaagcctcgcgcgaaacgcagtattttatccaaacatctcaagctgttgactggatagcggggggacagaagatcaacgctctaccagagtttgtgacgctgggagtcaatcaccgctatgcgcctcaggatagtgtaagtgttctaagctgtcgagttccagagactagtccttttattttcgaatctagggctctgcaaggggtaatcgagaggattgactaa

SEQ ID NO: 33760 - protein, 443 aa, Muscodor strobelii
  misc_feature: SGI Peptide ID NO. 571652
  misc_feature (158)..(374): Pfam Id: PF01546 Pfam Desc: Peptidase family M20/M25/M40
  misc_feature (158)..(246): Pfam Id: PF01546 Pfam Desc: Peptidase family M20/M25/M40
  misc_feature (54)..(418): NCBI GI: 46116250 Blast Desc: FG03967.1 [Gibberella zeae PH-1]
  misc_feature (19)..(425): NCBI GI: 256726781 Blast Desc: NECHADRAFT_103332 [Nectria haematococca mpVI 77-13-4]
  misc_feature (8)..(414): NCBI GI: 46121343 Blast Desc: FG05050.1 [Gibberella zeae PH-1]
  misc_feature (69)..(436): NCBI GI: 256730062 Blast Desc: NECHADRAFT_94988 [Nectria haematococca mpVI 77-13-4]
  misc_feature (52)..(410): NCBI GI: 67901432 Blast Desc: AN7703.2 [Aspergillus nidulans FGSC A4] gi|40742699|gb|EAA61889.1| AN7703.2 [Aspergillus nidulans FGSC A4]
  misc_feature (52)..(410): NCBI GI: 259484048 Blast Desc: TPA: conserved [Aspergillus nidulans FGSC A4]
  misc_feature (59)..(416): NCBI GI: 256719802 Blast Desc: NECHADRAFT_56807 [Nectria haematococca mpVI 77-13-4] gi|256725053|gb|EEU38420.1| NECHADRAFT_55460 [Nectria haematococca mpVI 77-13-4]
  misc_feature (32)..(408): NCBI GI: 19114945 Blast Desc: vacuolar carboxypeptidase () [Schizosaccharomyces pombe 972h-] gi|74626618|sp|O13968.1|YE48_SCHPO RecName: Full=Uncharacterized carboxypeptidase C24C9.08 vacuolar () pombe]
  misc_feature (67)..(421): NCBI GI: 121704920 Blast Desc: vacuolar carboxypeptidase Cps1, [Aspergillus clavatus NRRL 1] gi|119398869|gb|EAW09297.1| vacuolar carboxypeptidase Cps1, [Aspergillus clavatus NRRL 1]
  misc_feature (59)..(421): NCBI GI: 159127915 Blast Desc: vacuolar carboxypeptidase Cps1, [Aspergillus fumigatus A1163]
  misc_feature (95)..(416): SWISSPROT Homolog: EC 3.4.17.4 Gly-Xaa carboxypeptidase
MVNTNRSIMKFSTLNVLIITLIVSVDYAFGIKPESQHPLGSTSHLDTESSDLGASRYRCDLPRPLEPDDGLLNWEELFSEDEAIQLLVDRHQPLVSIPSICYDDLGDFDKDERWEPFKKIPEVLRDKYPKLSVFNETVNRYGLVYTVEGSDDSLSPILLTAHQDVVPVENETLDRWDYPPFGAHYDDDGYLWGRGASDDKSAITALMTAMEALLEQDEYEPRRTVIFAFGFDEECSGYRGAAEISKFLENKYGEGGIAVILDEGGAGLQTLGDTMYALPAVYEKGYLDVWFDLEVIGGHSSVPTPHTAIGIMSEITTALEASPFQPEIEWDSPIHRALICLARYSPRAYPELTEVIRYGDLDEAARLVSQASRETQYFIQTSQAVDWIAGGQKINALPEFVTLGVNHRYAPQDSVSVLSCRVPETSPFIFESRALQGVIERID

SEQ ID NO: 33761 - DNA, 1156 bp, Muscodor strobelii
  misc_feature: SGI EST ID NO. CUFF.79749.0
  misc_feature: Variant of the nucleotide sequence at SEQ ID NO 33759
ggaataaagcctgaaagtcagcatcctctcgggtcgaccagccacctggataccgaatcctcagacctaggggcttctagatatagatgcgatcttccacgtcctctcgagcctgatgatggactactaaattgggaagaactgttctctgaagatgaagctatccagttactggttgatcgacatcaaccgctcgttagcataccctcaatttgttacgatgaccttggtgacttcgacaaggacgaaagatgggagcctttcaagaaaatacctgaggtcctgagagacaaatatccgaagctatccgtgttcaatgagacggttaatcgctatggtcttgtatacactgtcgaaggcagtgatgattccctcagtcctattctcctgaccgctcatcaagacgtcgttcccgtcgagaacgaaactttggatcggtgggactatccgccatttggagcacactacgacgatgatggatatctctggggccgcggtgcctcggatgacaaatctgctattacagccttgatgactgcaatggaagcccttcttgaacaagacgagtatgagccacgccgcaccgtgatttttgcttttggcttcgatgaagaatgctctggttatcgaggtgcagctgaaatttcgaagtttctagaaaataaatatggtgaaggtggcattgcagtcatccttgatgagggcggagctggccttcagactctgggcgatacgatgtatgcattacccgccgtctacgagaaaggctacctcgatgtttggtttgatctcgaggtcataggcgggcacagttctgttcccacgccacacacagcaattgggatcatgtctgaaatcaccactgctttagaggcaagcccttttcaacctgaaattgaatgggacagccccattcatcgggctctgatatgtctcgcacgctactcgccccgcgcataccctgagctcaccgaagtgatccgctatggagatctcgatgaagcagcgcgtctcgtttctcaagcctcgcgcgaaacgcagtattttatccaaacatctcaagctgttgactggatagcggggggacagaagatcaacgctctaccagagtttgtgacgctgggagtcaatcaccgctatgcgcctcaggatagtg

SEQ ID NO: 33762 - DNA, 924 bp, Muscodor strobelii
  misc_feature: SGI cDNA ID NO. 571653
  misc_feature: Encodes the peptide sequence at SEQ ID NO 33763
atgacaaaactattcacagtgttcggcgcaacaggacagcagggcggggcgataattgactatgttcttgcaaccccgtcgctctcatctgccttctcgcttcgcggcattactcgtgacgcgtctaaggagtcggcggtcgctcttaagaaaaagggcgtcgaagtcatcgaagctgatctcaatgatacctcaaccctccccagagcagttggcggatcacatgtcgtcttcgccgtcaccaacttctgggacgacccaaaagaaggacaagaaatagcccaggggaaagccattgccgacgccgcggtcgcagctggcgcacaccagatcatctggtcatcgctgccaaacgtgagcgagatgaccaaaggcgaagtcactggtatgaagcattttgatggtaaggccgaagtcgaggcgtatatccggacactcgacatcaagagcgccttcgtcctattgggctggtacatgcagaaccatctgagcctcatggtgccaaagaagaacgaagacgattcatacactatgaatcttccgtgggggccggaagcccgtctcccgctcctcgacatccgagacctagggaaattcgtcgcccccgccctactcgaccccgaccgctatgatcagaagcggttcacctgcgccacggcattctataagcttagcgaaatggcagagacgtggactaaggtcgcgggtaaggagattaagctcaataattcagcggacttctcgcagttttctggattgtcggaggagcagaagcgggagaccgtgcatacgagaaagcttggggattatggctactacgggcccgatggcgatgcagaactggaatggactattggtcaggtggccaagccgcttgggacttgggaggggttccttcgagactacggaccatggttcttgtaa

SEQ ID NO: 33763 - protein, 307 aa, Muscodor strobelii
  misc_feature: SGI Peptide ID NO. 571653
  misc_feature (5)..(243): Pfam Id: PF05368 Pfam Desc: NmrA-like family
  misc_feature (5)..(237): Pfam Id: PF05368 Pfam Desc: NmrA-like family
  misc_feature (1)..(299): NCBI GI: 199431881 Blast Desc: DEHA2D19008p [Debaryomyces hansenii]
  misc_feature (1)..(299): NCBI GI: 50421523 Blast Desc: DEHA0D20515g [Debaryomyces hansenii CBS767]
  misc_feature (1)..(287): NCBI GI: 145235549 Blast Desc: An03g05420 [Aspergillus niger] gi|134058110|emb|CAK38304.1| protein product [Aspergillus niger]
  misc_feature (1)..(299): NCBI GI: 239609186 Blast Desc: NmrA family transcriptional regulator [Ajellomyces dermatitidis ER-3]
  misc_feature (1)..(299): NCBI GI: 261188991 Blast Desc: NmrA family transcriptional regulator [Ajellomyces dermatitidis SLH14081] gi|239591912|gb|EEQ74493.1| NmrA family transcriptional regulator [Ajellomyces dermatitidis SLH14081]
  misc_feature (1)..(300): NCBI GI: 259486931 Blast Desc: TPA: conserved [Aspergillus nidulans FGSC A4]
  misc_feature (3)..(299): NCBI GI: 39975395 Blast Desc: MGG_00156 [Magnaporthe grisea 70-15] gi|145018993|gb|EDK03272.1| MGG_00156 [Magnaporthe grisea 70-15]
  misc_feature (1)..(299): NCBI GI: 212541022 Blast Desc: conserved [Penicillium marneffei ATCC 18224] gi|210067965|gb|EEA22057.1| conserved [Penicillium marneffei ATCC 18224]
  misc_feature (1)..(302): NCBI GI: 169764371 Blast Desc: [Aspergillus oryzae RIB40] gi|83764511|dbj|BAE54655.1| protein product [Aspergillus oryzae]
  misc_feature (1)..(300): NCBI GI: 67522286 Blast Desc: AN1600.2 [Aspergillus nidulans FGSC A4] gi|40745151|gb|EAA64307.1| AN1600.2 [Aspergillus nidulans FGSC A4]
MTKLFTVFGATGQQGGAIIDYVLATPSLSSAFSLRGITRDASKESAVALKKKGVEVIEADLNDTSTLPRAVGGSHVVFAVTNFWDDPKEGQEIAQGKAIADAAVAAGAHQIIWSSLPNVSEMTKGEVTGMKHFDGKAEVEAYIRTLDIKSAFVLLGWYMQNHLSLMVPKKNEDDSYTMNLPWGPEARLPLLDIRDLGKFVAPALLDPDRYDQKRFTCATAFYKLSEMAETWTKVAGKEIKLNNSADFSQFSGLSEEQKRETVHTRKLGDYGYYGPDGDAELEWTIGQVAKPLGTWEGFLRDYGPWFL

SEQ ID NO: 33764 - DNA, 288 bp, Muscodor strobelii
  misc_feature: SGI EST ID NO. CUFF.79759.0
  misc_feature: Variant of the nucleotide sequence at SEQ ID NO 33762
gaaggacaagaaatagcccaggggaaagccattgccgacgccgcggtcgcagctggcgcacaccagatcatctggtcatcgctgccaaacgtgagcgagatgaccaaaggcgaagtcactggtatgaagcattttgatggtaaggccgaagtcgaggcgtatatccggacactcgacatcaagagcgccttcgtcctattgggctggtacatgcagaaccatctgagcctcatggtgccaaagaagaacgaagacgattcatacactatgaatcttccgtgggggccg

SEQ ID NO: 33765 - DNA, 732 bp, Muscodor strobelii
  misc_feature: SGI cDNA ID NO. 571654
  misc_feature: Encodes the peptide sequence at SEQ ID NO 33766
atgtcggagcaacgtatgctaaacgtcgctgtcactggcaatcctccttttctggagcataagttcaacacctctcaattggtgagagatgcgctgccggccacagcaagtagtctcaatgggagacaaatacgcattctaaaatatcaccgcgatactctcgactcatacgaagacataagatctgtgtcacacgcgatttggagcggcaaacgcgcgtttttcctgccgagaccgtcgccagatgaagaagagtttgtcgagatcgatttcattcttcaccttggaatgattggctcgggctgggataagcagtttcgtttcgaaacaatcgcacgaagagacggttatcagcatccaggcgtggacggtaaatacgttcagtcggcccacttgaaggctctcggtttaccagaaactcttaccacatcgtttgatgtcgaagccgcgtggcgcaaaacccaacagcagcatccgaatgtcggttgctctgtttcagatgatgcaggtctctacttttgcgagcttcgcctatactcatcattagcagagcctatcttgaccgaatcattcagttcgaagaaaggaagggtcctttttgagcatcttcctcgggcgcatgacaaagaagcgattgatctggcaagagatgtcacgatgacatttatctgcagcgttgctgacgactcggtcttggatgatatgccttcgaagcaatcaccgaacgtctga

SEQ ID NO: 33766 - protein, 243 aa, Muscodor strobelii
  misc_feature: SGI Peptide ID NO. 571654
  misc_feature (7)..(228): NCBI GI: 256723589 Blast Desc: NECHADRAFT_81143 [Nectria haematococca mpVI 77-13-4]
  misc_feature (1)..(242): NCBI GI: 46125435 Blast Desc: FG07095.1 [Gibberella zeae PH-1]
  misc_feature (7)..(233): NCBI GI: 238846146 Blast Desc: conserved [Microsporum canis CBS 113480]
  misc_feature (7)..(228): NCBI GI: 256733075 Blast Desc: NECHADRAFT_102556 [Nectria haematococca mpVI 77-13-4]
  misc_feature (7)..(223): NCBI GI: 240105674 Blast Desc: CPC735_052370 [Coccidioides posadasii C735 delta SOWgp]
  misc_feature (7)..(223): NCBI GI: 119193536 Blast Desc: CIMG_01145 [Coccidioides immitis RS]
  misc_feature (7)..(208): NCBI GI: 242211476 Blast Desc: [Postia placenta Mad-698-R] gi|220729348|gb|EED83224.1| [Postia placenta Mad-698-R]
  misc_feature (3)..(239): NCBI GI: 156045303 Blast Desc: SS1G_09840 [Sclerotinia sclerotiorum 1980] gi|154694235|gb|EDN93973.1| SS1G_09840 [Sclerotinia sclerotiorum 1980]
  misc_feature (20)..(231): NCBI GI: 261357370 Blast Desc: conserved [Verticillium albo-atrum VaMs.102]
  misc_feature (90)..(234): NCBI GI: 154305098 Blast Desc: BC1G_08639 [Botryotinia fuckeliana B05.10] gi|150853802|gb|EDN28994.1| BC1G_08639 [Botryotinia fuckeliana B05.10]
MSEQRMLNVAVTGNPPFLEHKFNTSQLVRDALPATASSLNGRQIRILKYHRDTLDSYEDIRSVSHAIWSGKRAFFLPRPSPDEEEFVEIDFILHLGMIGSGWDKQFRFETIARRDGYQHPGVDGKYVQSAHLKALGLPETLTTSFDVEAAWRKTQQQHPNVGCSVSDDAGLYFCELRLYSSLAEPILTESFSSKKGRVLFEHLPRAHDKEAIDLARDVTMTFICSVADDSVLDDMPSKQSPNV

SEQ ID NO: 33767 - DNA, 2695 bp, Muscodor strobelii
  misc_feature: SGI EST ID NO. CUFF.79783.1
  misc_feature: Variant of the nucleotide sequence at SEQ ID NO 33765
aaatttcggtacaaataggtccatcgcccttgcagagtgggaaagccagtctcgcttttcttcgcgcatgataacaacgtcgcgacatttcgtagagaaattaccagtgccttttcgttttgcagcacggatctacatctcattatgtcggagcaacgtatgctaaacgtcgctgtcactggcaatcctccttttctggagcataagttcaacacctctcaattggtgagagatgcgctgccggccacagcaagtagtctcaatgggagacaaatacgcattctaaaatatcaccgcgatactctcgactcatacgaagacataagatctgtgtcacacgcgatttggagcggcaaacgcgcgtttttcctgccgagaccgtcgccagatgaagaagagtttgtcgagatcgatttcattcttcaccttggaatgattggctcgggctgggataagcagtttcgtttcgaaacaatcgcacgaagagacggttatcagcatccaggcgtggacggtaaatacgttcagtcggcccacttgaaggctctcggtttaccagaaactcttaccacatcgtttgatgtcgaagccgcgtggcgcaaaacccaacagcagcatccgaatgtcggttgctctgtttcagatgatgcaggtctctacttttgcgagcttcgcctatactcatcattagcagagcctatcttgaccgaatcattcagttcgaagaaaggaagggtcctttttgagcatcttcctcgggcgcatgacaaagaagcgattgatctggcaagagatgtcacgatgacatttatctgcagcgttgctgacgactcggtcttggatgatatgccttcgaagcaatcaccgaacgtctgaaaacaagtggctagattaaggctggtgatacatgttgtagccctcaaagtcaagaatggtagatacatattagatatggcctaagctctatatcacgatgcatttagtttaatcgcaacgagggtcgacgtaagatttctacaaagacatagacgcatttttctagtctgtcacaacgacatgtgcctcaaattaaacacacaagacagcattaacttccttactggttgaataattgtgctaatcgcccaatgagtgcatgattactgacccatgaatgacccctaggaaatgcaatcgaatgtcatgagacaacgggcgtttcatcatcttatagctatttgatcatacactgaaacccatcgttgagctagccgtcgccacgcagccacggaacacattctcgaagacgagtgaccgtcgatatcgagctgaaattcaacgtcgtgaagcaggctttcttcgccaatctgaaaactgtcttcctcggacgacgacaacattgctgcaattccgctttcttccgtgctcgctacccattccgcaatacacgcgagtagacttgcgtcactgtgactggggtcttgggcgctctcgatctgtcgtagcaatttgatcgcctgcctccgtacgattaggtttctacattggcaagcaacaaagaatagcggttgagcggtcgctgcggcgagagaatggccaaatcgaggtcctaggagattcgcttttgcggcatgagtttgttgctccgtttggataatgttcccacagagctctatgatactcgcaaattgcgcagtgtaagtgtccgacagcaaaagggacactggtcgcgaatgagtcaagacgcagagctcatgaactttgtgatgaactaaaagagtctgaacacatgtttgagtttctggatctactgtactgttggccattaggctggcaaagttagtcctccacgaatctagatgagttgtgagcactgatatatgttcggaatgattgctaccatctgaattgcgacacaatgcagtgggatgacaaggagtctgagccgtctgcttccagaacagtgtcttgatggcgccggtgatgatattcaaggaatccctcgcgtcgttgatactgccaaacgatgaggggggagaaggaccaagctgtagagttagaggggagtggatcaaccgattggatgatcgaatatactcaaagtcatgagaagatgcgagcgcatctatagtttgcatgaggtcaagtctcagatcgaaagattcaccacgatgctgatgatacatgatcgcaactgcaccacggaggtgtacacgtgccaaatcctctcgacctcgaagactctcgatcacggtgaagatcaaactgcctaggagagcgagctctcgactagtcggcgacgagtccaatcgtgcattgagctcacggatcgactggttgtacttattcagagcgtaggtcgccggatatcctgaccacaacgccattttgcccgaaacggagctcggcgccatatttctactcagcgccgcgagtgcaaggatgcctggcaagacaaacggctcagcgaatatggctggtagaaccaccgagccccagacttgggtgtctaaacataacgatagctcccgcactgagactgtgcggaagtattcgaagtgccacgtgtctatgagatgaaggtgtggcgtatcccagagcttgccttggagtgaccatgttcttgagaagggaaggatccgaggagcgtgctggggagctggaagcgggaggaagtcgcattttctgccagtcatggtacactgagtacatgccg

SEQ ID NO: 33768 - DNA, 1182 bp, Muscodor strobelii
  misc_feature: SGI cDNA ID NO. 571655
  misc_feature: Encodes the peptide sequence at SEQ ID NO 33769
atgccggtgactattaagcctgcaaatcacgactcaacggcctttggtggtcgacgttacaaatccgcagtgacgcctgaggaactattattgcacacactgagggacgacttggacgacggaccgtccaaagcgccggaaatcgtgcaaagtgcatttacagcaccattggtatgcgctgtgtcggaggatgataatattgacaacggagaaagcgtatgctatgcgaccaaaaacggtttcgtacacacatgtctcgaggcgtacaactcacaccacaggcttgtactgcgacccgaggatgtttggtttgcaattttgacgcagtttgcgagctatgtcaacgcgcgtgttgagacagactcggctctccgagagattttcgttgggcctgatgagaccactgacgaagagtcgccgaagcgtcctatcaagaagaaagagttgcatatagaaattgaaataaagcctgagacggatcatggtgctctagcgtgcatgatgaccgagttggtccagtcgcagattcgtgacgaaggactgcgcgagtggatccagcccggattcacgacgactaaaccggtggatcaagcagttgccaacatgctcctcatgggcgcaacacagaaattctttactttctcatggggtactcgctgcgggttgccgagcgttacgcttcttggcgagaaggaagactggatcggcattcgtaaacgagctgagcgcttgttgatatatggcaatgagcccacgagatggctagatttgttacgtcctgtccttgatggattcgtcaataccttcgacgatcctgaaggcgagcgagccgtggctttctggaggggcatctgtgacgagcgccgccctaatgggagcggcaacatcacgtattcgggttggatcacggcattttgcttctgggatgcggacggcaggtgtttgcaccaagaggagggcgcgcacttgtcgcgaaaagacatacccgtggggttttgcaagatacctatagacctttggtactataatgtccgtgtcccctccgaaatcgtagctgggtccctaggcatacatgtgtatcgagaggaggaaaagctagaagtagccgaaaagaacgagtctagacttgatactactcagcccctggcaggttggatattgtatcataaaccccctacatag

SEQ ID NO: 33769 - protein, 393 aa, Muscodor strobelii
  misc_feature: SGI Peptide ID NO. 571655
  misc_feature (1)..(390): NCBI GI: 145247740 Blast Desc: An12g10730 [Aspergillus niger] gi|134080862|emb|CAK41420.1| protein product [Aspergillus niger]
  misc_feature (1)..(388): NCBI GI: 169786137 Blast Desc: [Aspergillus oryzae RIB40] gi|83776277|dbj|BAE66396.1| protein product [Aspergillus oryzae]
  misc_feature (1)..(388): NCBI GI: 238507081 Blast Desc: conserved [Aspergillus flavus NRRL3357] gi|220689455|gb|EED45806.1| conserved [Aspergillus flavus NRRL3357]
  misc_feature (1)..(373): NCBI GI: 171686436 Blast Desc: protein product [Podospora anserina] gi|170943179|emb|CAP68832.1| protein product [Podospora anserina]
  misc_feature (1)..(390): NCBI GI: 255950062 Blast Desc: Pc22g18950 [Penicillium chrysogenum Wisconsin 54-1255] gi|211592815|emb|CAP99183.1| Pc22g18950 [Penicillium chrysogenum Wisconsin 54-1255]
  misc_feature (57)..(388): NCBI GI: 171684309 Blast Desc: protein product [Podospora anserina] gi|170942115|emb|CAP67767.1| protein product [Podospora anserina]
  misc_feature (1)..(390): NCBI GI: 255942128 Blast Desc: Pc16g15400 [Penicillium chrysogenum Wisconsin 54-1255] gi|211586456|emb|CAP94210.1| Pc16g15400 [Penicillium chrysogenum Wisconsin 54-1255]
  misc_feature (77)..(388): NCBI GI: 169604216 Blast Desc: SNOG_05119 [Phaeosphaeria nodorum SN15] gi|111066390|gb|EAT87510.1| SNOG_05119 [Phaeosphaeria nodorum SN15]
  misc_feature (1)..(388): NCBI GI: 169780124 Blast Desc: [Aspergillus oryzae RIB40] gi|238505822|ref|XP_002384114.1| conserved [Aspergillus flavus NRRL3357] gi|83773266|dbj|BAE63393.1| protein product oryzae]
  misc_feature (1)..(369): NCBI GI: 256732860 Blast Desc: NECHADRAFT_79491 [Nectria haematococca mpVI 77-13-4]
MPVTIKPANHDSTAFGGRRYKSAVTPEELLLHTLRDDLDDGPSKAPEIVQSAFTAPLVCAVSEDDNIDNGESVCYATKNGFVHTCLEAYNSHHRLVLRPEDVWFAILTQFASYVNARVETDSALREIFVGPDETTDEESPKRPIKKKELHIEIEIKPETDHGALACMMTELVQSQIRDEGLREWIQPGFTTTKPVDQAVANMLLMGATQKFFTFSWGTRCGLPSVTLLGEKEDWIGIRKRAERLLIYGNEPTRWLDLLRPVLDGFVNTFDDPEGERAVAFWRGICDERRPNGSGNITYSGWITAFCFWDADGRCLHQEEGAHLSRKDIPVGFCKIPIDLWYYNVRVPSEIVAGSLGIHVYREEEKLEVAEKNESRLDTTQPLAGWILYHKPPT

SEQ ID NO: 33770 - DNA, 3446 bp, Muscodor strobelii
  misc_feature: SGI EST ID NO. CUFF.79776.0
  misc_feature: Variant of the nucleotide sequence at SEQ ID NO 33768
taactgcactagaattgaaggcgacgaacaatctcagatatgtattcctaaagtatctcttgagtaaaagcctttgctctgtcccatcagatgaacgcggaatttcatttcgagacgccgttcataattacttctgcagtatggcagtaaagagctatcgtgttcgtttcgcagatgtttccgcgtgaagcatgcactctggttttgggatttgaaccagtcctatgaaatagcacatcataggtcacgcgccgtgctatgatgaaccacctaaactcgatcgagtgcgagctgaaactagtcgctcaagcgcacagagccgacaccgttcgagtccttcgctgcctagagtaggcagactagaaactcccggaaactaagtataccactggacaaattacgctgtcgggtctgcgccttcatcttttttaccccctgacaagaataaggcatcagacttgaactatcagcgaaatgccggtgactattaagcctgcaaatcacgactcaacggcctttggtggtcgacgttacaaatccgcagtgacgcctgaggaactattattgcacacactgagggacgacttggacgacggaccgtccaaagcgccggaaatcgtgcaaagtgcatttacagcaccattggtatgcgctgtgtcggaggatgataatattgacaacggagaaagcgtatgctatgcgaccaaaaacggtttcgtacacacatgtctcgaggcgtacaactcacaccacaggcttgtactgcgacccgaggatgtttggtttgcaattttgacgcagtttgcgagctatgtcaacgcgcgtgttgagacagactcggctctccgagagattttcgttgggcctgatgagaccactgacgaagagtcgccgaagcgtcctatcaagaagaaagagttgcatatagaaattgaaataaagcctgagacggatcatggtgctctagcgtgcatgatgaccgagttggtccagtcgcagattcgtgacgaaggactgcgcgagtggatccagcccggattcacgacgactaaaccggtggatcaagcagttgccaacatgctcctcatgggcgcaacacagaaattctttactttctcatggggtactcgctgcgggttgccgagcgttacgcttcttggcgagaaggaagactggatcggcattcgtaaacgagctgagcgcttgttgatatatggcaatgagcccacgagatggctagatttgttacgtcctgtccttgatggattcgtcaataccttcgacgatcctgaaggcgagcgagccgtggctttctggaggggcatctgtgacgagcgccgccctaatgggagcggcaacatcacgtattcgggttggatcacggcattttgcttctgggatgcggacggcaggtgtttgcaccaagaggagggcgcgcacttgtcgcgaaaagacatacccgtggggttttgcaagatacctatagacctttggtactataatgtccgtgtcccctccgaaatcgtagctgggtccctaggcatacatgtgtatcgagaggaggaaaagctagaagtagccgaaaagaacgagtctagacttgatactactcagcccctggcaggttggatattgtatcataaaccccctacatagtggaacgtttttaccctagcttcgttagttttctgttcccgctgcaattcgcgtatcgcgttgtaagtccaccattgcgcataggggtgcttccatgtcgtacgaataactctttagtcgaatgaacagcctgatacttcttgatcacctaccaagccagtctagccagccaggcttgaaggtttgagtatcgtcgtagcgtatgaggccgatgaaaagaacacatacaggatacgcgagattgtagaataagggtatcacggaattccatcttgaatgaccaactcgaacagggaaaacaagcattggcatgaaaagaaagcattccatgtagaattggcataccaatgacaatggaatggctgcaaacaaggtcctgtgagattcagcgagcttgaacgctttctggaagagattataagacgcgacttgaacccaacccaaaatcagtctggccgcaatctcgcctatatctaacgaagatattgacgaatataacgacgatttcggaacgacgccgaagaggccaatcaaatatccgagaacgtttacgagagcttcaacgaccacgtggaagaacccgaaagctgcagtcaaacttgcgtaaacctcctcaaacccgtgaaactccaagaagaaagggtgtatgaagttgcattgtgatatcactaccaagtatgcgagattcggctccagtaaggagcaaagtgtaatcggaagtagcatgatgcggaatatcggaagcatgcttctatctcccatattacccaaggctaaagcacaatcctctaggtattgtagctctacaccttcgaggcgcttttgcgattgggcaagtgtaagaatctgaacaacaataagatgtatcaccatcagccaggcgcatatcataactcccaaatccgctgttatcgaagaaagcttgataacgagaaagatgatcgagaggcaattgaaaaggctgagaatgaggtcgaagtgcagataagcattttgtgtatcggaatttgagaacaatgtcagcgagacattgtattgctcaatcagtcgtcgaactgctgcagattgctccaggtccagcgaggacgagtttgatgtctgaacgtgctcgtctgcagatagtgcatcagacgaacgcgtcgacattatagtcctttgggcgctctctgttatgtcgatgctggaacgcacatttgccccaagagcctgcggcgctgtcgatgcggacccttgtgaaccagcagtatcagcgtacgacgctgaaatttcctggttctccttttcgaaagtgtctagtacccgacattgctctcgaagcagaaagatggctgtgagagaaattcgcacgcgggtccagacgctcatgtcaccttcgtgccgatgtttaattgcggctaacactccattggcaaaagcagcaacaatgaagatagcgtccgcgatgcaagcgccagggttcagtttccacaagaagaacaatacacgaccaattcttcctgttggtctagtgaacaggaaactgcccaatggttgtaccaaaagagagagacttagagctagaaacaacccgaagacgttggcccgggtgaagggattggtgtcgagcactggaggtacatttgatggcgccccgacattgcaagtcgaaaggtcatcttgtctttccggcagtaaaggcattaagagtacctggctagcgccaataaatatgaagttgttgtgaaatcaattcttttattgttaacattatttgaaaagtgaggcttttgtcagtacctacagtgtttcgc

SEQ ID NO: 33771 - DNA, 588 bp, Muscodor strobelii
  misc_feature: SGI cDNA ID NO. 571656
  misc_feature: Reduced expression when VOC is produced
  misc_feature: Encodes the peptide sequence at SEQ ID NO 33772
atgcgttactctgctatcttcggtgctactatccttgccagcggtgttctggcaaaggacgacaacctgcacactactacactcaccatcggcttcaccaacagcgctggctctgccatcaccaccacaaccgtgtacacctacgagtactcgaacccggctacaacgctcttgacgcagacaaactcggatggtgttatcactgccttcccgaccagtattcccgccgtcgtcacctctcagccctcagtagtgacatcccagcctgctgttgagacgtccatgccagatgtcgccactatcccggccggtcttcccactggcgtaacgaccattgtccagggaaactcctcctcgttcaccatcagtgttggtgaatctacgaccgtcgtcctcacctccacgtctagcgcgaatgacgcatcttctactggtggatcttctcccactgacggatccaacccttcctccacctcaccgtcatccagcggcagcagcccaactgagacacctggtgccgctgctggtatcatcccagcttcattcggcctcgtatcccttggtgctcttgtcgctgctttgctctaa

SEQ ID NO: 33772 - protein, 195 aa, Muscodor strobelii
  misc_feature: SGI Peptide ID NO. 571656
  misc_feature (53)..(195): NCBI GI: 169623522 Blast Desc: SNOG_15003 [Phaeosphaeria nodorum SN15] gi|111056426|gb|EAT77546.1| SNOG_15003 [Phaeosphaeria nodorum SN15]
  misc_feature (53)..(195): NCBI GI: 189189884 Blast Desc: conserved [Pyrenophora tritici-repentis Pt-1C-BFP] gi|187972887|gb|EDU40386.1| conserved [Pyrenophora tritici-repentis Pt-1C-BFP]
  misc_feature (43)..(105): NCBI GI: 242768425 Blast Desc: period circadian protein, [Talaromyces stipitatus ATCC 10500] gi|218724762|gb|EED24179.1| period circadian protein, [Talaromyces stipitatus ATCC 10500]
  misc_feature: Useful for introducing or modulating the production of volatile compounds
MRYSAIFGATILASGVLAKDDNLHTTTLTIGFTNSAGSAITTTTVYTYEYSNPATTLLTQTNSDGVITAFPTSIPAVVTSQPSVVTSQPAVETSMPDVATIPAGLPTGVTTIVQGNSSSFTISVGESTTVVLTSTSSANDASSTGGSSPTDGSNPSSTSPSSSGSSPTETPGAAAGIIPASFGLVSLGALVAALL

SEQ ID NO: 33773 - DNA, 1258 bp, Muscodor strobelii
  misc_feature: SGI EST ID NO. CUFF.79851.0
  misc_feature: Variant of the nucleotide sequence at SEQ ID NO 33771
cagccttttattagttttcttctttccccagagtccccaaagatttcatttccttcatccaccacacttactttcgttcaagactgtctgtcgtttctactcgctttcaaaattaagacttttcataatatttaatacgctcgttgtcgtcaaaatgcgttactctgctatcttcggtgctactatccttgccagcggtgttctggcaaaggacgacaacctgcacactactacactcaccatcggcttcaccaacagcgctggctctgccatcaccaccacaaccgtgtacacctacgagtactcgaacccggctacaacgctcttgacgcagacaaactcggatggtgttatcactgccttcccgaccagtattcccgccgtcgtcacctctcagccctcagtagtgacatcccagcctgctgttgagacgtccatgccagatgtcgccactatcccggccggtcttcccactggcgtaacgaccattgtccagggaaactcctcctcgttcaccatcagtgttggtgaatctacgaccgtcgtcctcacctccacgtctagcgcgaatgacgcatcttctactggtggatcttctcccactgacggatccaacccttcctccacctcaccgtcatccagcggcagcagcccaactgagacacctggtgccgctgctggtatcatcccagcttcattcggcctcgtatcccttggtgctcttgtcgctgctttgctctaagtcgatatatcggtaatagatatactcctcagagctcatgctgctacaatagatgctgcaccacgcgaaccgtcttgctgccattgtccagccaaccactaagcgatttacacatacacccaagcttgttacgccctttctgctatagagtcaatccggtgtcatcttcagctgtactataattcgctatggagcattttcaatcttgaagttgcatttgtccgggcatttagttgtgttgcaacaggaattggaatcattgggctaaaaaatggaattctgttgtatggctggagtacaaggaccgttggcccgagtgaatcggcgtttgagaataatactgcggattaattatacctatcttccaacatagttgaaccagcaccctgtttgttctcccgtatttgcatgccttatggtgacgtgtggttcgtttttaagttcgtcgcctatacacaaaggcatttgaaagcacccggacaattgcagggtaaatagtagtcaagtacgttctca

SEQ ID NO: 33774 - DNA, 1107 bp, Muscodor strobelii
  misc_feature: SGI cDNA ID NO. 571657
  misc_feature: Encodes the peptide sequence at SEQ ID NO 33775
atgagcttcctttctgatctgagaaaacaaactcgtcaaggcggcttgccaccatcgccttggaaagaaagatttgccccggaatcagttgatatcgagggacttcatcctccatggatcacgaaacgcgatctgaatgtcgaacactccgggctggcgcccgagtttccgcggcttcaccccgtgttctactgcgaccaaccgtctgagctcgcccaacctccgaaggatggcgttggttgggacaggctttttaccaccgaggaggggtatcaaaaagctcgatttctcggccttcgaacatgggaggccgctcccctacacagatggatgcggttttcagataaaacggggaacgtctccggtggccacctttcgaccgacagccgcaaagatcttttagatatattcaaagcagagatgttccaagtagacgaaaattcatggctttcctttctcagaaaagaccgttggtacctggtcactaaaggcttccatctggctagtgatatactcgatgatccaaaacgaccgacggctactcttatgcctcctttcccgcgatcagtagaccaaccagaggtgtgggaacagttaaggatcgccatcgagctggctaatagaatgtttctttcccttgtctatgatcggaataccaccctcgaaacaatcttattcggaagggtagagtattggagaaacgtagagatagatcctccagctccgttcgatgacgccttgattctactatcacctgcggcagaacagcaacttgcgactaagaacaatactcagcgctggcgaaatgacatagaaatgcttgaaggcaatgagaatgacaaggccgaagcagtgaggagggcattggagaatgagggtgaacacttggcgtggtcattcctcctcgacgaagaccctggctcttaccgtggctataccattcctctagaataccccaggttcttagctcatctaaatacggaaccaatcagacttctcatcatgggaaacgtcactctcgcggagcgttgtatgctatactatcagctcgcaatcacgatggttcagtatgtgatatgtgggcgggaaggtctcacctttacttga

SEQ ID NO: 33775 - protein, 368 aa, Muscodor strobelii
  misc_feature: SGI Peptide ID NO. 571657
  misc_feature (67)..(215): NCBI GI: 85089861 Blast Desc: NCU09292 [Neurospora crassa OR74A] gi|28919473|gb|EAA28908.1| NCU09292 [Neurospora crassa OR74A]
MSFLSDLRKQTRQGGLPPSPWKERFAPESVDIEGLHPPWITKRDLNVEHSGLAPEFPRLHPVFYCDQPSELAQPPKDGVGWDRLFTTEEGYQKARFLGLRTWEAAPLHRWMRFSDKTGNVSGGHLSTDSRKDLLDIFKAEMFQVDENSWLSFLRKDRWYLVTKGFHLASDILDDPKRPTATLMPPFPRSVDQPEVWEQLRIAIELANRMFLSLVYDRNTTLETILFGRVEYWRNVEIDPPAPFDDALILLSPAAEQQLATKNNTQRWRNDIEMLEGNENDKAEAVRRALENEGEHLAWSFLLDEDPGSYRGYTIPLEYPRFLAHLNTEPIRLLIMGNVTLAERCMLYYQLAITMVQYVICGREGLTFT

SEQ ID NO: 33776 - DNA, 1001 bp, Muscodor strobelii
  misc_feature: SGI EST ID NO. CUFF.79799.0
  misc_feature: Variant of the nucleotide sequence at SEQ ID NO 33774
gtcgggataagccatgtttttttcataaaatgtacccattctagataatataggtgattctcttgaactcttggattagctggcctccaaatactcgtctgatactgcccaaagactgtccagcttgtcactgcttgtctcaatgggtgaacgtcgatatgttctacagcatgcagatactctactctttgtccaccgaatgcgtctagagagggtattagagctgatgacgagaagagagtttcaatacattgtgtgttagtgagacaaagcaatgacccaccactttcgcctccacatttgtgatgagatgtgcttctcaaattactcaagcgcaaaggtttccgccgtttggaatgatccgctacttgagagaagccatattctcaaattatgagcttcctttctgatctgagaaaacaaactcgtcaaggcggcttgccaccatcgcctgtgcgttgacggtaaattccaagtatccctgttctaccatctcgcgaacagttgctgataccgaggctattaaagtggaaagaaagatttgccccggaatcagttgatatcgagggacttcatcctccatggatcacgaaacgcgatctgaatgtcgaacactccgggctggcgcccgagtttccgcggcttcaccccgtgttctactgcgaccaaccgtctgagctcgcccaacctccgaaggatggcgttggttgggacaggctttttaccaccgaggaggggtatcaaaaagctcgatttctcggccttcgaacatgggaggccgctcccctacacagatggatgcggttttcagataaaacggggaacgtctccggtggccacctttcgaccgacagccgcaaagatcttttagatatattcaaagcagagatgttccaagtagacgaaaattcatggctttcctttctcagaaaagaccgttggtagtgagtagccgtagctccgctctattttcacgagtctgaatcgtcgatacaatcgag

SEQ ID NO: 33777 - DNA, 1593 bp, Muscodor strobelii
  misc_feature: SGI cDNA ID NO. 571658
  misc_feature: Encodes the peptide sequence at SEQ ID NO 33778
atgacagctcggtctcttttcttgctacaagctttgacggccattggctgcgctataccatatccttcagcaatgaacacgacatcagggctttacgcaccacacatttccaagtcttttccaggcgttgtttcttttccaaatatcccctatgccgagaatccaacaggcgctctccggttcgcgcccccaaagccagtgcagccagccgatgcaggtaaagtgaactacgagaccgagcttccatttgggtgctttcaatattttccggcaaacttctatgacacggtagtgtttaaaagcgaaacttcatatcttctacagcgaggcgacttcgcaaacaccactgaggattgcttgcgcctgtcaatttttgctccgaaggcagctgttgaaacagcaatcaaggagcctgtggtttcgaaccgaaataaggagaacggcttgcctgtagctgtcttcttccatggtggaggctatttgtttggcggtatcaatacgccttaccaacttgcgcaaagctgggtcgagcgtagtcagtcacatatcgtggttcagatccagtatcgcctcaatatccttggtcagcctaatgcggccggcttggaaggaagcgacaatctgaacttcagtttccttgatcagcgtctagcagtcgaatgggttcgagacaatgctgcaagctttggtggtgatccagaacgcattacactctgggggcagagcgccggggcggacgccgttgacgcatttctattcgcgtgggcccaagatcccatcgcgagcggtgtaattgtgaactcgggaaattctttgggacttgcgccttatctcggcgacgcgacaaatcacagtgcttttgcaactgctgctactgcgcttggatgcggagacctttcgccggctgaggagctagcttgcatgcgtcagattccagcctccgacatcaagacctacgtgcagaccactcctggacacggcggtgcggtcgacgccaacctcgcattcgacctagttgtggacaatgtgaccgtcttcgccgactaccctgagctactcgcatcaaacaaattcgcttccagtgtaccgatgcttgctactacgacattagatgaggggaatgcgattgtcccatatgacttcgatggcagcgccaccacatataaactgccaatggaactccaaaccattgccaactacttcacaatcccacttcaatgcgctgtgaaacaagatatccaattacgaacacaggtcggagcgacaacgtaccaagcattatacggagggaacttcaccgacatatcccctgctccctggctaggagcctatcataccgctgatctgcccatggtgtttggcacctatggagttgtgggaccatcgacagatttcgaagcatctctgagtgcgcgaatgcaggatctgtatcttgaatttctgcaagacccagaaaatgggctgaagaatgcaggttggcccaaagcgacggatgtgtatacggatgagaacctcatgacatttggtatcgacgctaagacggatcaacttgcgacagcagatcagttcatgctcggaacaggctgctcttaa

SEQ ID NO: 33778 - protein, 530 aa, Muscodor strobelii
  misc_feature: SGI Peptide ID NO. 571658
  misc_feature (1)..(520): Pfam Id: PF00135 Pfam Desc: Carboxylesterase
  misc_feature (117)..(383): Pfam Id: PF00135 Pfam Desc: Carboxylesterase
  misc_feature (1)..(69): Pfam Id: PF00135 Pfam Desc: Carboxylesterase
  misc_feature (22)..(520): NCBI GI: 256721810 Blast Desc: NECHADRAFT_53239 [Nectria haematococca mpVI 77-13-4]
  misc_feature (24)..(524): NCBI GI: 166344059 Blast Desc: triacylglycerol lipase FGL5 [Gibberella zeae]
  misc_feature (24)..(524): NCBI GI: 46115482 Blast Desc: FG03583.1 [Gibberella zeae PH-1]
  misc_feature (36)..(509): NCBI GI: 145612811 Blast Desc: MGG_12436 [Magnaporthe grisea 70-15] gi|145019922|gb|EDK04150.1| MGG_12436 [Magnaporthe grisea 70-15]
  misc_feature (8)..(522): NCBI GI: 238490162 Blast Desc: carboxylesterase, type B, [Aspergillus flavus NRRL3357] gi|220696731|gb|EED53072.1| carboxylesterase, type B, [Aspergillus flavus NRRL3357]
  misc_feature (25)..(519): NCBI GI: 145236451 Blast Desc: An06g00460 [Aspergillus niger] gi|134075327|emb|CAK44961.1| protein product [Aspergillus niger]
  misc_feature (25)..(493): NCBI GI: 189198429 Blast Desc: para-nitrobenzyl esterase [Pyrenophora tritici-repentis Pt-1C-BFP] gi|187981500|gb|EDU48126.1| para-nitrobenzyl esterase [Pyrenophora tritici-repentis
  misc_feature (26)..(522): NCBI GI: 169772279 Blast Desc: [Aspergillus oryzae RIB40] gi|83768469|dbj|BAE58606.1| protein product [Aspergillus oryzae]
  misc_feature (25)..(494): NCBI GI: 145253184 Blast Desc: An16g08070 [Aspergillus niger] gi|134083664|emb|CAK47056.1| protein product [Aspergillus niger]
  misc_feature (25)..(487): NCBI GI: 118135688 Blast Desc: chlorogenic acid esterase precursor [Aspergillus niger]
  misc_feature (43)..(378): SWISSPROT Homolog: EC 3.1.1.1 Carboxylesterase
MTARSLFLLQALTAIGCAIPYPSAMNTTSGLYAPHISKSFPGVVSFPNIPYAENPTGALRFAPPKPVQPADAGKVNYETELPFGCFQYFPANFYDTVVFKSETSYLLQRGDFANTTEDCLRLSIFAPKAAVETAIKEPVVSNRNKENGLPVAVFFHGGGYLFGGINTPYQLAQSWVERSQSHIVVQIQYRLNILGQPNAAGLEGSDNLNFSFLDQRLAVEWVRDNAASFGGDPERITLWGQSAGADAVDAFLFAWAQDPIASGVIVNSGNSLGLAPYLGDATNHSAFATAATALGCGDLSPAEELACMRQIPASDIKTYVQTTPGHGGAVDANLAFDLVVDNVTVFADYPELLASNKFASSVPMLATTTLDEGNAIVPYDFDGSATTYKLPMELQTIANYFTIPLQCAVKQDIQLRTQVGATTYQALYGGNFTDISPAPWLGAYHTADLPMVFGTYGVVGPSTDFEASLSARMQDLYLEFLQDPENGLKNAGWPKATDVYTDENLMTFGIDAKTDQLATADQFMLGTGCS

SEQ ID NO: 33779 - DNA, 1146 bp, Muscodor strobelii
  misc_feature: SGI EST ID NO. CUFF.79804.0
  misc_feature: Variant of the nucleotide sequence at SEQ ID NO 33777
cgagcggtgtaattgtgaactcgggaaattctttgggacttgcgccttatctcggcgacgcgacaaatcacagtgcttttgcaactgctgctactgcgcttggatgcggagacctttcgccggctgaggagctagcttgcatgcgtcagattccagcctccgacatcaagacctacgtgcagaccactcctggacacggcggtgcggtcgacgccaacctcgcattcgacctagttgtggacaatgtgaccgtcttcgccgactaccctgagctactcgcatcaaacaaattcgcttccagtgtaccgatgcttgctactacgacattagatgaggggaatgcgattgtcccatatgacttcgatggcagcgccaccacatataaactgccaatggaactccaaaccattgccaactacttcacaatcccacttcaatgcgctgtgaaacaagatatccaattacgaacacaggtcggagcgacaacgtaccaagcattatacggagggaacttcaccgacatatcccctgctccctggctaggagcctatcataccgctgatctgcccatggtgtttggcacctatggagttgtgggaccatcgacagatttcgaagcatctctgagtgcgcgaatgcaggatctgtatcttgaatttctgcaagacccagaaaatgggctgaagaatgcaggttggcccaaagcgacggatgtgtatacggatgagaacctcatgacatttggtatcgacgctaagacggatcaacttgcgacagcagatcagttcatgctcggaacaggctgctcttaagagcgtgcgaccggctgtcggtactcgagtggcttgcgaagcattggtttggcactgaggagttgccagtcaggagtcgacaagctgtaaaagcgccaatttgttgtaataggattgtaatttagatttattatgtgcattttcgtcatcaattccggtatatccgattgcctgtgttttggaagatacctatcgacagtttcacgctgctaatgtaaatagcaggcggttggaatctctaaagacttgtgaggaagcgattggcgcatttcctaggggaacgtttcaatttaagtctattgggtcagatcatacaggtaccctcataacgaag

SEQ ID NO: 33780 - DNA, 618 bp, Muscodor strobelii
  misc_feature: SGI cDNA ID NO. 571659
  misc_feature: Encodes the peptide sequence at SEQ ID NO 33781
atgaggtccacggacgtgacaatcacgaccgatcggctcaatctagagctctgccctgacgcggacagctcattctggtcggaatacgtttccatccgcgccgacacgtcctggcaacagcaggtgtggcacggctcatatccgccggaggatgcacaagaagcacataagaagaactcttgccttgttgaaaaacgcggttatggcatatgggcaatttccaagcgtcgcaacgggctcactcgtcatgaatttggcagcgcggatgggacaattgaatgggttggctggattggctaccgtaacctagatgactcgacgccgcagtcatcaacctggcctccctcgccgggtactgtggaggtctatgtcggattcggaaaacctcattggggttgtggttatggcacagaggctttgcagggtctagttgatgatgccttcggcaacaatcgtatcgatacaagactgacagcatgcatccttgaggacaacttggcttcgcagaagtgttttcgaactgttgggtttgcgaagacgacggaggatctccgctatgaggatgacggagtgtactgggtattggatagagagagttgggaagaaggaagaaaatag

SEQ ID NO: 33781 - protein, 205 aa, Muscodor strobelii
  misc_feature: SGI Peptide ID NO. 571659
  misc_feature (91)..(178): Pfam Id: PF00583 Pfam Desc: Acetyltransferase (GNAT) family
  misc_feature (95)..(178): Pfam Id: PF00583 Pfam Desc: Acetyltransferase (GNAT) family
  misc_feature (8)..(198): NCBI GI: 256765224 Blast Desc: GCN5-related N-acetyltransferase [Streptomyces sp. C]
  misc_feature (8)..(197): NCBI GI: 256395949 Blast Desc: GCN5-related N-acetyltransferase [Catenulispora acidiphila DSM 44928] gi|256362175|gb|ACU75672.1| GCN5-related N-acetyltransferase [Catenulispora acidiphila DSM 44928]
  misc_feature (7)..(177): NCBI GI: 254466734 Blast Desc: acetyltransferase, gnat family [Rhodobacterales bacterium Y4I] gi|206687642|gb|EDZ48124.1| acetyltransferase, gnat family [Rhodobacterales bacterium Y4I]
  misc_feature (82)..(182): NCBI GI: 57234707 Blast Desc: acetyltransferase [Dehalococcoides ethenogenes 195] gi|57225155|gb|AAW40212.1| acetyltransferase, GNAT family [Dehalococcoides ethenogenes 195]
  misc_feature (4)..(177): NCBI GI: 46580890 Blast Desc: acetyltransferase [Desulfovibrio vulgaris subsp. vulgaris str. Hildenborough] gi|241908999|ref|ZP_04793556.1| GCN5-related N-acetyltransferase [Desulfovibrio vulgaris RCH1]
  misc_feature (4)..(177): NCBI GI: 120601807 Blast Desc: GCN5-related N-acetyltransferase [Desulfovibrio vulgaris subsp. vulgaris DP4] gi|120562036|gb|ABM27780.1| GCN5-related N-acetyltransferase [Desulfovibrio vulgaris DP4]
  misc_feature (83)..(177): NCBI GI: 225024183 Blast Desc: EIKCOROL_01053 [Eikenella corrodens ATCC 23834] gi|224943208|gb|EEG24417.1| EIKCOROL_01053 [Eikenella corrodens ATCC 23834]
  misc_feature (6)..(205): NCBI GI: 254400965 Blast Desc: acetyltransferase [Streptomyces sviceus ATCC 29083] gi|197710446|gb|EDY54480.1| acetyltransferase [Streptomyces sviceus ATCC 29083]
  misc_feature (8)..(183): NCBI GI: 229209518 Blast Desc: acetyltransferase, ribosomal protein N-acetylase [Nocardiopsis dassonvillei subsp. dassonvillei DSM 43111] gi|228567778|gb|EEK32320.1| acetyltransferase, ribosomal protein
  misc_feature (8)..(183): NCBI GI: 254389530 Blast Desc: acetyltransferase [Streptomyces clavuligerus ATCC 27064] gi|197703243|gb|EDY49055.1| acetyltransferase [Streptomyces clavuligerus ATCC 27064]
MRSTDVTITTDRLNLELCPDADSSFWSEYVSIRADTSWQQQVWHGSYPPEDAQEAHKKNSCLVEKRGYGIWAISKRRNGLTRHEFGSADGTIEWVGWIGYRNLDDSTPQSSTWPPSPGTVEVYVGFGKPHWGCGYGTEALQGLVDDAFGNNRIDTRLTACILEDNLASQKCFRTVGFAKTTEDLRYEDDGVYWVLDRESWEEGRK

SEQ ID NO: 33782 - DNA, 1055 bp, Muscodor strobelii
  misc_feature: SGI EST ID NO. CUFF.79810.0
  misc_feature: Variant of the nucleotide sequence at SEQ ID NO 33780
ctcatggtacctttacaggcattaccgcgcattcaatgaaatgatttttgatacgagggcatgacgacggttgagaattagggtcacactaccaacaccttagtgtgtaatcgtcggcccgagccccgccacagagggcttcgcggatacatgggcttaccagcgatctcgtcacgattggttagtactggtgcttacttggggaactcatttgtagatgtctttcacccacgcgtctttcaattcacgatgaggtccacggacgtgacaatcacgaccgatcggctcaatctagagctctgccctgacgcggacagctcattctggtcggaatacgtttccatccgcgccgacacgtcctggcaacagcaggtgtggcacggctcatatccgccggaggatgcacaagaagcacataagaagaactcttgccttgttgaaaaacgcggttatggcatatgggcaatttccaagcgtcgcaacgggctcactcgtcatgaatttggcagcgcggatgggacaattgaatgggttggctggattggctaccgtaacctagatgactcgacgccgcagtcatcaacctggcctccctcgccgggtactgtggaggtctatgtcggattcggaaaacctcattggggttgtggttatggcacagaggctttgcagggtctagttgatgatgccttcggcaacaatcgtatcgatacaagactgacagcatgcatccttgaggacaacttggcttcgcagaagtgttttcgaactgttgggtttgcgaagacgacggaggatctccgctatgaggatgacggagtgtactgggtattggatagagagagttgggaagaaggaagaaaatagtatgacacctaattgacagatcgagttcttgatgaaatactcaatgctcttttcgtgcttgatagctctctcatgcacagtattagagcatcttgtgcacttctgccgttcctaataagcaattcgaggtctgaagttgtggaagtagaaagagaggaaatgcccgacgtcgcattaaaggattcaag

SEQ ID NO: 33783 - DNA, 1446 bp, Muscodor strobelii
  misc_feature: SGI cDNA ID NO. 571660
  misc_feature: Encodes the peptide sequence at SEQ ID NO 33784
atggcggcggacaaccagtgtgctggagatgctgaggaccagaaggtggatatcgccgctagcgaagacgccgatggcccaatcacagctgcagagagagccttacgctggaagcaagacctgcgcatcgtaccgctttgtgctggcatctacttcctctgctacctcgatcgctcaaacatcggaaacgccaaagtcctaaatgcagcaacgaaaaatgatcttctcaccgagaccaacacgagcaatgaccagtatctcattgcgctcttcgtctttcttgtcgcatacggtatcttcgaagctccttcgaacattctcttgaaaaagcttcgaccctcacgttggattgcttttctcatgttctcgtggggtgtccttaccattggcttaggaggcgtccagagctacgcatctctaactgttgtgcgattcttgctgggcacctttgaggctggcttgtttcctggccttgtctattaccttacattctggtacaaaaccgaagagcgtagcattcgagtcgcattcatcttagcatccgctacgcttgcgggcgcatttggtggagccatcgcatacggcatcggtcatatcaatcaagcggctggtctgtcagcctggcgatggcttttcataatcgagggcatcccgtccgcaatttcggctttcgctgtctggtttttcctccctgactatcccgaagatgcgaaatggttgacaatccaggagcgcgaccttgctatccatcgcctgcgccttgaaggatccaagggtcaccataaatcaatgagctgggaggacgccaaaggtactctgactgattggcgcctctggggacactatatcatctactttggcatctctaccccattcagctctctgtcgttgttcaccccatccattacggcgggcttggggtattcgggcctaagagccaatttgttcaccgtcccgccttacgccgttgcatatgtggtttctattctaggcgcgtggtcggcggatcacttcaacgcccgcggtcttcactcagccgggcttgccttcattggcgcgatcgggtttcttttgtccgctgtgttacctcctgatgcatatgcatcacgctacggtggacttatcattgcagcttctggagcatttgcttgtatcccgccattattgggctggttgtcgtctaatatcttcagcactgcttcgattggattcgctcttgcactcaacattgggttattcggcgctccaggccagatcgtcggtgtattcatttacaaggcggatgaggagaagagaggctatccgacaggtcattggacaaatgcggcactattgttccttgtcgctgtcggagcgataatgctcaggttttactacggttggaaaaacaagaagcttttgcgtgagcgactcgagggtcaggaagtcagactttttaaatactga

SEQ ID NO: 33784 - protein, 481 aa, Muscodor strobelii
  misc_feature: SGI Peptide ID NO. 571660
  misc_feature (47)..(422): Pfam Id: PF07690 Pfam Desc: Major Facilitator Superfamily
  misc_feature (4)..(480): NCBI GI: 145606468 Blast Desc: MGG_02315 [Magnaporthe grisea 70-15] gi|145014114|gb|EDJ98755.1| MGG_02315 [Magnaporthe grisea 70-15]
  misc_feature (32)..(465): NCBI GI: 119486919 Blast Desc: MFS transporter, [Neosartorya fischeri NRRL 181] gi|119410536|gb|EAW20482.1| MFS transporter, [Neosartorya fischeri NRRL 181]
  misc_feature (30)..(480): NCBI GI: 85091586 Blast Desc: NCU09027 [Neurospora crassa OR74A] gi|28920368|gb|EAA29738.1| NCU09027 [Neurospora crassa OR74A]
  misc_feature (13)..(465): NCBI GI: 255936103 Blast Desc: Pc13g06440 [Penicillium chrysogenum Wisconsin 54-1255] gi|211583698|emb|CAP91713.1| Pc13g06440 [Penicillium chrysogenum Wisconsin 54-1255]
  misc_feature (32)..(464): NCBI GI: 145248698 Blast Desc: An14g00590 [Aspergillus niger] gi|134081356|emb|CAK41858.1| protein product [Aspergillus niger]
  misc_feature (2)..(465): NCBI GI: 121714367 Blast Desc: MFS transporter, [Aspergillus clavatus NRRL 1] gi|119402948|gb|EAW13368.1| MFS transporter, [Aspergillus clavatus NRRL 1]
  misc_feature (22)..(469): NCBI GI: 212526026 Blast Desc: MFS transporter, [Penicillium marneffei ATCC 18224] gi|210072568|gb|EEA26655.1| MFS transporter, [Penicillium marneffei ATCC 18224]
  misc_feature (12)..(468): NCBI GI: 189210253 Blast Desc: MFS transporter [Pyrenophora tritici-repentis Pt-1C-BFP] gi|187977551|gb|EDU44177.1| MFS transporter [Pyrenophora tritici-repentis Pt-1C-BFP]
  misc_feature (21)..(475): NCBI GI: 70982163 Blast Desc: MFS transporter [Aspergillus fumigatus Af293] gi|66844233|gb|EAL84572.1| MFS transporter, [Aspergillus fumigatus Af293] gi|159122155|gb|EDP47277.1| MFS transporter,
  misc_feature (22)..(469): NCBI GI: 169784734 Blast Desc: [Aspergillus oryzae RIB40] gi|83775575|dbj|BAE65695.1| protein product [Aspergillus oryzae]
MAADNQCAGDAEDQKVDIAASEDADGPITAAERALRWKQDLRIVPLCAGIYFLCYLDRSNIGNAKVLNAATKNDLLTETNTSNDQYLIALFVFLVAYGIFEAPSNILLKKLRPSRWIAFLMFSWGVLTIGLGGVQSYASLTVVRFLLGTFEAGLFPGLVYYLTFWYKTEERSIRVAFILASATLAGAFGGAIAYGIGHINQAAGLSAWRWLFIIEGIPSAISAFAVWFFLPDYPEDAKWLTIQERDLAIHRLRLEGSKGHHKSMSWEDAKGTLTDWRLWGHYIIYFGISTPFSSLSLFTPSITAGLGYSGLRANLFTVPPYAVAYVVSILGAWSADHFNARGLHSAGLAFIGAIGFLLSAVLPPDAYASRYGGLIIAASGAFACIPPLLGWLSSNIFSTASIGFALALNIGLFGAPGQIVGVFIYKADEEKRGYPTGHWTNAALLFLVAVGAIMLRFYYGWKNKKLLRERLEGQEVRLFKY

SEQ ID NO: 33785 - DNA, 2111 bp, Muscodor strobelii
  misc_feature: SGI EST ID NO. CUFF.79844.0
  misc_feature: Variant of the nucleotide sequence at SEQ ID NO 33783
taggcatgggtctgtccgtatgaacaaggatactattcctacagcttctaacgtggcctagcgcctgtaaaccggtgctaaactcgctaagaataccgatactcgtgccggggtccgtgctgggtgccccaatgccaaccactaagaaacgtctaaactgacaaaaacagtcaaaacattatcaatgagtggatcaagagagcttcgatcgcatacctggagggatcactcccccgccttcggactttcgtaggagaggcggacgagggatagctttgtcgataagttcagggaccagacgtgtcttgaccgcaattcgcgttatcgatctttcctctgtcctgtttgcgaacaatcttgagtgaggagcacgttttgcgctcagtctgtagcttgcccttttcgcacttcaactcgatgcttgcatgtgtattggttccattgtgagcatagtcgttgaggcaggacataatggcggcggacaaccagtgtgctggagatgctgaggaccagaaggtggatatcgccgctagcgaagacgccgatggcccaatcacagctgcagagagagccttacgctggaagcaagacctgcgcatcgtaccgctttgtgctggcatctacttcctctgctacctcgatcgctcaaacatcggaaacgccaaagtcctaaatgcagcaacgaaaaatgatcttctcaccgagaccaacacgagcaatgaccagtatctcattgcgctcttcgtctttcttgtcgcatacggtatcttcgaagctccttcgaacattctcttgaaaaagcttcgaccctcacgttggattgcttttctcatgttctcgtggggtgtccttaccattggcttaggaggcgtccagagctacgcatctctaactgttgtgcgattcttgctgggcacctttgaggctggcttgtttcctggccttgtctattaccttacattctggtacaaaaccgaagagcgtagcattcgagtcgcattcatcttagcatccgctacgcttgcgggcgcatttggtggagccatcgcatacggcatcggtcatatcaatcaagcggctggtctgtcagcctggcgatggcttttcataatcgagggcatcccgtccgcaatttcggctttcgctgtctggtttttcctccctgactatcccgaagatgcgaaatggttgacaatccaggagcgcgaccttgctatccatcgcctgcgccttgaaggatccaagggtcaccataaatcaatgagctgggaggacgccaaaggtactctgactgattggcgcctctggggacactatatcatctactttggcatctctaccccattcagctctctgtcgttgttcaccccatccattacggcgggcttggggtattcgggcctaagagccaatttgttcaccgtcccgccttacgccgttgcatatgtggtttctattctaggcgcgtggtcggcggatcacttcaacgcccgcggtcttcactcagccgggcttgccttcattggcgcgatcgggtttcttttgtccgctgtgttacctcctgatgcatatgcatcacgctacggtggacttatcattgcagcttctggagcatttgcttgtatcccgccattattgggctggttgtcgtctaatatcttcagcactgcttcgattggattcgctcttgcactcaacattgggttattcggcgctccaggccagatcgtcggtgtattcatttacaaggcggatgaggagaagagaggctatccgacaggtcattggacaaatgcggcactattgttccttgtcgctgtcggagcgataatgctcaggttttactacggttggaaaaacaagaagcttttgcgtgagcgactcgagggtcaggaagtcagactttttaaatactgatctcgctataagaaggatcgcgaggcatagactttgttccaagctcgacgaggatcattctaagacgaacgcatgggatagtcattcagcgtgttatcaataagtagagtcgtatcgttgagctcgcgctcatctagaaagcacgtagttttcatcttcgcatcttcgtcgcccactcacatttacgctctcaa

SEQ ID NO: 33786 - DNA, 1524 bp, Muscodor strobelii
  misc_feature: SGI cDNA ID NO. 571661
  misc_feature: Reduced expression when VOC is produced
  misc_feature: Encodes the peptide sequence at SEQ ID NO 33787
atggtgacttcagatcgtgtatcgcagggcgagatcgcgctggacgccatcgatcctgttgcagtttcaacagcagacgataacataccttcgtcaagtcgcgacgtgaagcaaagcgacccatttttaattgccttcaacgagccttacgatgcagacaaccccaaggactggcccaacaaacgaaagtgggctgtcactgatgtgctctctgccacgggtttcaatcgcatcctcgtctcgaccattatgccaccggctctgtctactatcgctagagaactgcacatgacttcaacagaatccgcactatctctttctatctatcttcttgcaacagctttcggccccttatttatcgggccgttgtctgaaatatacggaaggaaagcaatcttgcacggttctaatatctggtttctcatctggaacatcgcttgtggctttgcgaatacgaaggaattgttgatcggtgcacgtttcctagcggggtttggcgcaagtgccatttattctcttgggggaggcgttcttggagatatctggcgccctgaggaacgcggacgctctctcggatggtacctccttatcccccttcttggcgccgctgtcggtcctatcatcggtggattcatcgccgcatatagtacttggcgatggatgttctggtcgacgtctatcttccagggtctaatgattgccgtttctttcgatgtgttccatgagacgtatggaccagttgttctgaagaagcgggccgcccgactacgcaaggagaccggaaatgacgcttattatacagagcatgagcgaaagacaaaggatgactcgctattcaaagtcattgcgcgttctgtgtccaggccattccgcctcttggctttccaccctcttgttcagatcattgctgtgatatcggcatttgattacggtatcctttacattgtgttgtccagctttgcaacattgtggactgaccaataccacgaacctcttcagctcagcggtcttcattatatcgcatgcgctctgggcgagatcgccggatctcaagtcggaagtaggctaatggatatcttgtatcggcgaatgaagtcacgtaacaaagacggcgagcatattcctgaatatcggatgcctttatcagtacctggagctcttattggccccatcggactcttcatatacggttggacagcccagtaccaagttcattggattgccgtagacattggaatttttgtctgcatgttcggatatcagattgtgggcattcccctatcagcgtataatatcgacgcctatcctgagcataccgcaagcgtccttgcggcaacccagtttcttcggagtcttactgctttccttttccccctcttcacaccgagtctttacagcacgttaggatacggttggggcaacagtacgatagcatttgtcagttttgctctcatattaccagcgccagctataatttggttcttcggtgaaaggctgcgtaagagagcaggttcgacattttga

SEQ ID NO: 33787 - protein, 507 aa, Muscodor strobelii
  misc_feature: SGI Peptide ID NO. 571661
  misc_feature (69)..(458): Pfam Id: PF07690 Pfam Desc: Major Facilitator Superfamily
  misc_feature (66)..(503): Pfam Id: PF00083 Pfam Desc: Sugar (and other) transporter
  misc_feature (96)..(237): Pfam Id: PF00083 Pfam Desc: Sugar (and other) transporter
  misc_feature (15)..(506): NCBI GI: 169625425 Blast Desc: SNOG_15984 [Phaeosphaeria nodorum SN15] gi|111055443|gb|EAT76563.1| SNOG_15984 [Phaeosphaeria nodorum SN15]
  misc_feature (23)..(507): NCBI GI: 256723209 Blast Desc: NECHADRAFT_86456 [Nectria haematococca mpVI 77-13-4]
  misc_feature (11)..(507): NCBI GI: 46116004 Blast Desc: FG03844.1 [Gibberella zeae PH-1]
  misc_feature (17)..(507): NCBI GI: 225558082 Blast Desc: caffeine resistance protein [Ajellomyces capsulatus G186AR]
  misc_feature (30)..(507): NCBI GI: 242816268 Blast Desc: efflux pump antibiotic resistance protein, [Talaromyces stipitatus ATCC 10500] gi|218715079|gb|EED14502.1| efflux pump antibiotic resistance protein, [Talaromyces ATCC
  misc_feature (18)..(507): NCBI GI: 154314648 Blast Desc: BC1G_04033 [Botryotinia fuckeliana B05.10] gi|150848655|gb|EDN23848.1| BC1G_04033 [Botryotinia fuckeliana B05.10]
  misc_feature (22)..(507): NCBI GI: 169766980 Blast Desc: [Aspergillus oryzae RIB40] gi|83765816|dbj|BAE55959.1| protein product [Aspergillus oryzae]
  misc_feature (83)..(507): NCBI GI: 238483787 Blast Desc: efflux pump antibiotic resistance protein, [Aspergillus flavus NRRL3357] gi|220701182|gb|EED57520.1| efflux pump antibiotic resistance protein, [Aspergillus flavus NRRL3357]
  misc_feature (40)..(507): NCBI GI: 238845075 Blast Desc: polyamine transporter 2 [Microsporum canis CBS 113480]
  misc_feature (31)..(503): NCBI GI: 119467378 Blast Desc: MFS multidrug transporter, [Neosartorya fischeri NRRL 181] gi|119405647|gb|EAW15598.1| MFS multidrug transporter, [Neosartorya fischeri NRRL 181]
  misc_feature: Useful for introducing or modulating the production of volatile compounds
MVTSDRVSQGEIALDAIDPVAVSTADDNIPSSSRDVKQSDPFLIAFNEPYDADNPKDWPNKRKWAVTDVLSATGFNRILVSTIMPPALSTIARELHMTSTESALSLSIYLLATAFGPLFIGPLSEIYGRKAILHGSNIWFLIWNIACGFANTKELLIGARFLAGFGASAIYSLGGGVLGDIWRPEERGRSLGWYLLIPLLGAAVGPIIGGFIAAYSTWRWMFWSTSIFQGLMIAVSFDVFHETYGPVVLKKRAARLRKETGNDAYYTEHERKTKDDSLFKVIARSVSRPFRLLAFHPLVQIIAVISAFDYGILYIVLSSFATLWTDQYHEPLQLSGLHYIACALGEIAGSQVGSRLMDILYRRMKSRNKDGEHIPEYRMPLSVPGALIGPIGLFIYGWTAQYQVHWIAVDIGIFVCMFGYQIVGIPLSAYNIDAYPEHTASVLAATQFLRSLTAFLFPLFTPSLYSTLGYGWGNSTIAFVSFALILPAPAIIWFFGERLRKRAGSTF

SEQ ID NO: 33788 - DNA, 2851 bp, Muscodor strobelii
  misc_feature: SGI EST ID NO. CUFF.79831.0
  misc_feature: Variant of the nucleotide sequence at SEQ ID NO 33786
tgctcatcatacaaagcgagttcagagcaagacgtcaccaggtggtccgtactcagtatcctttcggcgccgatggcgtccgaccgaagcggccgactgcctgaccacctcttgtatataagacctctccgggtcgtccataatatttcatcctccattatcactcaatacttccgctccaatcaatcttagcttcacattcagaatggtgacttcagatcgtgtatcgcagggcgagatcgcgctggacgccatcgatcctgttgcagtttcaacagcagacgataacataccttcgtcaagtcgcgacgtgaagcaaagcgacccatttttaattgccttcaacgagccttacgatgcagacaaccccaaggactggcccaacaaacgaaagtgggctgtcactgatgtgctctctgccacgggtttcaatcgcatcctcgtctcgaccattatgccaccggctctgtctactatcgctagagaactgcacatgacttcaacagaatccgcactatctctttctatctatcttcttgcaacagctttcggccccttatttatcgggccgttgtctgaaatatacggaaggaaagcaatcttgcacggttctaatatctggtttctcatctggaacatcgcttgtggctttgcgaatacgaaggaattgttgatcggtgcacgtttcctagcggggtttggcgcaagtgccatttattctcttgggggaggcgttcttggagatatctggcgccctgaggaacgcggacgctctctcggatggtacctccttatcccccttcttggcgccgctgtcggtcctatcatcggtggattcatcgccgcatatagtacttggcgatggatgttctggtcgacgtctatcttccagggtctaatgattgccgtttctttcgatgtgttccatgagacgtatggaccagttgttctgaagaagcgggccgcccgactacgcaaggagaccggaaatgacgcttattatacagagcatgagcgaaagacaaaggatgactcgctattcaaagtcattgcgcgttctgtgtccaggccattccgcctcttggctttccaccctcttgttcagatcattgctgtgatatcggcatttgattacggtatcctttacattgtgttgtccagctttgcaacattgtggactgaccaataccacgaacctcttcagctcagcggtcttcattatatcgcatgcgctctgggcgagatcgccggatctcaagtcggaagtaggctaatggatatcttgtatcggcgaatgaagtcacgtaacaaagacggcgagcatattcctgaatatcggatgcctttatcagtacctggagctcttattggccccatcggactcttcatatacggttggacagcccagtaccaagttcattggattgccgtagacattggaatttttgtctgcatgttcggatatcagattgtgggcattcccctatcagcgtataatatcgacgcctatcctgagcataccgcaagcgtccttgcggcaacccagtttcttcggagtcttactgctttccttttccccctcttcacaccgagtctttacagcacgttaggatacggttggggcaacagtacgatagcatttgtcagttttgctctcatattaccagcgccagctataatttggttcttcggtgaaaggctgcgtaagagagcaggttcgacattttgatgtactgttgcacttacttggcgctagtttattacccgtcaatggatccaatgtatgttttgtggaactctcttgtgcgtttgtcttccataagagactatggccgcagcagacgttttagagtttgcgcaggttattgtttagctcatgaccgttgtattactaaggcgaaaactagtccaccttcttgccagtcaggcatcgtttttcgccatgtgtatccattaaaaccttctcatcaaaatataagcttaataaaaacttggacgtataacaagcaggatgcgcagcatgaaaatcaacagtcctctaccttggaagactcgccactgagtttacaatacctgacagttttactctcctcaatcaagacgttcgactcaaaagaaacaaggaaatctcatacgccgctctgatcaagtagtaaaatacttcatttggcgcacgctacaataatgcatttcaaacttgccaccctactcttctggctggccactggtgccatcggtttcaaagtccctgttaatcaagacgatggtgcctaccttatattatttgacagcaaaaacaacccaatcatcaacatgatatcgctgccggaacctgtcgtcggcattgagacagacgctcgagtcactcctgccgagcgtaaaaaaaacaatcgtggcgttattgagtgtactggacacgagatgcgagaagaccagaattatctggcgaccgttgattccatgaagaactactttgtcaacggaacgacaatttcacacgggaccatcgtgatgatgagatcaggcgacgtatttcttgccatgtgcaattatgggaagacacaaggcttcaaagactttcaaattgacatattcaacaaacagatggatcacaaatgcgacgcgcgtcaatcaggatggagcaggtggtatggggataaggtgttgtatcgggatgtggctggaaacgaaatttgcacagatctcacgccgtggaaatggagggaccacaaggatgataggtaggccatggtatgttgttaatcgagatggaatcttgccatagattaaggtgtgtaatggtgggatagaacgatgctagcagagaggacaccgaaaaatataagcgaca

SEQ ID NO: 33789 - DNA, 561 bp, Muscodor strobelii
  misc_feature: SGI cDNA ID NO. 571662
  misc_feature: Reduced expression when VOC is produced
  misc_feature: Encodes the peptide sequence at SEQ ID NO 33790
atgcatttcaaacttgccaccctactcttctggctggccactggtgccatcggtttcaaagtccctgttaatcaagacgatggtgcctaccttatattatttgacagcaaaaacaacccaatcatcaacatgatatcgctgccggaacctgtcgtcggcattgagacagacgctcgagtcactcctgccgagcgtaaaaaaaacaatcgtggcgttattgagtgtactggacacgagatgcgagaagaccagaattatctggcgaccgttgattccatgaagaactactttgtcaacggaacgacaatttcacacgggaccatcgtgatgatgagatcaggcgacgtatttcttgccatgtgcaattatgggaagacacaaggcttcaaagactttcaaattgacatattcaacaaacagatggatcacaaatgcgacgcgcgtcaatcaggatggagcaggtggtatggggataaggtgttgtatcgggatgtggctggaaacgaaatttgcacagatctcacgccgtggaaatggagggaccacaaggatgataggtag

SEQ ID NO: 33790 - protein, 186 aa, Muscodor strobelii
  misc_feature: SGI Peptide ID NO. 571662
  misc_feature (14)..(175): NCBI GI: 171690688 Blast Desc: protein product [Podospora anserina] gi|170945292|emb|CAP71404.1| protein product [Podospora anserina]
  misc_feature: Useful for introducing or modulating the production of volatile compounds
MHFKLATLLFWLATGAIGFKVPVNQDDGAYLILFDSKNNPIINMISLPEPVVGIETDARVTPAERKKNNRGVIECTGHEMREDQNYLATVDSMKNYFVNGTTISHGTIVMMRSGDVFLAMCNYGKTQGFKDFQIDIFNKQMDHKCDARQSGWSRWYGDKVLYRDVAGNEICTDLTPWKWRDHKDDR

SEQ ID NO: 33791 - DNA, 2851 bp, Muscodor strobelii; identical to SEQ ID NO: 33788
  misc_feature: SGI EST ID NO. CUFF.79831.0
  misc_feature: Variant of the nucleotide sequence at SEQ ID NO 33789

SEQ ID NO: 33792 - DNA, 1467 bp, Muscodor strobelii
  misc_feature: SGI cDNA ID NO. 571663
  misc_feature: Reduced expression when VOC is produced
  misc_feature: Encodes the peptide sequence at SEQ ID NO 33793
atgatgaatatgaacggccacaaactttgccttatgctatgggcaattgtgtcaacacaaatggtcattgcagtgagcgttgattgggctgcaatcacgaatgatcgcggcgatcatcttcctgatttcagtttttgtggctattatgcttctgacaagtcgctcccatccatatcgagctcccctttcatcactctcacaccttcagatggtgaccagactcggcagatacaagcagccctggacaagaccgccgcgaatggtggaggcgtcgtagaattgggaccagggacatttaaaatatcctctggactagttcttccaggcaggacgacgctcaggggctctggaagtgcgacacatctatcggtcactaagttggctactgatatcccccttattgccttggggaatggtacgagctcaagggtgaaacctactactactaaatacattacggacgattatgtgggaatcggagccgatacagtgactgtgcaagacgcagtcgggctgcgtgccgggcagcatgttttcgtctcaagagctgccacggcagattggatccgatacaatggaatggcggatcttatccgcgatgggacgcatcagacttggataggtgtcgggacattgatacaacagccacggatcattaaagcaatcaacggtaacaaagtgacgctggatgtccctctgacggatgcgctgaacaagaaatacatgagaccttatctcgccatcttctcaccccctgctacatcgcaagagacaggcctcgaaaacctctctatctctctcaggccaacctgctcgggcgtcgcccttaacagcaacgctgcctgcaacaacccagcgatctccgtcgcgccctggactgtcgacagcttcattcgacaagtcaacataaccggtttcaacaacttcatcacggtgcagtacaatgccagccgcatcacaatgcaagacgttcgactgttccgcgacgcagatacagacaactcagccggttacccggccgatattactctgtacgggtcacaggtgttgatccaagacagcgggcagtacggcctccctacagctaaggccttcgccgtggtgacgcagggcggcacgcccggacccaacgccgccctccgccacgtctcgcaggcggcagcacagcagatgtatccccatcaaaggtgggcgcatggcttgcttgttgaggatacggattcggtggtgacttacatcaatcgaggaacggccgggtcgggccacgggtgggcgatcaacgctggggtggcgtggaatgtcaggggagcagtacagattcagagcccaccgttgggagtaaactgggggattggctgtacgggaggtgtaaaggcgcctacgaatgggacgatgatagagaatgatgcgaccgtgacaccgaggagtctctttgccgcacaacttgctgcgagaaaagctacgtga

SEQ ID NO: 33793 - protein, 488 aa, Muscodor strobelii
  misc_feature: SGI Peptide ID NO. 571663
  misc_feature (27)..(485): NCBI GI: 256726463 Blast Desc: NECHADRAFT_39453 [Nectria haematococca mpVI 77-13-4]
  misc_feature (27)..(485): NCBI GI: 256728378 Blast Desc: NECHADRAFT_87753 [Nectria haematococca mpVI 77-13-4]
  misc_feature (26)..(485): NCBI GI: 46114654 Blast Desc: FG03169.1 [Gibberella zeae PH-1]
  misc_feature (34)..(486): NCBI GI: 207722402 Blast Desc: hemagglutinin-related protein [Ralstonia solanacearum MolK2] gi|206587581|emb|CAQ18163.1| hemagglutinin-related protein [Ralstonia solanacearum]
  misc_feature (34)..(486): NCBI GI: 207738934 Blast Desc: hemagglutinin-related protein [Ralstonia solanacearum IPO1609] gi|206592305|emb|CAQ59211.1| hemagglutinin-related protein [Ralstonia solanacearum IPO1609]
  misc_feature (34)..(486): NCBI GI: 83745534 Blast Desc: RRSL_04593 [Ralstonia solanacearum UW551] gi|83727611|gb|EAP74731.1| RRSL_04593 [Ralstonia solanacearum UW551]
  misc_feature (34)..(485): NCBI GI: 34496162 Blast Desc: CV_0707 [Chromobacterium violaceum ATCC 12472] gi|34102016|gb|AAQ58383.1| CV_0707 [Chromobacterium violaceum ATCC 12472]
  misc_feature (8)..(485): NCBI GI: 255531738 Blast Desc: Phep_1840 [Pedobacter heparinus DSM 2366] gi|255344722|gb|ACU04048.1| conserved [Pedobacter heparinus DSM 2366]
  misc_feature (33)..(486): NCBI GI: 256672085 Blast Desc: StAA4_33268 [Streptomyces sp. AA4]
  misc_feature (36)..(485): NCBI GI: 189466625 Blast Desc: BACINT_03000 [Bacteroides intestinalis DSM 17393] gi|189434889|gb|EDV03874.1| BACINT_03000 [Bacteroides intestinalis DSM 17393]
  misc_feature: Useful for introducing or modulating the production of volatile compounds
MMNMNGHKLCLMLWAIVSTQMVIAVSVDWAAITNDRGDHLPDFSFCGYYASDKSLPSISSSPFITLTPSDGDQTRQIQAALDKTAANGGGVVELGPGTFKISSGLVLPGRTTLRGSGSATHLSVTKLATDIPLIALGNGTSSRVKPTTTKYITDDYVGIGADTVTVQDAVGLRAGQHVFVSRAATADWIRYNGMADLIRDGTHQTWIGVGTLIQQPRIIKAINGNKVTLDVPLTDALNKKYMRPYLAIFSPPATSQETGLENLSISLRPTCSGVALNSNAACNNPAISVAPWTVDSFIRQVNITGFNNFITVQYNASRITMQDVRLFRDADTDNSAGYPADITLYGSQVLIQDSGQYGLPTAKAFAVVTQGGTPGPNAALRHVSQAAAQQMYPHQRWAHGLLVEDTDSVVTYINRGTAGSGHGWAINAGVAWNVRGAVQIQSPPLGVNWGIGCTGGVKAPTNGTMIENDATVTPRSLFAAQLAARKAT

SEQ ID NO: 33794 - DNA, 2131 bp, Muscodor strobelii
  misc_feature: SGI EST ID NO. CUFF.80350.2
  misc_feature: Variant of the nucleotide sequence at SEQ ID NO 33792
atgagcctctacagcactccctagcgaagcgacttctaacctttatcatgatgaatatgaacggccacaaactttgccttatgctatgggcaattgtgtcaacacaaatggtcattgcagtgagcgttgattgggctgcaatcacgaatgatcgcggcgatcatcttcctgatttcagtttttgtggctattatgcttctgacaagtcgctcccatccatatcgagctcccctttcatcactctcacaccttcagatggtgaccagactcggcagatacaagcagccctggacaagaccgccgcgaatggtggaggcgtcgtagaattgggaccagggacatttaaaatatcctctggactagttcttccaggcaggacgacgctcaggggctctggaagtgcgacacatctatcggtcactaagttggctactgatatcccccttattgccttggggaatggtacgagctcaagggtgaaacctactactactaaatacattacggacgattatgtgggaatcggagccgatacagtgactgtgcaagacgcagtcgggctgcgtgccgggcagcatgttttcgtctcaagagctgccacggcagattggatccgatacaatggaatggcggatcttatccgcgatgggacgcatcagacttggataggtgtcgggacattgatacaacagccacggatcattaaagcaatcaacggtaacaaagtgacgctggatgtccctctgacggatgcgctgaacaagaaatacatgagaccttatctcgccatcttctcaccccctgctacatcgcaagagacaggcctcgaaaacctctctatctctctcaggccaacctgctcgggcgtcgcccttaacagcaacgctgcctgcaacaacccagcgatctccgtcgcgccctggactgtcgacagcttcattcgacaagtcaacataaccggtttcaacaacttcatcacggtgcagtacaatgccagccgcatcacaatgcaagacgttcgactgttccgcgacgcagatacagacaactcagccggttacccggccgatattactctgtacgggtcacaggtgttgatccaagacagcgggcagtacggcctccctacagctaaggccttcgccgtggtgacgcagggcggcacgcccggacccaacgccgccctccgccacgtctcgcaggcggcagcacagcagatgtatccccatcaaaggtgggcgcatggcttgcttgttgaggatacggattcggtggtgacttacatcaatcgaggaacggccgggtcgggccacgggtgggcgatcaacgctggggtggcgtggaatgtcaggggagcagtacagattcagagcccaccgttgggagtaaactgggggattggctgtacgggaggtgtaaaggcgcctacgaatgggacgatgatagagaatgatgcgaccgtgacaccgaggagtctctttgccgcacaacttgctgcgagaaaagctacgtgatgcggggtgtttaggaaaatccaacacaaaggagcgctatgttagagactttggtcacggttagcttgagcacaaatagtacggcaaaaaatggtggttgtatagttgatgtatcctggtcgcctcccggacggtaccccgtagtgctgacccccaaacccccaaacccccaaccaactttgaagttatgaattcctatccattagctgtcaagttgctcaatatagtatctattaatagtaatgggtttgaaagttgtctgcaggtaggtgtgcgtcgcattatcgtccatgggttggtactatgtagcaggcgggcgcgatcttgcccctagaagtgcggggattgtgccaaaataggtgtcgctacggtatcagcaggtgcaggcaaattagatctagcatttgatattgtgtaggtgagtataatcatcttcaaatgatatctgctgatacggttatatatgtatagatagatgcaataagaactcgaagacgtcaatgacgttacaaatccgaagcaaagtggcattacaattttaagtatactcgcgtgatctcggagtcggacacaccacggcagatccacgtatcccctgtcctaagcccccaagtttc

SEQ ID NO: 33795 - DNA, 3798 bp, Muscodor strobelii
  misc_feature: SGI cDNA ID NO. 571664
  misc_feature: Encodes the peptide sequence at SEQ ID NO 33796
atggcaggcgaaccgtttccgccgtcgcaaataccttgtcagacatgtgcgactgtcaccgaaagcacgttcacctgcatccaatgcaacaacctcgccttctgcgatagctgctggtccaaatggatattgcataccgcaggagccgtaggatggaatggcaagccgcatgagaaagccgatcctctagttgtgcatcgacttcgccagattttggagccaacccgctcagaagaggaacacgaagcggaacttcttgaagatcaagacacaacatggtttggattcggtcgcgatggatcgggacacccccaattgtgcgattatggaagatttgctgctatcatgaatgagacgcagactgatgagattggcgaacggtatccgcagctcacgtctttcatcggcgaaacaggcgctggaaagagtactctgatcaagctgcttattgaccgtcaagacctatcttcaccacacggcgggaagtattactccccagttacctcctcgaatcaagatcgcatatcgacgacgggtgatgtgcacctctacgcagatccgtctacgttatatgccgctagtccactgctctacgttgactgtgaaggactcagtggtggcgaggctgcaccgaaacagcttagacagaatgaagagacccaacgatcgagcactgggcatgcaagacgatactcagcaccacggagaattgagtgggccgaatcaccgcaaacacaaaagcgagagttcgctgtcggccaattgtatccgcgcattctctacacatttagcgacgtagttgtcttcgtattgcgcaatcctcgatcctttgagtccacggtgctacacaaattgatcaaatggggcgctgcatcaattgataaatcgatcaatcagccagtcctcccgcacgcaatcattgttctcaatgcgaccgacacaaacgtcgacgagagagagtgggatgtcgccaaagcgactcagatgctcatgtccgatatcagcgatgcaattcgacgtgaacctgttctgcaacaatatgcgcaaatttggcgtcagaggggcaggcgtcttaatagcacgaaagatctactggaatgctactatgcctcgattagcgtggtacgaattccttacaaaggttcctatatgttgatggacgaacaggctgggaagctttctgacctcatcaaagaccgttctgcggcatcgcatgccaagaaaagacagatgcggatgctagccaatacagaaaaactccagttctatctgcaagcggcatatgaccatttcacgcgagatcttaatacgccgtttgacttcgtcaaagaaatgctcaggcacagccctatatctcgcaattttgagggcaacattctgaatcttgcactcctgataaagaatagctccgcttatccagctttgtatcaagatgcggaacaaatttttcgagcgattggcccgatggtggcatcgtgtattatgcttgacgctgtacgacagaaactgccgggcactatcagtcgcttacttgatgatcgatatgccaagtcttgtataggggcgatgcaaacgttcgcagaaatatattggccctgtagtttcagaagcggtacaaatggagaactgggccaatgctgcaatgtcaaatccggtcacaatcccaaagggcatcaaaataaacaaggcaagatcattggcaatggcgattatgaatccaatttccgtgctttggtctttcaacccgtttgggaacacctcatccgagccagtcttgtacaagtccagtcagccagtttccggcttgcgcatgaatttccagatcgctcggaacttcaggttgctgctcttctgcatcaagaacgcctaaatgagctctacgcgaacaatttggggtcacctatgaacttcatcagctatacctcttgtctttgctgtttgagggaattgcctgaatgcgcgttgccttgtggccacgtgctctgtctaccgtgtgtggagatatacggatatcggacatcaaggaccacgatcgaaatcaatcggtgtccgatgcatgtccgcgacgtaattgcaagtcctccatggatagtcaccacgaagccacgctatgcaggtgcacgaactttatgccttgacggcggtggtgttcgcggcatcatccagctacatgttttaagagaactcgagaagattctcggccctgaattgcccattcagctattctttgatctgatcgtcggaactgacttcggtggcgtcatcgctattgctttaggggtgaagaaatggtccatcagctcaacaatggagaagttcaaagacctctgccatcaagcctacgtcgctcgaggtctatcgaatatcccattttcaggtgccttatcagtcttgtaccaccggagtttgtacaagaaccaaccattcgagggtgcacttcgccgctacttctctgaacagcctttctttggcggcacattacatcggtctttggctacaatttcgaacaaagttgccgtcacggcaactacggctgtaggtcgccaagacgttgtgttcgccaactacaatcgacctgatccccctgagagaaagataccttatcaatttactcggtcagacacgccggccaatgacatgcgtgtctgggaggctgcgcgagcaacatcggcgaccgttcccctattcgcgtcgttcaagaaaggggagacaagtcacgagtacactagtgccagtctacgtggcatgtgtcccatcattgctgcgcatcatgaaacagcctctatctggaaagacatcagcaatacacctccagacttaatgttgtctatcggagccggccgcaacattggagatcttccaaagggggatgtcgttagtactgggtctgtgcgcacgacaacaaatgaaacctcgcagacagcagctgctccaagtgctgtgatcaagcagggccgcggaggatttggcaactataagcgtcagaaccatccagaatcgcctttgaccagcgaatctttgcaaaagaaagctcttagcgggtacatcgtgcgcaatccacaagcaccgatgctcgtttctttcaataacccgatctccggccagacagatcgattgaatgaccagcgtcaatgtgagaaaacatggactcaattcatctcaacgcatgttccacgcaaggactcgattcggcgccgatacagacgcatctgcccagagctatttacaaaattgccgaagtttgatgatgttatgaagatagacgaaattgaaagagaggtacaggacttattgagacagagcgcatctgaactagtggagatcgcacatcggcttgttgcaagctcctttttctttgaaaaggatgttgccagtgtgaaacaaaaggcatcgggctttacctgcactggttctatatactgcagatttcgtcctcactcgccagaggttaaggctcttgcgtggtttctcatctcacttttagaaggcgatttcgagccgtacttccttctggaagaagaagacgagggcagcgctacgtggccggttcatcgcatcagcttaggagagacggtcctccaagatatgcacatgcaaggcaatttcgaaatgggacccatcagagtgaatactacttctgagaatactgaagtcaagctgtctctttgcctgcagactagcccttacccaagcggtgtccatgtattgcccattagcgggtttcctcggcgcttgatgtctgaagacggcactggcgtgcatcaagctgaggccaccaaccgctctaactacgcatag

SEQ ID NO: 33796 - protein, 1265 aa, Muscodor strobelii
  misc_feature: SGI Peptide ID NO. 571664
  misc_feature (710)..(942): Pfam Id: PF01734 Pfam Desc: Patatin-like phospholipase
  misc_feature (710)..(891): Pfam Id: PF01734 Pfam Desc: Patatin-like phospholipase
  misc_feature (31)..(1246): NCBI GI: 46127523 Blast Desc: FG08139.1 [Gibberella zeae PH-1]
  misc_feature (5)..(1251): NCBI GI: 67525721 Blast Desc: AN3318.2 [Aspergillus nidulans FGSC A4] gi|40744106|gb|EAA63286.1| AN3318.2 [Aspergillus nidulans FGSC A4] gi|259485712|tpe|CBF82965.1| TPA: Patatin-like serine FGSC
  misc_feature (13)..(952): NCBI GI: 116198629 Blast Desc: CHGG_07470 [Chaetomium globosum CBS 148.51] gi|88178749|gb|EAQ86217.1| CHGG_07470 [Chaetomium globosum CBS 148.51]
  misc_feature (13)..(1256): NCBI GI: 46114440 Blast Desc: FG03062.1 [Gibberella zeae PH-1]
  misc_feature (148)..(666): NCBI GI: 171688346 Blast Desc: protein product [Podospora anserina] gi|170944135|emb|CAP70245.1| protein product [Podospora anserina]
  misc_feature (752)..(1249): NCBI GI: 256725500 Blast Desc: NECHADRAFT_101154 [Nectria haematococca mpVI 77-13-4]
  misc_feature (34)..(685): NCBI GI: 256728225 Blast Desc: NECHADRAFT_87795 [Nectria haematococca mpVI 77-13-4]
  misc_feature (26)..(948): NCBI GI: 171689740 Blast Desc: protein product [Podospora anserina] gi|170944832|emb|CAP70944.1| protein product [Podospora anserina]
  misc_feature (12)..(161): NCBI GI: 256725500 Blast Desc: NECHADRAFT_101154 [Nectria haematococca mpVI 77-13-4]
  misc_feature (125)..(778): NCBI GI: 281200919 Blast Desc: patatin family protein [Polysphondylium pallidum PN500]
MAGEPFPPSQIPCQTCATVTESTFTCIQCNNLAFCDSCWSKWILHTAGAVGWNGKPHEKADPLVVHRLRQILEPTRSEEEHEAELLEDQDTTWFGFGRDGSGHPQLCDYGRFAAIMNETQTDEIGERYPQLTSFIGETGAGKSTLIKLLIDRQDLSSPHGGKYYSPVTSSNQDRISTTGDVHLYADPSTLYAASPLLYVDCEGLSGGEAAPKQLRQNEETQRSSTGHARRYSAPRRIEWAESPQTQKREFAVGQLYPRILYTFSDVVVFVLRNPRSFESTVLHKLIKWGAASIDKSINQPVLPHAIIVLNATDTNVDEREWDVAKATQMLMSDISDAIRREPVLQQYAQIWRQRGRRLNSTKDLLECYYASISVVRIPYKGSYMLMDEQAGKLSDLIKDRSAASHAKKRQMRMLANTEKLQFYLQAAYDHFTRDLNTPFDFVKEMLRHSPISRNFEGNILNLALLIKNSSAYPALYQDAEQIFRAIGPMVASCIMLDAVRQKLPGTISRLLDDRYAKSCIGAMQTFAEIYWPCSFRSGTNGELGQCCNVKSGHNPKGHQNKQGKIIGNGDYESNFRALVFQPVWEHLIRASLVQVQSASFRLAHEFPDRSELQVAALLHQERLNELYANNLGSPMNFISYTSCLCCLRELPECALPCGHVLCLPCVEIYGYRTSRTTIEINRCPMHVRDVIASPPWIVTTKPRYAGARTLCLDGGGVRGIIQLHVLRELEKILGPELPIQLFFDLIVGTDFGGVIAIALGVKKWSISSTMEKFKDLCHQAYVARGLSNIPFSGALSVLYHRSLYKNQPFEGALRRYFSEQPFFGGTLHRSLATISNKVAVTATTAVGRQDVVFANYNRPDPPERKIPYQFTRSDTPANDMRVWEAARATSATVPLFASFKKGETSHEYTSASLRGMCPIIAAHHETASIWKDISNTPPDLMLSIGAGRNIGDLPKGDVVSTGSVRTTTNETSQTAAAPSAVIKQGRGGFGNYKRQNHPESPLTSESLQKKALSGYIVRNPQAPMLVSFNNPISGQTDRLNDQRQCEKTWTQFISTHVPRKDSIRRRYRRICPELFTKLPKFDDVMKIDEIEREVQDLLRQSASELVEIAHRLVASSFFFEKDVASVKQKASGFTCTGSIYCRFRPHSPEVKALAWFLISLLEGDFEPYFLLEEEDEGSATWPVHRISLGETVLQDMHMQGNFEMGPIRVNTTSENTEVKLSLCLQTSPYPSGVHVLPISGFPRRLMSEDGTGVHQAEATNRSNYA

SEQ ID NO: 33797 - DNA, 4284 bp, Muscodor strobelii
  misc_feature: SGI EST ID NO. CUFF.79852.0
  misc_feature: Variant of the nucleotide sequence at SEQ ID NO 33795
ttctgcgatagctgctggtccaaatggatattgcataccgcaggagccgtaggatggaatggcaagccgcatgagaaagccgatcctctagttgtgcatcgacttcgccagattttggagccaacccgctcagaagaggaacacgaagcggaacttcttgaagatcaagacacaacatggtttggattcggtcgcgatggatcgggacacccccaattgtgcgattatggaagatttgctgctatcatgaatgagacgcagactgatgagattggcgaacggtatccgcagctcacgtctttcatcggcgaaacaggcgctggaaagagtactctgatcaagctgcttattgaccgtcaagacctatcttcaccacacggcgggaagtattactccccagttacctcctcgaatcaagatcgcatatcgacgacgggtgatgtgcacctctacgcagatccgtctacgttatatgccgctagtccactgctctacgttgactgtgaaggactcagtggtggcgaggctgcaccgaaacagcttagacagaatgaagagacccaacgatcgagcactgggcatgcaagacgatactcagcaccacggagaattgagtgggccgaatcaccgcaaacacaaaagcgagagttcgctgtcggccaattgtatccgcgcattctctacacatttagcgacgtagttgtcttcgtattgcgcaatcctcgatcctttgagtccacggtgctacacaaattgatcaaatggggcgctgcatcaattgataaatcgatcaatcagccagtcctcccgcacgcaatcattgttctcaatgcgaccgacacaaacgtcgacgagagagagtgggatgtcgccaaagcgactcagatgctcatgtccgatatcagcgatgcaattcgacgtgaacctgttctgcaacaatatgcgcaaatttggcgtcagaggggcaggcgtcttaatagcacgaaagatctactggaatgctactatgcctcgattagcgtggtacgaattccttacaaaggttcctatatgttgatggacgaacaggctgggaagctttctgacctcatcaaagaccgttctgcggcatcgcatgccaagaaaagacagatgcggatgctagccaatacagaaaaactccagttctatctgcaagcggcatatgaccatttcacgcgagatcttaatacgccgtttgacttcgtcaaagaaatgctcaggcacagccctatatctcgcaattttgagggcaacattctgaatcttgcactcctgataaagaatagctccgcttatccagctttgtatcaagatgcggaacaaatttttcgagcgattggcccgatggtggcatcgtgtattatgcttgacgctgtacgacagaaactgccgggcactatcagtcgcttacttgatgatcgatatgccaagtcttgtataggggcgatgcaaacgttcgcagaaatatattggccctgtagtttcagaagcggtacaaatggagaactgggccaatgctgcaatgtcaaatccggtcacaatcccaaagggcatcaaaataaacaaggcaagatcattggcaatggcgattatgaatccaatttccgtgctttggtctttcaacccgtttgggaacacctcatccgagccagtcttgtacaagtccagtcagccagtttccggcttgcgcatgaatttccagatcgctcggaacttcaggttgctgctcttctgcatcaagaacgcctaaatgagctctacgcgaacaatttggggtcacctatgaacttcatcagctatacctcttgtctttgctgtttgagggaattgcctgaatgcgcgttgccttgtggccacgtgctctgtctaccgtgtgtggagatatacggatatcggacatcaaggaccacgatcgaaatcaatcggtgtccgatgcatgtccgcgacgtaattgcaagtcctccatggatagtcaccacgaagccacgctatgcaggtgcacgaactttatgccttgacggcggtggtgttcgcggcatcatccagctacatgttttaagagaactcgagaagattctcggccctgaattgcccattcagctattctttgatctgatcgtcggaactgacttcggtggcgtcatcgctattgctttaggggtgaagaaatggtccatcagctcaacaatggagaagttcaaagacctctgccatcaagcctacgtcgctcgaggtctatcgaatatcccattttcaggtgccttatcagtcttgtaccaccggagtttgtacaagaaccaaccattcgagggtgcacttcgccgctacttctctgaacagcctttctttggcggcacattacatcggtctttggctacaatttcgaacaaagttgccgtcacggcaactacggctgtaggtcgccaagacgttgtgttcgccaactacaatcgacctgatccccctgagagaaagataccttatcaatttactcggtcagacacgccggccaatgacatgcgtgtctgggaggctgcgcgagcaacatcggcgaccgttcccctattcgcgtcgttcaagaaaggggagacaagtcacgagtacactagtgccagtctacgtggcatgtgtcccatcattgctgcgcatcatgaaacagcctctatctggaaagacatcagcaatacacctccagacttaatgttgtctatcggagccggccgcaacattggagatcttccaaagggggatgtcgttagtactgggtctgtgcgcacgacaacaaatgaaacctcgcagacagcagctgctccaagtgctgtgatcaagcagggccgcggaggatttggcaactataagcgtcagaaccatccagaatcgcctttgaccagcgaatctttgcaaaagaaagctcttagcgggtacatcgtgcgcaatccacaagcaccgatgctcgtttctttcaataacccgatctccggccagacagatcgattgaatgaccagcgtcaatgtgagaaaacatggactcaattcatctcaacgcatgttccacgcaaggactcgattcggcgccgatacagacgcatctgcccagagctatttacaaaattgccgaagtttgatgatgttatgaagatagacgaaattgaaagagaggtacaggacttattgagacagagcgcatctgaactagtggagatcgcacatcggcttgttgcaagctcctttttctttgaaaaggatgttgccagtgtgaaacaaaaggcatcgggctttacctgcactggttctatatactgcagatttcgtcctcactcgccagaggttaaggctcttgcgtggtttctcatctcacttttagaaggcgatttcgagccgtacttccttctggaagaagaagacgagggcagcgctacgtggccggttcatcgcatcagcttaggagagacggtcctccaagatatgcacatgcaaggcaatttcgaaatgggacccatcagagtgaatactacttctgagaatactgaagtcaagctgtctctttgcctgcagactagcccttacccaagcggtgtccatgtattgcccattagcgggtttcctcggcgcttgatgtctgaagacggcactggcgtgcatcaagctgccatttccatcagctcgcgctcctctattcagaggccaccaaccgctctaactacgcatagcagtagcaccgctactagtacaatcccaactagcgcaaccccaacacgagagacgacgataacaatcccgccaagagagtcttccctgaacagaccgagcacttcgatgtcaattacaagttcaacgagaggtgcaccactaagcccaccaatgagtcctgagtcactgtcgaagctgtctattacaaagaaacacgacggattaccggagcttgaaggataattctggaccgtaatgctgctgcagtcgatgcttaccctttgctttatatttctcgaaggcggcgatcttcgatgtttcatgtatcgcttttgaactcgtatgtttggacagtattttgcttgccctatgcaataattggcggatcatttggaccaaaagtctcagtattttgttcgttagtgcagataccatttgcgcagcttcaagaatgcagctctctactatccgcttattctaccgagttcttcccctgctgtctaagcctctgtttcatatactgcgtgacttcacggacatgggaatctgggaccagctgtatgaaatcgccag

SEQ ID NO: 33798 - DNA, 1248 bp, Muscodor strobelii
  misc_feature: SGI cDNA ID NO. 571665
  misc_feature: Encodes the peptide sequence at SEQ ID NO 33799
atgtcgacggaagctattcatcagttcgtgactgaggattggactctattctctattgggttgcttgtcacaatcacaagaacatatgcccgagtacggcaggttggtatcagaggtctgcatggggacgattatctcgtttgggtagcgatggtcttctatgcagctgaagccagtcttgcatattctgtcggcgctgttgcaaaaggacttgccaataacggcataccagacagcgagcgaatgacgttagatcccaattcggaggagcataccctcagagtaattggttcgaaaattcagctcgctggctggacgacatactcatctttgctctggaccctcaaggcatcgttgctgatcttctacctccgacttaccgctggtttacattgcaactttcgctatcgcatatatgctggtttcgctcttttaggagcgagctggactgccgctacattgaccctgttcctaagttgtcggccctttcataaaaactggcagatcaatccaaaccctggaattgcctgtcaacctgcaatttcgacgcgcgttgtctggatctacgcaattatgaacgtagcgacagatgtctatatcatgtcgataccgatccctatgctttggcaaaccactctgaggcccctcaagaaattcgggttgattattttgtttagcagcggcacttttgtgattgttgctgcttttgctcgagctctattcatcatcacggaccctcaaaatggtgcttcgaccgcaggatcctgggctgtccgagaaacatttgttgcagttgtgacgactaatttgccgatgatcttcccatttacctatgcgcttcttgcgccgttcatcagaggcatcgcgcattccatccgaggatccagctacgaaagatcaagtagcgacaagttcagacctcagcacgtgacctttggcggcggacgcagaaacgatgacgagtggcgaggtcgcggccctccaacagcaaatcccatccccgagcttactctaacgggaagccaagagcgcatgctcgaagcaggtgcaataaagatgcaaacactatgttcggagagaagcagtcagagcgaggataggactactaaatgggaccgtttcagtaccggtaattttatacgaaaggatatggaggtcgtcgttcattcagagcctagaggagaagagacgggctacacaaaaagccaaggcagttttgcgacagcatcagggcccgaaggacagtga

SEQ ID NO: 33799 - protein, 415 aa, Muscodor strobelii
  misc_feature: SGI Peptide ID NO. 571665
  misc_feature (9)..(404): NCBI GI: 240277705 Blast Desc: conserved [Ajellomyces capsulatus H143]
  misc_feature (9)..(404): NCBI GI: 154285490 Blast Desc: [Ajellomyces capsulatus NAm1] gi|150407181|gb|EDN02722.1| [Ajellomyces capsulatus NAm1]
  misc_feature (7)..(415): NCBI GI: 226287149 Blast Desc: conserved [Paracoccidioides brasiliensis Pb18]
  misc_feature (7)..(391): NCBI GI: 226277626 Blast Desc: conserved [Paracoccidioides brasiliensis Pb01]
  misc_feature (6)..(342): NCBI GI: 171691508 Blast Desc: protein product [Podospora anserina] gi|170945702|emb|CAP71815.1| protein product [Podospora anserina]
  misc_feature (6)..(356): NCBI GI: 119473677 Blast Desc: NFIA_001660 [Neosartorya fischeri NRRL 181] gi|119406867|gb|EAW16817.1| conserved [Neosartorya fischeri NRRL 181]
  misc_feature (6)..(356): NCBI GI: 159128458 Blast Desc: conserved [Aspergillus fumigatus A1163]
  misc_feature (6)..(356): NCBI GI: 146323135 Blast Desc: AFUA_3G00850 [Aspergillus fumigatus Af293] gi|129556482|gb|EAL86368.2| AFUA_3G00850 [Aspergillus fumigatus Af293]
  misc_feature (8)..(403): NCBI GI: 238842488 Blast Desc: conserved [Microsporum canis CBS 113480]
  misc_feature (4)..(320): NCBI GI: 39975153 Blast Desc: MGG_00277 [Magnaporthe grisea 70-15] gi|145018850|gb|EDK03129.1| MGG_00277 [Magnaporthe grisea 70-15]
MSTEAIHQFVTEDWTLFSIGLLVTITRTYARVRQVGIRGLHGDDYLVWVAMVFYAAEASLAYSVGAVAKGLANNGIPDSERMTLDPNSEEHTLRVIGSKIQLAGWTTYSSLLWTLKASLLIFYLRLTAGLHCNFRYRIYAGFALLGASWTAATLTLFLSCRPFHKNWQINPNPGIACQPAISTRVVWIYAIMNVATDVYIMSIPIPMLWQTTLRPLKKFGLIILFSSGTFVIVAAFARALFIITDPQNGASTAGSWAVRETFVAVVTTNLPMIFPFTYALLAPFIRGIAHSIRGSSYERSSSDKFRPQHVTFGGGRRNDDEWRGRGPPTANPIPELTLTGSQERMLEAGAIKMQTLCSERSSQSEDRTTKWDRFSTGNFIRKDMEVVVHSEPRGEETGYTKSQGSFATASGPEGQ

SEQ ID NO: 33800 - DNA, 1071 bp, Muscodor strobelii
  misc_feature: SGI cDNA ID NO. 571666
  misc_feature: Encodes the peptide sequence at SEQ ID NO 33801
atgccttcatccaaagctctgatcaccgcagctctactgtccgctggttcagttgctgctcaagatgttttcgacactttcactgtaaattgtagaccactcacaatccagcgccgtgatcccatcatctcacctggggcggacggctcagaccatgtccatgctgtcatcggcggtactgcctttgctgcgacggtctcaaataatgatgcagtgaactcgaaggcaacaacatgcgataagattctggatcattcaatttattggtcaccaactctgtatcacatcaccagcgataacaagtacgaacttgttccgtttactggtagtgccgtctactatcagaatcgagcttgcgactatgtggctggtcgcacgcagtgtcctagctataagacatatttctctaaggccccgccgaaggggttgcgtatgctctcgggaaacaaagacctctccacgttcaataagaatgacatcacgcaacgtgcaatcaatcaccactgtctcggtgacgttgatgaagagaccaatagtcttcccgtgagacactgcaatacgatccgaagccaggttaccttcccttcgtgttgggatggcgtgaaccttgactctgctgaccataagagccacatggctttccccgccatcggtgactacaacggtggcgtttgcccgcagtctcaccctgtcgctatcatggagctattttacgagtggaactttgatacgcgacagtacactgaccgcaactttgttttcgcatctggtgataagagcggctatggctttcacggcgacttcatcaacggctggaccgaccaggacaggctctctaacgcccataagacttgcactggtgcgggcggtgttgatgctcctgggtgttctctcaatgttggcaccgacggtagcgcaggccatccatcgactcagccgctccaattcccagcgaactctgaggacattggctcgacaaagcctcttgcccagcttccaaacaacaagcagcctttcggccaaacccctcagccaaagcggaagagccgcgcattcgccgctgaatattaa

SEQ ID NO: 33801 - protein, 356 aa, Muscodor strobelii
  misc_feature: SGI Peptide ID NO. 571666
  misc_feature (40)..(272): Pfam Id: PF09362 Pfam Desc: Domain of function (DUF1996)
  misc_feature (21)..(333): NCBI GI: 145235811 Blast Desc: An03g06790 [Aspergillus niger] gi|134058243|emb|CAK38435.1| protein product [Aspergillus niger]
  misc_feature (27)..(290): NCBI GI: 70985964 Blast Desc: WSC domain protein [Aspergillus fumigatus Af293] gi|66846115|gb|EAL86448.1| WSC domain protein, [Aspergillus fumigatus Af293]
  misc_feature (27)..(290): NCBI GI: 159128380 Blast Desc: WSC domain protein, [Aspergillus fumigatus A1163]
  misc_feature (1)..(285): NCBI GI: 242787893 Blast Desc: WSC domain protein, [Talaromyces stipitatus ATCC 10500] gi|218721256|gb|EED20675.1| WSC domain protein, [Talaromyces stipitatus ATCC 10500]
  misc_feature (1)..(285): NCBI GI: 212543843 Blast Desc: WSC domain protein, [Penicillium marneffei ATCC 18224] gi|210066983|gb|EEA21076.1| WSC domain protein, [Penicillium marneffei ATCC 18224]
  misc_feature (27)..(290): NCBI GI: 67901766 Blast Desc: AN7870.2 [Aspergillus nidulans FGSC A4] gi|40739725|gb|EAA58915.1| AN7870.2 [Aspergillus nidulans FGSC A4] gi|259480615|tpe|CBF73423.1| TPA: WSC domain protein, FGSC
  misc_feature (33)..(291): NCBI GI: 154305550 Blast Desc: BC1G_08544 [Botryotinia fuckeliana B05.10] gi|150853331|gb|EDN28523.1| BC1G_08544 [Botryotinia fuckeliana B05.10]
  misc_feature (33)..(291): NCBI GI: 156065935 Blast Desc: SS1G_00978 [Sclerotinia sclerotiorum 1980] gi|154691837|gb|EDN91575.1| SS1G_00978 [Sclerotinia sclerotiorum 1980]
  misc_feature (5)..(272): NCBI GI: 156062524 Blast Desc: SS1G_01378 [Sclerotinia sclerotiorum 1980] gi|154696714|gb|EDN96452.1| SS1G_01378 [Sclerotinia sclerotiorum 1980]
  misc_feature (4)..(290): NCBI GI: 159124646 Blast Desc: WSC domain protein, [Aspergillus fumigatus A1163]
MPSSKALITAALLSAGSVAAQDVFDTFTVNCRPLTIQRRDPIISPGADGSDHVHAVIGGTAFAATVSNNDAVNSKATTCDKILDHSIYWSPTLYHITSDNKYELVPFTGSAVYYQNRACDYVAGRTQCPSYKTYFSKAPPKGLRMLSGNKDLSTFNKNDITQRAINHHCLGDVDEETNSLPVRHCNTIRSQVTFPSCWDGVNLDSADHKSHMAFPAIGDYNGGVCPQSHPVAIMELFYEWNFDTRQYTDRNFVFASGDKSGYGFHGDFINGWTDQDRLSNAHKTCTGAGGVDAPGCSLNVGTDGSAGHPSTQPLQFPANSEDIGSTKPLAQLPNNKQPFGQTPQPKRKSRAFAAEY

SEQ ID NO: 33802 - DNA, 1246 bp, Muscodor strobelii
  misc_feature: SGI EST ID NO. CUFF.79883.0
  misc_feature: Variant of the nucleotide sequence at SEQ ID NO 33800
caatctcatgcccagcgcctctttcgtgtcacctcctcctttcttctcatatcgatgaacacaagattatcttgaagctccagatactgatttttgttgttgaatcttgctagatgttttcgacactttcactgtaaattgtagaccactcacaatccagcgccgtgatcccatcatctcacctggggcggacggctcagaccatgtccatgctgtcatcggcggtactgcctttgctgcgacggtctcaaataatgatgcagtgaactcgaaggcaacaacatgcgataagattctggatcattcaatttattggtcaccaactctgtatcacatcaccagcgataacaagtacgaacttgttccgtttactggtagtgccgtctactatcagaatcgagcttgcgactatgtggctggtcgcacgcagtgtcctagctataagacatatttctctaaggccccgccgaaggggttgcgtatgctctcgggaaacaaagacctctccacgttcaataagaatgacatcacgcaacgtgcaatcaatcaccactgtctcggtgacgttgatgaagagaccaatagtcttcccgtgagacactgcaatacgatccgaagccaggttaccttcccttcgtgttgggatggcgtgaaccttgactctgctgaccataagagccacatggctttccccgccatcggtgactacaacggtggcgtttgcccgcagtctcaccctgtcgctatcatggagctattttacgagtggaactttgatacgcgacagtacactgaccgcaactttgttttcgcatctggtgataagagcggctatggctttcacggcgacttcatcaacggctggaccgaccaggacaggctctctaacgcccataagacttgcactggtgcgggcggtgttgatgctcctgggtgttctctcaatgttggcaccgacggtagcgcaggccatccatcgactcagccgctccaattcccagcgaactctgaggacattggctcgacaaagcctcttgcccagcttccaaacaacaagcagcctttcggccaaacccctcagccaaagcggaagagccgcgcattcgccgctgaatattaagaagggtgacttgatagaagtgagtgaccaattgctccatgaaccagaatcgggagttggaatggaacataagactttttagctgtatctacttccatatagctctttcacgatgaagtattgccc

SEQ ID NO: 33803 - DNA, 1629 bp, Muscodor strobelii
  misc_feature: SGI cDNA ID NO. 571667
  misc_feature: Encodes the peptide sequence at SEQ ID NO 33804
atggagaggatggaaacggatcatggagcagtaaatgtggaatctagctcgtataacggcaaagaagcaccacctatcgaagattcacacaatgcttcagaggcgtatcatgcttggcgtgccgagcgaacggctgggttctgggagtcaatcaaattgaacaagcgtgctgttctttggtcaatggctatatccgcaactttgattatggagggatatgacacgattctgatcagttctttctatggctacccgaccttccagcagaaatacgggcagtattatcctcagctgcagagttatcagctcagcagcgcgtggcaagtgggaatcaacaacagcgagatagtcgggctagtcatcggcggcataatcaatggttgggcttcgccacgatttggttataagaagacactgctggtatcactgtctgtgctcatagtaacgctatttgcgacgtttttcgcaccttcaattaccgttctgctcatcggccaacttctcaacggcgtgccgttgggtgtcttcgcaacgacaggcccagcatatgcatcagaggttctacctctctcactcagaggatacctcgccacatactgcaatctgtgcttcgctgttggacagatcattgccaacggcgttcttaaggggtttgccaataatcaaacccaatggtcctaccgagtcccgttcgcaatacaatgggtatggccgttgccacttatcgccattctctcgttcgctcccgaatcgccgtggtttctgttgaaaaggggccggcgtgaagaagctgcaagggttcttcgacgactagctgagaagtcggacaatgagatccatgccactttggcgcaaatgacacacaccatcaaacttgagcaggatatggaagcaggaacatcgtacctagactgcttgaagggcatcgatctgcgtcgtactgagatcgcatgtcttgcatggactgggcagattttaccagggttgactcttgcttacagcgcgacgtacttcttcatatctgccgggctgagccttgacaatgcattcaacatcggcgtgggaacaaatgcgatctcaattgtagggactatcttgtcctgggttctaatggcttcttttggtcgtcgatccatataccttacaggcatcacgatcatgatcatgaccatgctcatcatcggtatcctttcggcgactacacagaacctgccaggtctctgggcacaagctgcgctattgatcgtatggcacggtgtatattcattaactgtaggacctattgcgtttgctattgttgcagagatctctgccatccgtcttcgcacgaaaacagtagtattggctaggactgtctacaatgtagccctcatatttgccaccgttatcggcccttattctctcaacccttcggcatggaactggtctggcaaggtgggcttcttctgggctggacttggttctcttgttgctgtctgggccttcttcagattacccgaatcaaagggacgttcatatgaagagcttgacatgcttttcgcacagaaaacatcagcacgcagattcaagtcaactagcgtgaagatttatgaagagacggacagcaccaacactgatgtctcgcactga

SEQ ID NO: 33804 - protein, 542 aa, Muscodor strobelii
  misc_feature: SGI Peptide ID NO. 571667
  misc_feature (64)..(461): Pfam Id: PF07690 Pfam Desc: Major Facilitator Superfamily
  misc_feature (60)..(513): Pfam Id: PF00083 Pfam Desc: Sugar (and other) transporter
  misc_feature (117)..(461): Pfam Id: PF07690 Pfam Desc: Major Facilitator Superfamily
  misc_feature (49)..(530): NCBI GI: 256728327 Blast Desc: NECHADRAFT_97753 [Nectria haematococca mpVI 77-13-4]
  misc_feature (34)..(539): NCBI GI: 115492863 Blast Desc: ATEG_00973 [Aspergillus terreus NIH2624] gi|114197919|gb|EAU39619.1| ATEG_00973 [Aspergillus terreus NIH2624]
  misc_feature (11)..(539): NCBI GI: 212538571 Blast Desc: maltose permease, [Penicillium marneffei ATCC 18224] gi|210069183|gb|EEA23274.1| maltose permease, [Penicillium marneffei ATCC 18224]
  misc_feature (11)..(539): NCBI GI: 242806427 Blast Desc: sugar transporter, [Talaromyces stipitatus ATCC 10500] gi|218715366|gb|EED14788.1| sugar transporter, [Talaromyces stipitatus ATCC 10500]
  misc_feature (26)..(530): NCBI GI: 255930847 Blast Desc: Pc12g00780 [Penicillium chrysogenum Wisconsin 54-1255] gi|211581599|emb|CAP79705.1| Pc12g00780 [Penicillium chrysogenum Wisconsin 54-1255]
  misc_feature (2)..(531): NCBI GI: 169766646 Blast Desc: [Aspergillus oryzae RIB40] gi|83765649|dbj|BAE55792.1| protein product [Aspergillus oryzae]
  misc_feature (2)..(531): NCBI GI: 238483399 Blast Desc: sugar transporter, [Aspergillus flavus NRRL3357] gi|220700988|gb|EED57326.1| sugar transporter, [Aspergillus flavus NRRL3357]
  misc_feature (27)..(538): NCBI GI: 256729525 Blast Desc: [Nectria haematococca mpVI 77-13-4]
  misc_feature (4)..(532): NCBI GI: 242789692 Blast Desc: MFS maltose permease MalP [Talaromyces stipitatus ATCC 10500] gi|218718003|gb|EED17423.1| MFS maltose permease MalP [Talaromyces stipitatus ATCC 10500]
  misc_feature (9)..(532): NCBI GI: 145614969 Blast Desc: MGG_09607 [Magnaporthe grisea 70-15] gi|145021852|gb|EDK05929.1| MGG_09607 [Magnaporthe grisea 70-15]
MERMETDHGAVNVESSSYNGKEAPPIEDSHNASEAYHAWRAERTAGFWESIKLNKRAVLWSMAISATLIMEGYDTILISSFYGYPTFQQKYGQYYPQLQSYQLSSAWQVGINNSEIVGLVIGGIINGWASPRFGYKKTLLVSLSVLIVTLFATFFAPSITVLLIGQLLNGVPLGVFATTGPAYASEVLPLSLRGYLATYCNLCFAVGQIIANGVLKGFANNQTQWSYRVPFAIQWVWPLPLIAILSFAPESPWFLLKRGRREEAARVLRRLAEKSDNEIHATLAQMTHTIKLEQDMEAGTSYLDCLKGIDLRRTEIACLAWTGQILPGLTLAYSATYFFISAGLSLDNAFNIGVGTNAISIVGTILSWVLMASFGRRSIYLTGITIMIMTMLIIGILSATTQNLPGLWAQAALLIVWHGVYSLTVGPIAFAIVAEISAIRLRTKTVVLARTVYNVALIFATVIGPYSLNPSAWNWSGKVGFFWAGLGSLVAVWAFFRLPESKGRSYEELDMLFAQKTSARRFKSTSVKIYEETDSTNTDVSH

SEQ ID NO: 33805 - DNA, 753 bp, Muscodor strobelii
  misc_feature: SGI cDNA ID NO. 571668
  misc_feature: Encodes the peptide sequence at SEQ ID NO 33806
atgaagtgttatcagctcttgttgtctgttgtcacgactttttattctgtcatttttgcatcccctgctcaacgactggatgcggagctaattaatattgacctggaactcccctcgtggagaattgacgacttcgaatggcgcacaggatatctcaactggtcctactatgttggtgttggaccggcaccacctccgccttcgcccacctacgcttgcggcgctgcgatgctgcggctcaacattacccggatctttctatcgacggctaacgaagagaaatcttcgcagcaacagacagtgccgtgtatcgagcaaacaagcgacatgagactatccaatatcacggatcctacgaattacgacgcagggccgatgggaccacctcctgccagcccgcattggttcacatgtgatttggacaagcagctgttcatttatcccgatggagctgacacgcctccttggcctcgtaagcgtggaaatgaccccgaggagatagaaaacactacgacgaagatccgacttgatccagtgacgagaacattggaagtctcgcaagagtcagtagaccatgcgccagtctcaggcataggggtattaccagctttgacctgtcgcgaacgcaccattcttgaagatgatgcctattttcttgtgaactctccacctatgatctggaagtctcttggtgaggctatttacaatgggagtgtctgctatggcaccgcgttcactgtaaccagtaggtag

SEQ ID NO: 33806 - protein, 250 aa, Muscodor strobelii
  misc_feature: SGI Peptide ID NO. 571668
MKCYQLLLSVVTTFYSVIFASPAQRLDAELINIDLELPSWRIDDFEWRTGYLNWSYYVGVGPAPPPPSPTYACGAAMLRLNITRIFLSTANEEKSSQQQTVPCIEQTSDMRLSNITDPTNYDAGPMGPPPASPHWFTCDLDKQLFIYPDGADTPPWPRKRGNDPEEIENTTTKIRLDPVTRTLEVSQESVDHAPVSGIGVLPALTCRERTILEDDAYFLVNSPPMIWKSLGEAIYNGSVCYGTAFTVTSR

SEQ ID NO: 33807 - DNA, 909 bp, Muscodor strobelii
  misc_feature: SGI EST ID NO. CUFF.79904.0
  misc_feature: Variant of the nucleotide sequence at SEQ ID NO 33805
ttgcaacccacgcatcgtgttgaaaaatcttcaagtacatacgcagaatttactctcgagacatgaagtgttatcagctcttgttgtctgttgtcacgactttttattctgtcatttttgcatcccctgctcaacgactggatgcggagctaattaatattgacctggaactcccctcgtggagaattgacgacttcgaatggcgcacaggatatctcaactggtcctactatgttggtgttggaccggcaccacctccgccttcgcccacctacgcttgcggcgctgcgatgctgcggctcaacattacccggatctttctatcgacggctaacgaagagaaatcttcgcagcaacagacagtgccgtgtatcgagcaaacaagcgacatgagactatccaatatcacggatcctacgaattacgacgcagggccgatgggaccacctcctgccagcccgcattggttcacatgtgatttggacaagcagctgttcatttatcccgatggagctgacacgcctccttggcctcgtaagcgtggaaatgaccccgaggagatagaaaacactacgacgaagatccgacttgatccagtgacgagaacattggaagtctcgcaagagtcagtagaccatgcgccagtctcaggcataggggtattaccagctttgacctgtcgcgaacgcaccattcttgaagatgatgcctattttcttgtgaactctccacctatgatctggaagtctcttggtgaggctatttacaatgggagtgtctgctatggcaccgcgttcactgtaaccagtaggtagcattgctgtcttattgccatacagcgccgaatagttttttaatatcgtcccgtaggcaactgaaggattgtggtgatgaatcaagaagcgtaaa

SEQ ID NO: 33808 - DNA, 2625 bp, Muscodor strobelii
  misc_feature: SGI cDNA ID NO. 571669
  misc_feature: Encodes the peptide sequence at SEQ ID NO 33809
atgcggaatcgcggactagtcacttcggctcaagttgtgctaagcatcatccttgctacgtcgtcgattgcagctgctgggccgagtcctcgtcaagtcaccaaggtagacacgggctggaaatttcagcactggttcacgagtccagataacatcacatacaacgacttgaaggcatatatcctgccaagcggaaatgactttattgcgaacatcagcgaccgccatgacccacctccaagcgatcctaatattgatgccgagtatgctagtgcagacttcgacgatagtggctggggatcggtaagagttccgcatgactgggcaatcgaaggaccattttacgtcggcgacgatgtgcccgtgggtggtggcatggggcgtctaccgatacagggtgttggctggtaccgacgcaagatctctatagaaccgatggacgaaggaaagtcggtgtatctcgacatagatggagcaatgtcatatgcaatggtgtggataaatgagaagctgattgggggatggccgtacggctacaattcctttcgtcttgacctcacggatcatttacttgtcggaggcgacaatcaactggcaattagactcgataatccaacattgtcatcccgttggtatcctggtgccggcttgtatcgcaatgtttggctcacgaaagtcaataaggtgcatattggtcagtccggtacatatatcagttcgagggatgtgtctttgacgtcagctactgttgacttgactgtccaaatagaaagctcaggtgatgcacagaacgtggtggtaaagacgagaatatctcacttcgacggcgcaacaggaaaagtcgggaagagcgttgtgtcatttccacagcactctatcacagtgggagcgggccgaaagacgagcttgaatgcatcagtcgtaataccaaacccacagctgtggggtccatggccttcacagactcccaacatgtatattgcgaccacgacactgtattccggcaacaaaactctcgacacctacgaaacgcgtttcggaatccgcacatttgcatacgacgccgatcgaggacttttggtcaacggggaacacgtacgcatccaaggtgtcaatcaacatcatgatctcggtgcgatcggcgcagctttcaacctccgagccgctgaaaggcaacttcaggttttgcgcgagatgggcgtgaatgcggtccgaatgtctcataacccgcctgctcccgagtttctcgatctcatggatcaaatgggattccttgtatttgatgaaatcttcgattgctgggaaatccagaagaacgacaatgatttccatctcattttcaccgattggagcgaaccagacctgcggacattcatccgtcgcgaccgaaaccatccctcaatctttgtgtggagcgttgggaatgaggtaggtgagcaatatactaatgcatcaggcgctgcggttggccagcgtcttgtcgacattgtgcaccaagaagatccaacgcggccagtgactgcttctatgaactacgcgaaaccgtacatggacttcccgaaggtcttcgatgttcttagtctcaattatcaaggtgaaggaatccgaaatgcaccttcgtactcaggattatcgggcatcgcaacaccaccgctctatgatgactttaatgccgcgtttcccgagaagatgctgcagagcagtgagactgccgcagctctgagtacgcgagggacgtacatcttccccgtcgtcaatgacatcagcgcgcccgttaacgacacatctggcggcaattcgactacggagcgagtcagtgcttatgagctctacactgctgattttggttcatcacctgacaaggtgttcgcggcgcaggatcagcatccctatgtggctggtgaatttgtctggtctgggtttgattacttaggtgaacccacgccctactacggggcacgtagttcatattacggcattgtcgatttggctggtttccctaaagataggtactatttatatcaatcgcgctggagacctgatctacagagcgctcacattttgccccattggacctggccaaatcgcgtcgggatggtaacaccggtgcacgtattctctgcagctgacgaagccgagttgttcctgaacggtcaatcgcagggtcgactcactaaggcaaattacacatatagatttcgctgggacgacgtggtctatgaaccaggtcaattgcatgtggttacgtacagtcaaggtcaagtctgggccgaaactactgtacagacagcaggcgacgctgctgccattcgtcttacctatgataacaactcaaccctgcaagccgacaacgacttggtctacgtcagagcagaagttattgatgccgaaggggtccttgttccgcacgcaactaatgcaatcacgtttgacgttgtcggcggaggcgagattttggctactgataatggtgatccgacagacttcactatctttccgtctaaacaacgaaaagcttatagcggtcttgcgcttgctatcattcgaacggacatggactctagcagaaccgtctcaatttcagcttctagtgcagacctcaaatcagctaccatagcgatttaa

SEQ ID NO: 33809 - protein, 874 aa, Muscodor strobelii
  misc_feature: SGI Peptide ID NO. 571669
  misc_feature (236)..(349): Pfam Id: PF00703 Pfam Desc: Glycosyl hydrolases family 2, immunoglobulin-like beta-sandwich domain
  misc_feature (352)..(683): Pfam Id: PF02836 Pfam Desc: Glycosyl hydrolases family 2, TIM barrel domain
  misc_feature (30)..(227): Pfam Id: PF02837 Pfam Desc: Glycosyl hydrolases family 2, sugar binding domain
  misc_feature (310)..(349): Pfam Id: PF00703 Pfam Desc: Glycosyl hydrolases family 2, immunoglobulin-like beta-sandwich domain
  misc_feature (355)..(430): Pfam Id: PF02836 Pfam Desc: Glycosyl hydrolases family 2, TIM barrel domain
  misc_feature (455)..(507): Pfam Id: PF02836 Pfam Desc: Glycosyl hydrolases family 2, TIM barrel domain
  misc_feature (92)..(227): Pfam Id: PF02837 Pfam Desc: Glycosyl hydrolases family 2, sugar binding domain
  misc_feature (20)..(874): NCBI GI: 284036634 Blast Desc: glycoside hydrolase family 2 sugar binding protein [Spirosoma linguale DSM 74] gi|283815927|gb|ADB37765.1| glycoside hydrolase family 2 sugar binding protein [Spirosoma linguale DSM
  misc_feature (13)..(874): NCBI GI: 256720338 Blast Desc: NECHADRAFT_56078 [Nectria haematococca mpVI 77-13-4]
  misc_feature (6)..(874): NCBI GI: 254443660 Blast Desc: Glycosyl hydrolases family 2, immunoglobulin-like beta-sandwich domain [Verrucomicrobiae bacterium DG1235] gi|198257968|gb|EDY82276.1| Glycosyl hydrolases family 2, domain
  misc_feature (1)..(872): NCBI GI: 254784875 Blast Desc: glycoside hydrolase family 2 domain protein [Teredinibacter turnerae T7901] gi|237686316|gb|ACR13580.1| glycoside hydrolase family 2 domain protein [Teredinibacter
  misc_feature (1)..(874): NCBI GI: 171688178 Blast Desc: protein product [Podospora anserina] gi|170944051|emb|CAP70161.1| protein product [Podospora anserina]
  misc_feature (25)..(874): NCBI GI: 67540436 Blast Desc: AN6388.2 [Aspergillus nidulans FGSC A4] gi|40739220|gb|EAA58410.1| AN6388.2 [Aspergillus nidulans FGSC A4] gi|259479388|tpe|CBF69565.1| TPA: beta-galactosidase nidulans
  misc_feature (29)..(874): NCBI GI: 192361307 Blast Desc: beta-galactosidase, , bgl2B [Cellvibrio japonicus Ueda107] gi|190687472|gb|ACE85150.1| beta-galactosidase, , bgl2B [Cellvibrio japonicus Ueda107]
  misc_feature (57)..(874): NCBI GI: 182415189 Blast Desc: glycoside hydrolase family protein [Opitutus terrae PB90-1] gi|177842403|gb|ACB76655.1| glycoside hydrolase family 2 sugar binding [Opitutus terrae PB90-1]
  misc_feature (24)..(874): NCBI GI: 116201005 Blast Desc: CHGG_08387 [Chaetomium globosum CBS 148.51] gi|88176905|gb|EAQ84373.1| CHGG_08387 [Chaetomium globosum CBS 148.51]
  misc_feature (57)..(874): NCBI GI: 268317493 Blast Desc: glycoside hydrolase family 2 sugar binding protein [Rhodothermus marinus DSM 4252] gi|262335027|gb|ACY48824.1| glycoside hydrolase family 2 sugar binding protein [Rhodothermus
  misc_feature (93)..(822): SWISSPROT Homolog: EC 3.2.1.23 Beta-galactosidase
MRNRGLVTSAQVVLSIILATSSIAAAGPSPRQVTKVDTGWKFQHWFTSPDNITYNDLKAYILPSGNDFIANISDRHDPPPSDPNIDAEYASADFDDSGWGSVRVPHDWAIEGPFYVGDDVPVGGGMGRLPIQGVGWYRRKISIEPMDEGKSVYLDIDGAMSYAMVWINEKLIGGWPYGYNSFRLDLTDHLLVGGDNQLAIRLDNPTLSSRWYPGAGLYRNVWLTKVNKVHIGQSGTYISSRDVSLTSATVDLTVQIESSGDAQNVVVKTRISHFDGATGKVGKSVVSFPQHSITVGAGRKTSLNASVVIPNPQLWGPWPSQTPNMYIATTTLYSGNKTLDTYETRFGIRTFAYDADRGLLVNGEHVRIQGVNQHHDLGAIGAAFNLRAAERQLQVLREMGVNAVRMSHNPPAPEFLDLMDQMGFLVFDEIFDCWEIQKNDNDFHLIFTDWSEPDLRTFIRRDRNHPSIFVWSVGNEVGEQYTNASGAAVGQRLVDIVHQEDPTRPVTASMNYAKPYMDFPKVFDVLSLNYQGEGIRNAPSYSGLSGIATPPLYDDFNAAFPEKMLQSSETAAALSTRGTYIFPVVNDISAPVNDTSGGNSTTERVSAYELYTADFGSSPDKVFAAQDQHPYVAGEFVWSGFDYLGEPTPYYGARSSYYGIVDLAGFPKDRYYLYQSRWRPDLQSAHILPHWTWPNRVGMVTPVHVFSAADEAELFLNGQSQGRLTKANYTYRFRWDDVVYEPGQLHVVTYSQGQVWAETTVQTAGDAAAIRLTYDNNSTLQADNDLVYVRAEVIDAEGVLVPHATNAITFDVVGGGEILATDNGDPTDFTIFPSKQRKAYSGLALAIIRTDMDSSRTVSISASSADLKSATIAI

SEQ ID NO: 33810 - DNA, 1517 bp, Muscodor strobelii
  misc_feature: SGI EST ID NO. CUFF.79910.0
  misc_feature: Variant of the nucleotide sequence at SEQ ID NO 33808
cagcgaccgccatgacccacctccaagcgatcctaatattgatgccgagtatgctagtgcagacttcgacgatagtggctggggatcggtaagagttccgcatgactgggcaatcgaaggaccattttacgtcggcgacgatgtgcccgtgggtggtggcatggggcgtctaccgatacagggtgttggctggtaccgacgcaagatctctatagaaccgatggacgaaggaaagtcggtgtatctcgacatagatggagcaatgtcatatgcaatggtgtggataaatgagaagctgattgggggatggccgtacggctacaattcctttcgtcttgacctcacggatcatttacttgtcggaggcgacaatcaactggcaattagactcgataatccaacattgtcatcccgttggtatcctggtgccggcttgtatcgcaatgtttggctcacgaaagtcaataaggtgcatattggtcagtccggtacatatatcagttcgagggatgtgtctttgacgtcagctactgttgacttgactgtccaaatagaaagctcaggtgatgcacagaacgtggtggtaaagacgagaatatctcacttcgacggcgcaacaggaaaagtcgggaagagcgttgtgtcatttccacagcactctatcacagtgggagcgggccgaaagacgagcttgaatgcatcagtcgtaataccaaacccacagctgtggggtccatggccttcacagactcccaacatgtatattgcgaccacgacactgtattccggcaacaaaactctcgacacctacgaaacgcgtttcggaatccgcacatttgcatacgacgccgatcgaggacttttggtcaacggggaacacgtacgcatccaaggtgtcaatcaacatcatgatctcggtgcgatcggcgcagctttcaacctccgagccgctgaaaggcaacttcaggttttgcgcgagatgggcgtgaatgcggtccgaatgtctcataacccgcctgctcccgagtttctcgatctcatggatcaaatgggattccttgtatttgatgaaatcttcgattgctgggaaatccagaagaacgacaatgatttccatctcattttcaccgattggagcgaaccagacctgcggacattcatccgtcgcgaccgaaaccatccctcaatctttgtgtggagcgttgggaatgaggtaggtgagcaatatactaatgcatcaggcgctgcggttggccagcgtcttgtcgacattgtgcaccaagaagatccaacgcggccagtgactgcttctatgaactacgcgaaaccgtacatggacttcccgaaggtcttcgatgttcttagtctcaattatcaaggtgaaggaatccgaaatgcaccttcgtactcaggattatcgggcatcgcaacaccaccgctctatgatgactttaatgccgcgtttcccgagaagatgctgcagagcagtgagactgccgcagctctgagtacgcgag

SEQ ID NO: 33811 - DNA, 771 bp, Muscodor strobelii
  misc_feature: SGI cDNA ID NO. 571670
  misc_feature: Encodes the peptide sequence at SEQ ID NO 33812
atgtcgcctcacgcctcgctcaagcctataattgtccatggccacctcatgggcccgaacccactcaaggttcgaatggtcctcgaggaactggaagtgcccttcgaatacagagaggtggagttcgaggacatgaagaaagcgccatatctcgccattaaccccaacggccgcgtgccatcaatcgaagacccgaacacgggccttacgattttcgagagcggtcctattattgagtatctcgccgaagagtatgacaagaaccacaagctgtcatatgcgacgcgtaccgagcaataccagattaaacaatggattgcgctgcagatttccgggcaaggtccttattatggccagtggtatgtgtggttctcggttattcaccctgagaaatttccctcagctatcgagcggtaccgagcggaggtggagcgtgtgcgctctgtggttgacatgcagctttcgcgacaagctggcgagaagcaaggcgagagagtcgcggacaaggaaaattggcttgttggtgacaaaatgactatcgcggacttgagttggttcatctgggaacaaatcgccaactttctcctgggcatgaaccaagtgcccattcccgagggcaagtatcctcactatgatgcttggtacaaaacacttgagtcacgaccaagcgctcagagggcaattgataaccgcaatcgtggcctggcgaagatgagagcagaacgcacggtgccaggattgcgtgacgaggatggcaattctgatgcttaa

SEQ ID NO: 33812 - protein, 256 aa, Muscodor strobelii
  misc_feature: SGI Peptide ID NO. 571670
  misc_feature (8)..(83): Pfam Id: PF02798 Pfam Desc: Glutathione S-transferase, N-terminal domain
  misc_feature (168)..(222): Pfam Id: PF00043 Pfam Desc: Glutathione S-transferase, C-terminal domain
  misc_feature (7)..(238): NCBI GI: 256721835 Blast Desc: NECHADRAFT_54515 [Nectria haematococca mpVI 77-13-4]
  misc_feature (7)..(246): NCBI GI: 256734881 Blast Desc: NECHADRAFT_90504 [Nectria haematococca mpVI 77-13-4]
  misc_feature (9)..(243): NCBI GI: 119467490 Blast Desc: glutathione-s-transferase theta, gst [Neosartorya fischeri NRRL 181] gi|119405703|gb|EAW15654.1| glutathione-s-transferase theta, gst [Neosartorya fischeri NRRL
  misc_feature (7)..(238): NCBI GI: 255941120 Blast Desc: Pc16g10190 [Penicillium chrysogenum Wisconsin 54-1255] gi|211585952|emb|CAP93689.1| Pc16g10190 [Penicillium chrysogenum Wisconsin 54-1255]
  misc_feature (8)..(231): NCBI GI: 156063600 Blast Desc: SS1G_01918 [Sclerotinia sclerotiorum 1980] gi|154697252|gb|EDN96990.1| SS1G_01918 [Sclerotinia sclerotiorum 1980]
  misc_feature (6)..(231): NCBI GI: 154282777 Blast Desc: HCAG_02355 [Ajellomyces capsulatus NAm1] gi|150410364|gb|EDN05752.1| HCAG_02355 [Ajellomyces capsulatus NAm1]
  misc_feature (6)..(237): NCBI GI: 255931813 Blast Desc: Pc12g06200 [Penicillium chrysogenum Wisconsin 54-1255] gi|134086007|gb|ABO52862.1| glutathione transferase [Penicillium chrysogenum] gi|211582082|emb|CAP80247.1| Pc12g06200 [Penicillium
  misc_feature (6)..(236): NCBI GI: 145236749 Blast Desc: An06g02010 [Aspergillus niger] gi|134075483|emb|CAK48044.1| protein product [Aspergillus niger]
  misc_feature (7)..(235): NCBI GI: 169772519 Blast Desc: [Aspergillus oryzae RIB40] gi|83768589|dbj|BAE58726.1| protein product [Aspergillus oryzae]
  misc_feature (6)..(236): NCBI GI: 115399946 Blast Desc: ATEG_06384 [Aspergillus terreus NIH2624] gi|114191228|gb|EAU32928.1| ATEG_06384 [Aspergillus terreus NIH2624]
  misc_feature (14)..(235): SWISSPROT Homolog: EC 2.5.1.18 Glutathione transferase
MSPHASLKPIIVHGHLMGPNPLKVRMVLEELEVPFEYREVEFEDMKKAPYLAINPNGRVPSIEDPNTGLTIFESGPIIEYLAEEYDKNHKLSYATRTEQYQIKQWIALQISGQGPYYGQWYVWFSVIHPEKFPSAIERYRAEVERVRSVVDMQLSRQAGEKQGERVADKENWLVGDKMTIADLSWFIWEQIANFLLGMNQVPIPEGKYPHYDAWYKTLESRPSAQRAIDNRNRGLAKMRAERTVPGLRDEDGNSDA

SEQ ID NO: 33813 - DNA, 743 bp, Muscodor strobelii
  misc_feature: SGI EST ID NO. CUFF.79928.0
  misc_feature: Variant of the nucleotide sequence at SEQ ID NO 33811
ctaaaacaaccctattctattctataccataccgaacagaagaaaggactaacatgttttgatgcactagatgtgtggttctcggttattcaccctgagaaatttccctcagctatcgagcggtaccgagcggaggtggagcgtgtgcgctctgtggttgacatgcagctttcgcgacaagctggcgagaagcaaggcgagagagtcgcggacaaggaaaattggcttgttggtgacaaaatgactatcgcggacttgagttggttcatctgggaacaaatcgccaactttctcctgggcatgaaccaagtgcccattcccgagggcaagtatcctcactatgatgcttggtacaaaacacttgagtcacgaccaagcgctcagagggcaattgataaccgcaatcgtggcctggcgaagatgagagcagaacgcacggtgccaggattgcgtgacgaggatggcaattctgatgcttaagagatttggaaagcttatcattgaggataagttgtacactcgttctgcctcagcctgtatttagggaggcaataacgcttccggcatgggttagcaccgtgtttgagtatacaaaatatttgactaccggtgacgcgcggttcgctcgtagacagaccaacaagaggaggccatctctatgataacgaccgtgaggaagcagcttcccttcttcatatccgtgtcctattgatttcgtacattgtaggtaggagatttgtcgg

SEQ ID NO: 33814 - DNA, 867 bp, Muscodor strobelii
  misc_feature: SGI cDNA ID NO. 571671
  misc_feature: Encodes the peptide sequence at SEQ ID NO 33815
atggacacggcagccgacgacacccaagcgcacgctaaagatcaattcaactggcccgctctcccagcggagctgaaacttgcagtggtcgagcagactgacttggtcgcacctggaggcgtagtcaggtgggatccgattcggaagtttctacggcgacagtgtaaggagggcaaggaaaaattctggcaagtgccgaccaacctcttccttgtcaacaaaaccttccgcgtaatggcccagagagtgatcgaccgctctatggaagctcgcaggaaaggggggccggtcatgcgcattccgcatgtatatgcagcagatagattcatactggatctggcaaaatcaggcagtctttcatacatccgatcgattgaatttcaaagtttctcggtttccgtttggcatccgacgaacgcaaggcccgattggctccatcatttcggtatgctcgagaaagcggaaggagatctgctgcgcctgcgcctgcaatccctcagaattgccggtgtgaatgccaatgatttcccagaggtggccgctcagcatcgtttcgaagaccctattgcccgtttcagatacggcattgagaagacctgctggaaattcgtcacagccagcgggccgccgttatttgtctccaagtccttcacagtgtgtatgaagatacgacttgcccgtttttactatgtcatcaggaagactagtgagactgctatatccccacccagggacgaatacgtgcttgttgcccgtcgcgagatatcgtatcgaaaggactgcgccgggagcgagagtgaggtatcaagaagtcaagacgggaattggatcgaagaagcatgggagctcaggcccagctcaacttag

SEQ ID NO: 33815 - protein, 288 aa, Muscodor strobelii
  misc_feature: SGI Peptide ID NO. 571671
MDTAADDTQAHAKDQFNWPALPAELKLAVVEQTDLVAPGGVVRWDPIRKFLRRQCKEGKEKFWQVPTNLFLVNKTFRVMAQRVIDRSMEARRKGGPVMRIPHVYAADRFILDLAKSGSLSYIRSIEFQSFSVSVWHPTNARPDWLHHFGMLEKAEGDLLRLRLQSLRIAGVNANDFPEVAAQHRFEDPIARFRYGIEKTCWKFVTASGPPLFVSKSFTVCMKIRLARFYYVIRKTSETAISPPRDEYVLVARREISYRKDCAGSESEVSRSQDGNWIEEAWELRPSST

SEQ ID NO: 33816 - DNA, 878 bp, Muscodor strobelii
  misc_feature: SGI cDNA ID NO. 571672
  misc_feature: Elevated expression when VOC is produced
  misc_feature: Encodes the peptide sequence at SEQ ID NO 33817
atggggattactcctataagcactacgaactcaaagactttcggtctcgatcgttatattgctccggtgaagctcggcatggacttcaaaaactttatggctacgacatggccaaacatggccaaccccgactccctcaataccaatcacttccgagtagctcaaatggcacccgatgcatacacaagggcaagcgcgtcctcgacgaaacacgagcgtcagcaagcacttcgccgtgttgatcacttgaggctgatcggaaattactgcatcgaaggctgggatctcaatctcatacaaccacaaatgatcccacctggagttcgtttccatagacgcgatgtcgaacatcactggactggtgttccccaagattcttttgatctcatttatatacgaatgcttaacggcagcatcatgaactgggagcagttatacggcaggatcttcgatcatttgaaaccaggaactggagtgttagagcaggtagagattgattggcgcccaaaatgccagcgcgacccaggcagtttccataattcgagtcttgctaaatggtcagcactgttacatgaagggtaccaacgtgccggaatgccgctggagttacagtcggtcaccaactctcgattggaaaacctcggatttattgatatcgagcatatttcgagacggataccgttgaatccttggctggatgacgaatctgagagagaattagccagatggttcaaacgaggattcactcttggtgtagaagcattgacacaaactgctctcatcaagtacatggaaatgacagaaagcgatgttcaggaactaattctagaagtcgagagagatatctacaagcgggattggcccattttctgtacctt

SEQ ID NO: 33817 - protein, 292 aa, Muscodor strobelii
  misc_feature: SGI Peptide ID NO. 571672
  misc_feature (93)..(292): NCBI GI: 171695002 Blast Desc: protein product [Podospora anserina] gi|170947743|emb|CAP59906.1| protein product [Podospora anserina]
  misc_feature (88)..(285): NCBI GI: 189196999 Blast Desc: methyltransferase LaeA [Pyrenophora tritici-repentis Pt-1C-BFP] gi|187980785|gb|EDU47411.1| methyltransferase LaeA [Pyrenophora tritici-repentis Pt-1C-BFP]
  misc_feature (91)..(286): NCBI GI: 212533505 Blast Desc: regulator of secondary metabolism LaeA [Penicillium marneffei ATCC 18224] gi|210072273|gb|EEA26362.1| regulator of secondary metabolism LaeA [Penicillium marneffei ATCC 18224]
  misc_feature (91)..(286): NCBI GI: 242778258 Blast Desc: regulator of secondary metabolism LaeA [Talaromyces stipitatus ATCC 10500] gi|218722821|gb|EED22239.1| regulator of secondary metabolism LaeA [Talaromyces stipitatus ATCC 10500]
  misc_feature (93)..(282): NCBI GI: 242760191 Blast Desc: conserved [Talaromyces stipitatus ATCC 10500] gi|218723135|gb|EED22552.1| conserved [Talaromyces stipitatus ATCC 10500]
  misc_feature (93)..(286): NCBI GI: 189188670 Blast Desc: methyltransferase [Pyrenophora tritici-repentis Pt-1C-BFP] gi|187972280|gb|EDU39779.1| methyltransferase [Pyrenophora tritici-repentis Pt-1C-BFP]
  misc_feature (91)..(285): NCBI GI: 225677611 Blast Desc: methyltransferase LaeA [Paracoccidioides brasiliensis Pb03]
  misc_feature (91)..(285): NCBI GI: 226295244 Blast Desc: methyltransferase [Paracoccidioides brasiliensis Pb18]
  misc_feature (91)..(285): NCBI GI: 226278780 Blast Desc: methyltransferase [Paracoccidioides brasiliensis Pb01]
  misc_feature (91)..(290): NCBI GI: 242771832 Blast Desc: conserved [Talaromyces stipitatus ATCC 10500] gi|218721541|gb|EED20959.1| conserved [Talaromyces stipitatus ATCC 10500]
  misc_feature: Useful for introducing or modulating the production of volatile compounds
MGITPISTTNSKTFGLDRYIAPVKLGMDFKNFMATTWPNMANPDSLNTNHFRVAQMAPDAYTRASASSTKHERQQALRRVDHLRLIGNYCIEGWDLNLIQPQMIPPGVRFHRRDVEHHWTGVPQDSFDLIYIRMLNGSIMNWEQLYGRIFDHLKPGTGVLEQVEIDWRPKCQRDPGSFHNSSLAKWSALLHEGYQRAGMPLELQSVTNSRLENLGFIDIEHISRRIPLNPWLDDESERELARWFKRGFTLGVEALTQTALIKYMEMTESDVQELILEVERDIYKRDWPIFCT

SEQ ID NO: 33818 - DNA, 1339 bp, Muscodor strobelii
  misc_feature: SGI EST ID NO. CUFF.79950.0
  misc_feature: Variant of the nucleotide sequence at SEQ ID NO 33816
tggcagtttactgcagattgccctatactatccaatattgctaggtccttgcattgaagtaatgcagataggttgtctctgccggctccttttaggaccttttgatgacaggtgatacaaccaattggtagggcagatcgtcgccccgattgcgaggcttaagacttagcgcataatgaatttcattggcatggggattactcctataagcactacgaactcaaagactttcggtctcgatcgttatattgctccggtgaagctcggcatggacttcaaaaactttatggctacgacatggccaaacatggccaaccccgactccctcaataccaatcacttccgagtagctcaaatggcacccgatgcatacacaagggcaagcgcgtcctcgacgaaacacgagcgtcagcaagcacttcgccgtgttgagtatgataaagccctgatcacgagatgggcaagatgttacagcaacgcatttaatggaagatatatgcttccttgtgatatccgcgaaaatgagagactagatatattccacaaaatcttcttgatggtgcgtcaaaacgaagctcacatctcatcaggactatatcaccgcaaactaggtgatagtcctcggattctggatctaggttgcggcactggtatttgggtaattgacgtagcagatcacttgaggctgatcggaaattactgcatcgaaggctgggatctcaatctcatacaaccacaaatgatcccacctggagttcgtttccatagacgcgatgtcgaacatcactggactggtgttccccaagattcttttgatctcatttatatacgaatgcttaacggcagcatcatgaactgggagcagttatacggcaggatcttcgatcatttgaaaccaggaactggagtgttagagcaggtagagattgattggcgcccaaaatgccagcgcgacccaggcagtttccataattcgagtcttgctaaatggtcagcactgttacatgaagggtaccaacgtgccggaatgccgctggagttacagtcggtcaccaactctcgattggaaaacctcggatttattgatatcgagcatatttcgagacggataccgttgaatccttggctggatgacgaatctgagagagaattagccagatggttcaaacgaggattcactcttggtgtagaagcattgacacaaactgctctcatcaagtacatggaaatgacagaaagcgatgttcaggaactaattctagaagtcgagagagatatctacaagcgggattggcccattttctgtaccttgcatatctgggtggctcgaaggccgtct

SEQ ID NO: 33819 - DNA, 984 bp, Muscodor strobelii
  misc_feature: SGI cDNA ID NO. 571673
  misc_feature: Elevated expression when VOC is produced
  misc_feature: Encodes the peptide sequence at SEQ ID NO 33820
atgaagattccgcgccatgggggcgatttaccggtagtgcgcctaccgccgccacctgcgcctgcgttatccgggaagactgtcaccaacaacattcggaacgatgcgaagcctacaataaaccaagaccacaaatcaacatcattccagcgagcgcagtacaagtgcacgactgtgaaccagcacgggaatcagcagcaattagaacttatgtcgcagttaagtggaatatccttcctaccaaagaagctgacgaatgcaggccaaggccctatgctccagccagtgcttatgtgttatcggcgaaatttattcgagataagcggctcgctcgttactccacacggtcatctatctgtgatcctacccgaatcaggcgagaccgtttccgtcagttatatggaggtctccatatctgctatagagtatagagaccggaaccggattcccctgatcgcggtaccactgagagtatcttcccaaagttccggaaaattgccgcaaacatcaggtcaagaacctccatcactacggctcgtccccatttcagacgatggaaaagagcatcaaggcgagaacgtagtacatccattcggctggaggcgtctgcaattccgaaaagcgacggcaaacaacgggaggcgaaaggaattacagcagcactttgtgcttcagcttaaggtgaccggaacactcgcgaacggcgcggaagcaagcctggctgaatccacatcagcaccgattgtggtgcgagggcgcagtccgggatcatttcgaagccgcgagcaaatccctttgttgaaatcaagcgcaatgtccccgggccaggccttcgccgagacaggtctggcaattgcgggggggccctctgttaatcctcaagaccaggcatcgaatcatctcactctcgagccggctagagcggcattgacgtttgatctctccgataccccttgcagtctcatgacaatgaggtcaaagtaa

SEQ ID NO: 33820 - protein, 327 aa, Muscodor strobelii
  misc_feature: SGI Peptide ID NO. 571673
  misc_feature (96)..(261): Pfam Id: PF05224 Pfam Desc: NDT80 / PhoG like DNA-binding family
  misc_feature (26)..(322): NCBI GI: 46125559 Blast Desc: FG07157.1 [Gibberella zeae PH-1]
  misc_feature (26)..(322): NCBI GI: 256730953 Blast Desc: [Nectria haematococca mpVI 77-13-4]
  misc_feature (41)..(327): NCBI GI: 39974249 Blast Desc: MGG_00729 [Magnaporthe grisea 70-15] gi|145018340|gb|EDK02619.1| MGG_00729 [Magnaporthe grisea 70-15]
  misc_feature (28)..(327): NCBI GI: 74623918 Blast Desc: VIB1_NEUCR RecName: Full=Transcription factor vib-1; AltName: Full=Vegetative incompatibility blocked protein 1 gi|12718281|emb|CAC28843.1| related to acid phosphatase crassa]
  misc_feature (28)..(327): NCBI GI: 164426844 Blast Desc: NCU03725 [Neurospora crassa OR74A] gi|157071499|gb|EAA32265.2| conserved [Neurospora crassa OR74A]
  misc_feature (28)..(326): NCBI GI: 116206460 Blast Desc: CHGG_02523 [Chaetomium globosum CBS 148.51] gi|88183120|gb|EAQ90588.1| CHGG_02523 [Chaetomium globosum CBS 148.51]
  misc_feature (28)..(327): NCBI GI: 171693661 Blast Desc: protein product [Podospora anserina] gi|170946779|emb|CAP73583.1| protein product [Podospora anserina]
  misc_feature (28)..(327): NCBI GI: 156065363 Blast Desc: SS1G_00692 [Sclerotinia sclerotiorum 1980] gi|154691551|gb|EDN91289.1| SS1G_00692 [Sclerotinia sclerotiorum 1980]
  misc_feature (28)..(327): NCBI GI: 154322409 Blast Desc: BC1G_00547 [Botryotinia fuckeliana B05.10] gi|150847881|gb|EDN23074.1| BC1G_00547 [Botryotinia fuckeliana B05.10]
  misc_feature (68)..(262): NCBI GI: 261355694 Blast Desc: VIB-1 [Verticillium albo-atrum VaMs.102]
  misc_feature: Useful for introducing or modulating the production of volatile compounds
MKIPRHGGDLPVVRLPPPPAPALSGKTVTNNIRNDAKPTINQDHKSTSFQRAQYKCTTVNQHGNQQQLELMSQLSGISFLPKKLTNAGQGPMLQPVLMCYRRNLFEISGSLVTPHGHLSVILPESGETVSVSYMEVSISAIEYRDRNRIPLIAVPLRVSSQSSGKLPQTSGQEPPSLRLVPISDDGKEHQGENVVHPFGWRRLQFRKATANNGRRKELQQHFVLQLKVTGTLANGAEASLAESTSAPIVVRGRSPGSFRSREQIPLLKSSAMSPGQAFAETGLAIAGGPSVNPQDQASNHLTLEPARAALTFDLSDTPCSLMTMRSK

SEQ ID NO: 33821 - DNA, 2594 bp, Muscodor strobelii
  misc_feature: SGI EST ID NO. CUFF.80080.0
  misc_feature: Variant of the nucleotide sequence at SEQ ID NO 33819
gctggtggcgagaaaaaccaccacggagttcgcatcaggcaatttcatattatgtgccatccgggcggagcttgctacgtcaatagttacaccatgtaacatggtcgcgcctcatagtttggtaatacatcctgttgttttcttgtcgacggatgatctaccgtctcagctatagcctgacagatacatacgcaaactcacacaattatatggtgacctagtggtagcccctggagcgcagcggcatctcctatgcatgtatctaataggcttagaagtcaacacgcacagtgcactgctgatttgcagttcgtgactgggcggttaccgtattgctatcatgcagcccgacatcgaacttcttacctctgagagcatccaagtacagatactgttgtaatcccgatacggcgttgactttcgtgaataggcaacggattttatgccgcgctcgacctgcctttacagtcattaccaccgggatcgaagcctcggtcattttcataaacgacatcgactgccgctatgtcaaacctacgcgggccgtacacgccagatggcaacgaagacaccaacacggaaaagccacagccacagcgagacgcacaggagcttgcagccggagctgtacacgctccatttcatgcaatgctcgataccctccggaatgtggtgcaagttatacgggacgtccagggtcgaatcgcagaacttgaagagggtctcaacaaagtacaatatcaaatcggaaatagtcaaggccaataccggaaatctgagggttttgacgccgataattctggtgaagtttcattctcttcctcgccttccacggagcagctggcacggcccccgagcagccatcatagcagcgaccagtgggatgaacagtgcaacaagcattcgtagatctccgctaatacatacacacagggatccgaacatgaagattccgcgccatgggggcgatttaccggtagtgcgcctaccgccgccacctgcgcctgcgttatccgggaagactgtcaccaacaacattcggaacgatgcgaagcctacaataaaccaagaccacaaatcaacatcattccagcgagcgcagtacaagtgcacgactgtgaaccagcacgggaatcagcagcaattagaacttatgtcgcagttaagtggaatatccttcctaccaaagaagctgacgaatgcaggccaaggccctatgctccagccagtgcttatgtgttatcggcgaaatttattcgagataagcggctcgctcgttactccacacggtcatctatctgtgatcctacccgaatcaggcgagaccgtttccgtcagttatatggaggtctccatatctgctatagagtatagagaccggaaccggattcccctgatcgcggtaccactgagagtatcttcccaaagttccggaaaattgccgcaaacatcaggtcaagaacctccatcactacggctcgtccccatttcagacgatggaaaagagcatcaaggcgagaacgtagtacatccattcggctggaggcgtctgcaattccgaaaagcgacggcaaacaacgggaggcgaaaggaattacagcagcactttgtgcttcagcttaaggtgaccggaacactcgcgaacggcgcggaagcaagcctggctgaatccacatcagcaccgattgtggtgcgagggcgcagtccgggatcatttcgaagccgcgagcaaatccctttgttgaaatcaagcgcaatgtccccgggccaggccttcgccgagacaggtctggcaattgcgggggggccctctgttaatcctcaagaccaggcatcgaatcatctcactctcgagccggctagagcggcattgacgtttgatctctccgataccccttgcagtctcatgacaatgaggtcaaatacatatcctaactgggatctgtccggccagcagcattcgtctgtgttgtcatcaacagcgatgactagcggttcactgaacactacaccggcagatcgttttgtgagaatgccggtatctgaaaccaccagagcctcttacgttcaaacatcaatgccgtccatgcagttttctccggtatccacaggtcaacagccaccgctgatccaaatgccgtatatctgcgttccaaatacaccaggtcctgcacagatgtcagctccatcaacaattatagaaaatgctggaggctgcataaatcgcggtgctccgagattggcgcatagagtcgactctagtgcagttaataagaaacgcgctcgagtatcaaataatactggttctggaattaaacgacagtgtattaaaggaggtcttcgccatgagaccgcgagtctagttgactcgcttgggttgtagagtttcggaccaacatttaatataaggtactaaagctgattgaagaattaactcttacgtgatgcacatttctacctctccatgtatttaaccatagttaagatgtctttttaccaacagggctatagctggtatgtcgttttcgccgtctatagtggtaatccgtgcccttggtgaagatcgggtcttacaatagtcaagagcatgaccg

SEQ ID NO: 33822 - DNA, 390 bp, Muscodor strobelii
  misc_feature: SGI cDNA ID NO. 571674
  misc_feature: Encodes the peptide sequence at SEQ ID NO 33823
atgtcaaacctacgcgggccgtacacgccagatggcaacgaagacaccaacacggaaaagccacagccacagcgagacgcacaggagcttgcagccggagctgtacacgctccatttcatgcaatgctcgataccctccggaatgtggtgcaagttatacgggacgtccagggtcgaatcgcagaacttgaagagggtctcaacaaagtacaatatcaaatcggaaatagtcaaggccaataccggaaatctgagggttttgacgccgataattctggtgaagtttcattctcttcctgtgagtcgagtttcaagcgccagggactcggcgctgacagcgatagcgccttccacggagcagctggcacggcccccgagcagccatcatag

SEQ ID NO: 33823 - protein, 129 aa, Muscodor strobelii
  misc_feature: SGI Peptide ID NO. 571674
MSNLRGPYTPDGNEDTNTEKPQPQRDAQELAAGAVHAPFHAMLDTLRNVVQVIRDVQGRIAELEEGLNKVQYQIGNSQGQYRKSEGFDADNSGEVSFSSCESSFKRQGLGADSDSAFHGAAGTAPEQPS

SEQ ID NO: 33824 - DNA, 2594 bp, Muscodor strobelii; identical to SEQ ID NO: 33821
  misc_feature: SGI EST ID NO. CUFF.80080.0
  misc_feature: Variant of the nucleotide sequence at SEQ ID NO 33822

SEQ ID NO: 33825 - DNA, 1155 bp, Muscodor strobelii
  misc_feature: SGI cDNA ID NO. 571675
  misc_feature: Elevated expression when VOC is produced
  misc_feature: Encodes the peptide sequence at SEQ ID NO 33826
atgacactctcaacgcagccagagtggccatccgatccatcacagaacaaggggcccaatatcctggctgcagtgattacaactaacatactggccttgatcattgtcggccttcgactgtatgttcgtgtcattaagcacggcgtttatggcacagatgatatttttatggcaacggcggttattctgtctaccgcaggtcttggagttgtcatacctgaagtgcagcatggtgctggtcggcacagaggggatgtctcgcccgacgtgtataatttcgggctgaagcttaatttcgtctcacaacctctctacatagccgcgattctcttcgcgaagttggctattggtgcggcattgctgcgaattgctgttactaggttttggcgatggttgatcattggaatctgcgcattcacgactgcatataccattgctggtatcctcactgttgtgctccaatgcaaagacattcgcactttatggaacccagcggtccgccccgaatgcttggatcagagcaaagtggtagctattgcctatctcaactcgacgctaaacatcatcaccgacttcgtatttgccatcgtcatacctgtccctatgctctggaatttgaacgtcaaccgtcgaactcggatctctctgatagcagtcctgtctttgggcgtgtttgcgagtatttctggcatcatcaaagtagtgtacaactctcagtacggacgtttgggagatttgctatgggattctgttccacttaccatatggaacgtgaatgaatgcaatatcggtataattgccggtagcctgccgccactgaggaccctcttcggagacttgcttcgatccaccaatggaacgggtagtgggaagcagtctaggccaaagacaaacttcgtcacagggtcaaagtcagggcaaccttggagcatattaagtgatggtcacgggggacgtcgcccgaaagatgacacaagcagccaacgagagcttaagaagagtaatggggactacgagatggatacctgggagccagggtccacaatcagcaacattgtcatagcggacggcaattcgagtgaggaagcattggaatacagctcaggcagcaaggtaataaagatgaccacgatgacgacgatgacctattcgtaa

SEQ ID NO: 33826 - protein, 384 aa, Muscodor strobelii
  misc_feature: SGI Peptide ID NO. 571675
  misc_feature (7)..(384): NCBI GI: 39975805 Blast Desc: MGG_06171 [Magnaporthe grisea 70-15] gi|145011519|gb|EDJ96175.1| MGG_06171 [Magnaporthe grisea 70-15]
  misc_feature (7)..(379): NCBI GI: 256728707 Blast Desc: NECHADRAFT_105529 [Nectria haematococca mpVI 77-13-4]
  misc_feature (13)..(363): NCBI GI: 189192739 Blast Desc: conserved [Pyrenophora tritici-repentis Pt-1C-BFP] gi|187978272|gb|EDU44898.1| conserved [Pyrenophora tritici-repentis Pt-1C-BFP]
  misc_feature (10)..(340): NCBI GI: 46110214 Blast Desc: FG01989.1 [Gibberella zeae PH-1]
  misc_feature (2)..(296): NCBI GI: 169603119 Blast Desc: SNOG_04566 [Phaeosphaeria nodorum SN15] gi|160706329|gb|EAT88326.2| SNOG_04566 [Phaeosphaeria nodorum SN15]
  misc_feature (1)..(294): NCBI GI: 242798118 Blast Desc: conserved [Talaromyces stipitatus ATCC 10500] gi|218716449|gb|EED15870.1| conserved [Talaromyces stipitatus ATCC 10500]
  misc_feature (1)..(384): NCBI GI: 238498218 Blast Desc: conserved [Aspergillus flavus NRRL3357] gi|220693618|gb|EED49963.1| conserved [Aspergillus flavus NRRL3357]
  misc_feature (13)..(377): NCBI GI: 119185220 Blast Desc: CIMG_07316 [Coccidioides immitis RS]
  misc_feature (13)..(258): NCBI GI: 145606146 Blast Desc: MGG_11887 [Magnaporthe grisea 70-15] gi|145013873|gb|EDJ98514.1| MGG_11887 [Magnaporthe grisea 70-15]
  misc_feature (64)..(377): NCBI GI: 240106580 Blast Desc: integral membrane family protein [Coccidioides posadasii C735 delta SOWgp]
  misc_feature: Useful for introducing or modulating the production of volatile compounds
MTLSTQPEWPSDPSQNKGPNILAAVITTNILALIIVGLRLYVRVIKHGVYGTDDIFMATAVILSTAGLGVVIPEVQHGAGRHRGDVSPDVYNFGLKLNFVSQPLYIAAILFAKLAIGAALLRIAVTRFWRWLIIGICAFTTAYTIAGILTVVLQCKDIRTLWNPAVRPECLDQSKVVAIAYLNSTLNIITDFVFAIVIPVPMLWNLNVNRRTRISLIAVLSLGVFASISGIIKVVYNSQYGRLGDLLWDSVPLTIWNVNECNIGIIAGSLPPLRTLFGDLLRSTNGTGSGKQSRPKTNFVTGSKSGQPWSILSDGHGGRRPKDDTSSQRELKKSNGDYEMDTWEPGSTISNIVIADGNSSEEALEYSSGSKVIKMTTMTTMTYS

SEQ ID NO: 33827 - DNA, 1126 bp, Muscodor strobelii
  misc_feature: SGI EST ID NO. CUFF.79965.0
  misc_feature: Variant of the nucleotide sequence at SEQ ID NO 33825
cttggagttgtcatacctgaagtgcagcatggtgctggtcggcacagaggggatgtctcgcccgacgtgtataatttcgggctgaagcttaatttcgtctcacaacctctctacatagccgcgattctcttcgcgaagttggctattggtgcggcattgctgcgaattgctgttactaggttttggcgatggttgatcattggaatctgcgcattcacgactgcatataccattgctggtatcctcactgttgtgctccaatgcaaagacattcgcactttatggaacccagcggtccgccccgaatgcttggatcagagcaaagtggtagctattgcctatctcaactcgacgctaaacatcatcaccgacttcgtatttgccatcgtcatacctgtccctatgctctggaatttgaacgtcaaccgtcgaactcggatctctctgatagcagtcctgtctttgggcgtgtttgcgagtatttctggcatcatcaaagtagtgtacaactctcagtacggacgtttgggagatttgctatgggattctgttccacttaccatatggaacgtgaatgaatgcaatatcggtataattgccggtagcctgccgccactgaggaccctcttcggagacttgcttcgatccaccaatggaacgggtagtgggaagcagtctaggccaaagacaaacttcgtcacagggtcaaagtcagggcaaccttggagcatattaagtgatggtcacgggggacgtcgcccgaaagatgacacaagcagccaacgagagcttaagaagagtaatggggactacgagatggatacctgggagccagggtccacaatcagcaacattgtcatagcggacggcaattcgagtgaggaagcattggaatacagctcaggcagcaaggtaataaagatgaccacgatgacgacgatgacctattcgtaatggcaggttgggcggatggacttttgacaaaggaagagcaccaggagtgacacgataattaatctattacctgcatttttgtttgactatttggctactagggtacggacggaactgcaggaagccaggaatggaaaaacagcacagcgacagttcatgagattagtagtgc

SEQ ID NO: 33828 - DNA, 1209 bp, Muscodor strobelii
  misc_feature: SGI cDNA ID NO. 571676
  misc_feature: Elevated expression when VOC is produced
  misc_feature: Encodes the peptide sequence at SEQ ID NO 33829
atgcactttcttaaagcgatcctactggctgttcaggcgacggcgtttgctcttggcagcgcggaacattaccggctgcgagccagagctgaagacgcggccagccgtcaagttgacaagctcgcgaacgatgcatatgctcagacccttaagtcattaaagggcgagtcctcatcttcctgtactcaaaagagtctcaggatcaggaaggaatggggctctctcaccgaccgtgagagaaaagactacatcaaggcagtcaagtgtcttcagtcaaagccgcccatcactccccctctcctcgcgccgggtgctaagtcacgctttgatgattttattgttacccattacaatcagactccatttgttcactatactgcaaatttcctcgcatggcatcgctattatatccacctctacgaagaattgctccataatgagtgcggctataatggcaatcaaccttattgggactgggccaaaactgccagaactggcttacatgcttcgcccatctttgatggaagtgatacctcgatgtctggtgatgggaaacatattccaaaccaaggtccggtcgttctggcggggccgatcgatcctcccatcatcttggacgccggcccgggaggcggatgtgtgacgtctggcccctttaagaatttgacagttaatctaggccctgcagctttacaagtagccaacggtggagaagctcagtcggctgtaaatcctcttgactggaacccacgatgcctccgacgctctctaaccgactcggtcaaccagcgccacgccaacagcaccggcgtattgaacacgctagttggtcatgacgatgtctatgacttccaaatgacacttcagggctatcccggtagtgcagagcttggtgttcatggtggtggccattattctcttgggggtgatccaggccgagatgttttcatatctcccggagatccggtcttctatcttcatcatggcatgattgatcgcctgtggtggatctggcagagccaaaaaccctcggagcgtaccaagggccccaaggccttgatcggcaccaatacttttctgaatgaccctccgagtgccaacgctacctatgaggactacgtcaactacggctacgccgttggtccgccccgaaagctgaaggaaattatgagcacaacggctggtcccttttgctacgtctaccaataa

SEQ ID NO: 33829 - protein, 402 aa, Muscodor strobelii
  misc_feature: SGI Peptide ID NO. 571676
  misc_feature (52)..(384): Pfam Id: PF00264 Pfam Desc: Common central domain of tyrosinase
  misc_feature (318)..(339): Pfam Id: PF00264 Pfam Desc: Common central domain of tyrosinase
  misc_feature (1)..(400): NCBI GI: 164423623 Blast Desc: NCU11382 [Neurospora crassa OR74A] gi|157070171|gb|EDO64979.1| conserved [Neurospora crassa OR74A]
  misc_feature (37)..(402): NCBI GI: 145603250 Blast Desc: MGG_06169 [Magnaporthe grisea 70-15] gi|145011520|gb|EDJ96176.1| MGG_06169 [Magnaporthe grisea 70-15]
  misc_feature (7)..(401): NCBI GI: 256728532 Blast Desc: NECHADRAFT_85924 [Nectria haematococca mpVI 77-13-4]
  misc_feature (37)..(401): NCBI GI: 145230067 Blast Desc: An01g09220 [Aspergillus niger] gi|134055457|emb|CAK43972.1| protein product [Aspergillus niger]
  misc_feature (34)..(401): NCBI GI: 189192737 Blast Desc: conserved [Pyrenophora tritici-repentis Pt-1C-BFP] gi|187978271|gb|EDU44897.1| conserved [Pyrenophora tritici-repentis Pt-1C-BFP]
  misc_feature (34)..(401): NCBI GI: 258564688 Blast Desc: conserved [Uncinocarpus reesii 1704] gi|237908596|gb|EEP82997.1| conserved [Uncinocarpus reesii 1704]
  misc_feature (30)..(401): NCBI GI: 46110212 Blast Desc: FG01988.1 [Gibberella zeae PH-1]
  misc_feature (37)..(401): NCBI GI: 169768876 Blast Desc: [Aspergillus oryzae RIB40] gi|238498220|ref|XP_002380345.1| tyrosinase, [Aspergillus flavus NRRL3357] gi|83766766|dbj|BAE56906.1| protein product oryzae]
  misc_feature (4)..(401): NCBI GI: 212532653 Blast Desc: tyrosinase, [Penicillium marneffei ATCC 18224] gi|210071847|gb|EEA25936.1| tyrosinase, [Penicillium marneffei ATCC 18224]
  misc_feature (34)..(401): NCBI GI: 119185216 Blast Desc: CIMG_07314 [Coccidioides immitis RS]
  misc_feature (66)..(343): SWISSPROT Homolog: EC 1.14.18.1 Monophenol monooxygenase
  misc_feature: Useful for introducing or modulating the production of volatile compounds
MHFLKAILLAVQATAFALGSAEHYRLRARAEDAASRQVDKLANDAYAQTLKSLKGESSSSCTQKSLRIRKEWGSLTDRERKDYIKAVKCLQSKPPITPPLLAPGAKSRFDDFIVTHYNQTPFVHYTANFLAWHRYYIHLYEELLHNECGYNGNQPYWDWAKTARTGLHASPIFDGSDTSMSGDGKHIPNQGPVVLAGPIDPPIILDAGPGGGCVTSGPFKNLTVNLGPAALQVANGGEAQSAVNPLDWNPRCLRRSLTDSVNQRHANSTGVLNTLVGHDDVYDFQMTLQGYPGSAELGVHGGGHYSLGGDPGRDVFISPGDPVFYLHHGMIDRLWWIWQSQKPSERTKGPKALIGTNTFLNDPPSANATYEDYVNYGYAVGPPRKLKEIMSTTAGPFCYVYQ

SEQ ID NO: 33830 - DNA, 1586 bp, Muscodor strobelii
  misc_feature: SGI EST ID NO. CUFF.80007.0
  misc_feature: Variant of the nucleotide sequence at SEQ ID NO 33828
ctggtctcttgcatactcctagctccgattcttcttcctccttttacaaagggcttcgtcttccttaagttacaattagaggcgatcggcgtccctattgagtattacgtgattcttcccacgttttctcgcaagggactctttcatcacaaacacaatgcactttcttaaagcgatcctactggctgttcaggcgacggcgtttgctcttggcagcgcggaacattaccggctgcgagccagagctgaagacgcggccagccgtcaagttgacaagctcgcgaacgatgcatatgctcagacccttaagtcattaaagggcgagtcctcatcttcctgtactcaaaagagtctcaggatcaggaaggaatggggctctctcaccgaccgtgagagaaaagactacatcaaggcagtcaagtgtcttcagtcaaagccgcccatcactccccctctcctcgcgccgggtgctaagtcacgctttgatgattttattgttacccattacaatcagactccatttgttcactatactgcaaatttcctcgcatggcatcgctattatatccacctctacgaagaattgctccataatgagtgcggctataatggcaatcaaccttattgggactgggccaaaactgccagaactggcttacatgcttcgcccatctttgatggaagtgatacctcgatgtctggtgatgggaaacatattccaaaccaaggtccggtcgttctggcggggccgatcgatcctcccatcatcttggacgccggcccgggaggcggatgtgtgacgtctggcccctttaagaatttgacagttaatctaggccctgcagctttacaagtagccaacggtggagaagctcagtcggctgtaaatcctcttgactggaacccacgatgcctccgacgctctctaaccgactcggtcaaccagcgccacgccaacagcaccggcgtattgaacacgctagttggtcatgacgatgtctatgacttccaaatgacacttcagggctatcccggtagtgcagagcttggtgttcatggtggtggccattattctcttgggggtgatccaggccgagatgttttcatatctcccggagatccggtcttctatcttcatcatggcatgattgatcgcctgtggtggatctggcagagccaaaaaccctcggagcgtaccaagggccccaaggccttgatcggcaccaatacttttctgaatgaccctccgagtgccaacgctacctatgaggactacgtcaactacggctacgccgttggtccgccccgaaagctgaaggaaattatgagcacaacggctggtcccttttgctacgtctaccaataaggaacttcatgtagatctgcgcatataacagctgcggtgtggcgctgacttcataatgatggacgacacatagatgtagtttcgtataatgttgttacgaggaaatgatactttactattgcttacagttggtagatcgcattgctgtaaacaaagcatacgattttagactatttttgcatttgacgctagtatatcataatattcgacttgtggcatt

SEQ ID NO: 33831 - DNA, 798 bp, Muscodor strobelii
  misc_feature: SGI cDNA ID NO. 571677
  misc_feature: Encodes the peptide sequence at SEQ ID NO 33832
atggctgtcaagattctaaacctatcggatgtgccaaaggacaaacagaaggtcttatgcgcaactgccaagaaggaggtcgagaagatgttaaccatcaatcataaacatatcgttgagtatatcgcgttggaaggctgggacgaaggcaacgggaaaatattcatgggcttgaaagagggaagcttgcaatcgctttgcttgcgtaccaagaaacaggacttgcgaggcgtgtctgtgagagtcttgtggcatatgcttcaagcgctcgactttcttcagtcggagaatttgattcatcgagatatcaagccggaaaatatcctttatgtcacacaggcgggtaattacaacttccaactgggcgactttggtctcgcttatttcgaaatggatccctcgaaaagcgttgtgggaacaccaatctatatggcacctgaggtctggcgccgagaagaccaaacgcacaaggttgacgtatggtcactgtacgttaccattctgtggacactggacttacagaactttcgtgaagtttcgcgtaacgctcagttgccagacgttcgttacacgagacctggatattccgacgctgtgcaagagcttatccgttcaattgctcaggcagaggactatgtcgtggagctacgaccgatggccgaagaggaccctgaaaagcgcgcatctgcagcgcaaatgctcaaagacctctccgagctcttcaaaggattcgactgcttctacgtcgagaactccaatgccaacaagtccgagtcctctgcaaataagaaagaatag

SEQ ID NO: 33832 - protein, 265 aa, Muscodor strobelii
  misc_feature: SGI Peptide ID NO. 571677
  misc_feature (81)..(163): Pfam Id: PF00069 Pfam Desc: Protein kinase domain
  misc_feature (1)..(234): NCBI GI: 240275875 Blast Desc: CAMK kinase [Ajellomyces capsulatus H143]
  misc_feature (24)..(234): NCBI GI: 255940176 Blast Desc: Pc16g05100 [Penicillium chrysogenum Wisconsin 54-1255] gi|211585480|emb|CAP93180.1| Pc16g05100 [Penicillium chrysogenum Wisconsin 54-1255]
  misc_feature (1)..(234): NCBI GI: 225563286 Blast Desc: conserved [Ajellomyces capsulatus G186AR]
  misc_feature (1)..(237): NCBI GI: 256724900 Blast Desc: NECHADRAFT_77064 [Nectria haematococca mpVI 77-13-4]
  misc_feature (1)..(237): NCBI GI: 258569955 Blast Desc: [Uncinocarpus reesii 1704] gi|237904051|gb|EEP78452.1| [Uncinocarpus reesii 1704]
  misc_feature (1)..(234): NCBI GI: 258567308 Blast Desc: [Uncinocarpus reesii 1704] gi|237905844|gb|EEP80245.1| [Uncinocarpus reesii 1704]
  misc_feature (24)..(243): NCBI GI: 258572892 Blast Desc: [Uncinocarpus reesii 1704] gi|237905478|gb|EEP79879.1| [Uncinocarpus reesii 1704]
  misc_feature (77)..(234): NCBI GI: 154281833 Blast Desc: [Ajellomyces capsulatus NAm1] gi|150411908|gb|EDN07296.1| [Ajellomyces capsulatus NAm1]
  misc_feature (23)..(234): NCBI GI: 116205491 Blast Desc: CHGG_10629 [Chaetomium globosum CBS 148.51] gi|88176757|gb|EAQ84225.1| CHGG_10629 [Chaetomium globosum CBS 148.51]
  misc_feature (28)..(234): NCBI GI: 225557999 Blast Desc: serine/threonine-protein kinase ppk11 [Ajellomyces capsulatus G186AR]
  misc_feature (22)..(235): SWISSPROT Homolog: EC 2.7.11.1 Non-specific serine/threonine protein kinase
MAVKILNLSDVPKDKQKVLCATAKKEVEKMLTINHKHIVEYIALEGWDEGNGKIFMGLKEGSLQSLCLRTKKQDLRGVSVRVLWHMLQALDFLQSENLIHRDIKPENILYVTQAGNYNFQLGDFGLAYFEMDPSKSVVGTPIYMAPEVWRREDQTHKVDVWSLYVTILWTLDLQNFREVSRNAQLPDVRYTRPGYSDAVQELIRSIAQAEDYVVELRPMAEEDPEKRASAAQMLKDLSELFKGFDCFYVENSNANKSESSANKKE

SEQ ID NO: 33833 - DNA, 198 bp, Muscodor strobelii
  misc_feature: SGI EST ID NO. CUFF.79996.0
  misc_feature: Variant of the nucleotide sequence at SEQ ID NO 33831
caagattctaaacctatcggatgtgccaaaggacaaacagaaggtcttatgcgcaactgccaagaaggaggtcgagaagatgttaaccatcaatcataaacatatcgttgagtatatcgcgttggaaggctgggacgaaggcaacgggaaaatattcatgggcttgaaagagggaagcttgcaatcgctttgcttgcg

SEQ ID NO: 33834 - DNA, 1782 bp, Muscodor strobelii
  misc_feature: SGI cDNA ID NO. 571678
  misc_feature: Encodes the peptide sequence at SEQ ID NO 33835
atggcagcacatctggggacaaacactccaccatgcatggattctagcgacgcctactgtaatcttgagaatgtctgcccctcacaaccagatatcaagtcgcactcgaagaggccagcggatactattgcaaccgcacttgagttgaaaaagccccgaacagatagccccattgattccggctatagttcccagtctacaacaccaaaccacaaatccgtgcgcgattccccggtcatcagggaacgacctatcccttttggcctgtcgacgaagaagcagctgaaattgtttgacaaagttatagacccagctgtctcagaccaattcaaggtggtacagcctcacttcaacaggcttctcttagagcatgttcaagcacgccagaaggcagggtcgcgctataagcctatggccaccagactcatgattctaggccactctcaggaagatgcgcgaccacacattgccgttttctgccatccagagcagcaaaagcttatacaggagttcgtgaaaatggacatcattcatgatatctgtaggtcagaggatctttctataccatctttcgagatcaccatcttcggcagtgccccgagacttcgaacgtcttctccaaagtataaaggactgtatgataagccagagattgctgcgagtgaatcaatcactgtaatggcagatgccgtgcacatcaagactcatgccgggctctttggtctttgcggtactccagtttgttttacgcatccaaatggccaccaaggaaaggccactttgggcggaattatcaaagtgacaaaccatatcggagagatcagtctctttgggctaacagcggggcacgcaattgatgagattacttctcgcaacaatgagcaggatccattcggaagtcatgctcttgacgcactgcctgaagcgattgcattcgacagggcacaaaaaagtagtcaagagctcgctatggtggtcgaagaagacaatgcttggcagtttcgagacccctttgcccttggcaaggtcatctatccgagaagtgaggacgacattcctcaaaacaagacacagtgctacgactgggcgctgttcgagacctcactctacgatatcaactgcgtgcctgcggataagagaaggacactcagcgtgtcccaaaaaaagcctgggtcgacacggaataggtctgtgttcattatcagtggctctttcggttgtgaaaaaggccgcctgttggccgatgctgtccaaatcgtgatcggaagcggggaggagtttgtcgatgctttcatgataacactatgtggagaatctgacaatgagattcgagacggcgactccggctcctggattgtcgatgcagattccttcgagatatacggtcaactagttgcctcggatatcttcggcggcggatatgtaatgccgatggcccagatattccatgatatcaagacggaactcggtgctcagaccgtcgaactacccagtatcattgatgtcatccacgcgagaacagtacaaaacggagctgatctcccacttaatgttctaccagatatccggattgcgacaaacgacgggttaagaggccaggtgccccaaggattgccgtatttagcactcaagaactatggcgagtcgtccaatgagccatttggggccccaaacgatgcatttgctcttttggatccttctacacccccttcaggggactcgggatacatttcgtatagatctagtccagcaaaacgcccaaacccgtttcttgacgctaag

SEQ ID NO: 33835 - protein, 594 aa, Muscodor strobelii
  misc_feature: SGI Peptide ID NO. 571678
  misc_feature (59)..(520): NCBI GI: 256730405 Blast Desc: NECHADRAFT_82867 [Nectria haematococca mpVI 77-13-4]
  misc_feature (40)..(503): NCBI GI: 171682606 Blast Desc: protein product [Podospora anserina] gi|170941262|emb|CAP66912.1| protein product [Podospora anserina]
  misc_feature (88)..(501): NCBI GI: 169612091 Blast Desc: SNOG_09162 [Phaeosphaeria nodorum SN15] gi|160702436|gb|EAT83354.2| SNOG_09162 [Phaeosphaeria nodorum SN15]
  misc_feature (58)..(301): NCBI GI: 116208410 Blast Desc: [Chaetomium globosum CBS 148.51] gi|88184095|gb|EAQ91563.1| [Chaetomium globosum CBS 148.51]
  misc_feature (40)..(494): NCBI GI: 154313213 Blast Desc: [Botryotinia fuckeliana B05.10] gi|150849693|gb|EDN24886.1| [Botryotinia fuckeliana B05.10]
  misc_feature (242)..(498): NCBI GI: 119474241 Blast Desc: NFIA_004570 [Neosartorya fischeri NRRL 181] gi|119407149|gb|EAW17099.1| NFIA_004570 [Neosartorya fischeri NRRL 181]
  misc_feature (426)..(505): NCBI GI: 116208410 Blast Desc: [Chaetomium globosum CBS 148.51] gi|88184095|gb|EAQ91563.1| [Chaetomium globosum CBS 148.51]
  misc_feature (393)..(512): NCBI GI: 154315467 Blast Desc: [Botryotinia fuckeliana B05.10] gi|150847246|gb|EDN22439.1| [Botryotinia fuckeliana B05.10]
  misc_feature (60)..(428): NCBI GI: 46138077 Blast Desc: FG10553.1 [Gibberella zeae PH-1]
  misc_feature (336)..(511): NCBI GI: 261354204 Blast Desc: conserved [Verticillium albo-atrum VaMs.102]
MAAHLGTNTPPCMDSSDAYCNLENVCPSQPDIKSHSKRPADTIATALELKKPRTDSPIDSGYSSQSTTPNHKSVRDSPVIRERPIPFGLSTKKQLKLFDKVIDPAVSDQFKVVQPHFNRLLLEHVQARQKAGSRYKPMATRLMILGHSQEDARPHIAVFCHPEQQKLIQEFVKMDIIHDICRSEDLSIPSFEITIFGSAPRLRTSSPKYKGLYDKPEIAASESITVMADAVHIKTHAGLFGLCGTPVCFTHPNGHQGKATLGGIIKVTNHIGEISLFGLTAGHAIDEITSRNNEQDPFGSHALDALPEAIAFDRAQKSSQELAMVVEEDNAWQFRDPFALGKVIYPRSEDDIPQNKTQCYDWALFETSLYDINCVPADKRRTLSVSQKKPGSTRNRSVFIISGSFGCEKGRLLADAVQIVIGSGEEFVDAFMITLCGESDNEIRDGDSGSWIVDADSFEIYGQLVASDIFGGGYVMPMAQIFHDIKTELGAQTVELPSIIDVIHARTVQNGADLPLNVLPDIRIATNDGLRGQVPQGLPYLALKNYGESSNEPFGAPNDAFALLDPSTPPSGDSGYISYRSSPAKRPNPFLDAK

SEQ ID NO: 33836 - DNA, 1953 bp, Muscodor strobelii
  misc_feature: SGI EST ID NO. CUFF.80002.0
  misc_feature: Variant of the nucleotide sequence at SEQ ID NO 33834
cttcctgatgttcgacgacaagtaattgaatctaatttttctaaatactatcaacctcgttgtcttgagacgcgcgctattcttctacgcactcttcggtgaataaagactatctacttattgctctatgggcaacgctaccttcaaggctactctgcttcgctagtagacatggcagcacatctggggacaaacactccaccatgcatggattctagcgacgcctactgtaatcttgagaatgtctgcccctcacaaccagatatcaagtcgcactcgaagaggccagcggatactattgcaaccgcacttgagttgaaaaagccccgaacagatagccccattgattccggctatagttcccagtctacaacaccaaaccacaaatccgtgcgcgattccccggtcatcagggaacgacctatcccttttggcctgtcgacgaagaagcagctgaaattgtttgacaaagttatagacccagctgtctcagaccaattcaaggtggtacagcctcacttcaacaggcttctcttagagcatgttcaagcacgccagaaggcagggtcgcgctataagcctatggccaccagactcatgattctaggccactctcaggaagatgcgcgaccacacattgccgttttctgccatccagagcagcaaaagcttatacaggagttcgtgaaaatggacatcattcatgatatctgtaggtcagaggatctttctataccatctttcgagatcaccatcttcggcagtgccccgagacttcgaacgtcttctccaaagtataaaggactgtatgataagccagagattgctgcgagtgaatcaatcactgtaatggcagatgccgtgcacatcaagactcatgccgggctctttggtctttgcggtactccagtttgttttacgcatccaaatggccaccaaggaaaggccactttgggcggaattatcaaagtgacaaaccatatcggagagatcagtctctttgggctaacagcggggcacgcaattgatgagattacttctcgcaacaatgagcaggatccattcggaagtcatgctcttgacgcactgcctgaagcgattgcattcgacagggcacaaaaaagtagtcaagagctcgctatggtggtcgaagaagacaatgcttggcagtttcgagacccctttgcccttggcaaggtcatctatccgagaagtgaggacgacattcctcaaaacaagacacagtgctacgactgggcgctgttcgagacctcactctacgatatcaactgcgtgcctgcggataagagaaggacactcagcgtgtcccaaaaaaagcctgggtcgacacggaataggtctgtgttcattatcagtggctctttcggttgtgaaaaaggccgcctgttggccgatgctgtccaaatcgtgatcggaagcggggaggagtttgtcgatgctttcatgataacactatgtggagaatctgacaatgagattcgagacggcgactccggctcctggattgtcgatgcagattccttcgagatatacggtcaactagttgcctcggatatcttcggcggcggatatgtaatgccgatggcccagatattccatgatatcaagacggaactcggtgctcagaccgtcgaactacccagtatcattgatgtcatccacgcgagaacagtacaaaacggagctgatctcccacttaatgttctaccagatatccggattgcgacaaacgacgggttaagaggccaggtgccccaaggattgccgtatttagcactcaagaactatggcgagtcgtccaatgagccatttggggccccaaacgatgcatttgctcttttggatccttctacacccccttcaggggactcgggatacatttcgtatagatctagtccagcaaaacgcccaaacccgtttcttgacgctaag

SEQ ID NO: 33837 - DNA, 792 bp, Muscodor strobelii
  misc_feature: SGI cDNA ID NO. 571679
  misc_feature: Elevated expression when VOC is produced
  misc_feature: Encodes the peptide sequence at SEQ ID NO 33838
atgctccagtgctccgccgaggacgagggagatagactgctagaagttggccgccaattccaggtctggagggcagataaatcattcaaagagtttgtcgcctcagcagttcgcgttcgtgaacagccagttttagaccccgattatgatacggaggcagggtccaagtaccatctgggcgctgtaacagcaaaacgactcatcaaagtcgctaatctgaggattgttcccacggacgacctgcatgagcacctatctctagacgaaaaagctgggaccgtgtcagtatatcactacacaagtgttttgaaggagcacctccggaaagccaaacagcagtccactgcatcggactctaattcgctgccgacttttgacgagaacttgcccctacaattagtcgttgagacgctgaactcgcttcacctagttctatttccaatggatcgagaatcacagagaatcctacgcagactcgtctcgaaaggcaacttcgatccgaacatatgccgtgtggactattcgacaagtcttccaaacggacagaaccctgaaggctaccagtactggggctctagactcatggatttatatgatgaactagagaatccaaccccaagaggacttttcgagaaatgggtacagcgcaagagtggctcgcgatacatgatgatggcaacacttgcgggcgttctgttcgctgtggtcctaggaatcttggggcttgctctaagcatctttcaagcctgggtcgcatggcagcaattaaaacaaggagccaacaatacctga

SEQ ID NO: 33838 - protein, 263 aa, Muscodor strobelii
  misc_feature: SGI Peptide ID NO. 571679
  misc_feature (22)..(247): NCBI GI: 116208408 Blast Desc: CHGG_03497 [Chaetomium globosum CBS 148.51] gi|88184094|gb|EAQ91562.1| CHGG_03497 [Chaetomium globosum CBS 148.51]
  misc_feature (61)..(254): NCBI GI: 171682608 Blast Desc: protein product [Podospora anserina] gi|170941263|emb|CAP66913.1| protein product [Podospora anserina]
  misc_feature (1)..(254): NCBI GI: 256725458 Blast Desc: NECHADRAFT_83107 [Nectria haematococca mpVI 77-13-4]
  misc_feature (23)..(257): NCBI GI: 171682624 Blast Desc: protein product [Podospora anserina] gi|170941271|emb|CAP66921.1| protein product [Podospora anserina]
  misc_feature (56)..(221): NCBI GI: 169612093 Blast Desc: SNOG_09163 [Phaeosphaeria nodorum SN15] gi|111062235|gb|EAT83355.1| SNOG_09163 [Phaeosphaeria nodorum SN15]
  misc_feature (23)..(176): NCBI GI: 46109592 Blast Desc: FG01678.1 [Gibberella zeae PH-1]
  misc_feature (1)..(148): NCBI GI: 154313215 Blast Desc: BC1G_05609 [Botryotinia fuckeliana B05.10] gi|150849694|gb|EDN24887.1| BC1G_05609 [Botryotinia fuckeliana B05.10]
  misc_feature (1)..(111): NCBI GI: 46138075 Blast Desc: FG10552.1 [Gibberella zeae PH-1]
  misc_feature (17)..(250): NCBI GI: 238508650 Blast Desc: conserved [Aspergillus flavus NRRL3357] gi|220688404|gb|EED44757.1| conserved [Aspergillus flavus NRRL3357]
  misc_feature (69)..(263): NCBI GI: 169601684 Blast Desc: SNOG_03713 [Phaeosphaeria nodorum SN15] gi|160705991|gb|EAT88918.2| SNOG_03713 [Phaeosphaeria nodorum SN15]
  misc_feature: Useful for introducing or modulating the production of volatile compounds
MLQCSAEDEGDRLLEVGRQFQVWRADKSFKEFVASAVRVREQPVLDPDYDTEAGSKYHLGAVTAKRLIKVANLRIVPTDDLHEHLSLDEKAGTVSVYHYTSVLKEHLRKAKQQSTASDSNSLPTFDENLPLQLVVETLNSLHLVLFPMDRESQRILRRLVSKGNFDPNICRVDYSTSLPNGQNPEGYQYWGSRLMDLYDELENPTPRGLFEKWVQRKSGSRYMMMATLAGVLFAVVLGILGLALSIFQAWVAWQQLKQGANNT

SEQ ID NO: 33839 - DNA, 3905 bp, Muscodor strobelii
  misc_feature: SGI EST ID NO. CUFF.80010.0
  misc_feature: Variant of the nucleotide sequence at SEQ ID NO 33837
aagctgcccaagctgagaatctacctaccttagtttgagggtggcttttcagctcgcatgacgcggccacacagcgattggccggacctatcagcgaaccacacaatacatatcacagccccatttgaaacacagcctaccttggcaatgaaagtagataatccgtacatggctttcaatccaggaagtaggctcccattgcatggatcgtcgaagctgggttttctctctttcggcctacccacaccttcaagttcatgcttaacttcatgccatctgcatcattgcacgtgctattaacgctatactcaagaccgacggatgagcgaaaaggtcaaataatgctgcgagaagcacggcacgatctactggagtctactaaactgcaaacgtcaaaatataaagccgcacctcgatgtttctatttaaattctgcatgccaccacccattggaactgcgtcgctgcaccaagtcatattcactagctaagctttcaagccagtcagagtgtacgaaattgaagagggtaaaccgacaccatgtcaagcgcagaggatcttgtctatccactagcgcgggtctcgcgtgaagatttggcgggtgtatgtgaagctctatgggattggagaccttgtgatgattgggtttccgacacacgctgccggcgagtatcacggtcagaaagatgcaattgttatagagctaggaatctagcgctattttttgactattacaccaatttgacggcaatgtatgtccccgaattcacaagtggttcacgtccggccctaaagagtcatcgcgatcttatcgccatcatcaaatacatcaaatgcaacacagcccggccaagaatcgagctttctcagagatacttcaaaagctgccttccagacagcttagaggaaatcccaaagagtgaccaggatcgagcgtttagtttggcagctacagtcatcacgatgctccagtgctccgccgaggacgagggagatagactgctagaagttggccgccaattccaggtctggagggcagataaatcattcaaagagtttgtcgcctcagcagttcgcgttcgtgaacagccagttttagaccccgattatgatacggaggcagggtccaagtaccatctgggcgctgtaacagcaaaacgactcatcaaagtcgctaatctgaggattgttcccacggacgacctgcatgagcacctatctctagacgaaaaagctgggaccgtgtcagtatatcactacacaagtgttttgaaggagcacctccggaaagccaaacagcagtccactgcatcggactctaattcgctgccgacttttgacgagaacttgcccctacaattagtcgttgagacgctgaactcgcttcacctagttctatttccaatggatcgagaatcacagagaatcctacgcagactcgtctcgaaaggcaacttcgatccgaacatatgccgtgtggactattcgacaagtcttccaaacggacagaaccctgaaggctaccagtactggggctctagactcatggatttatatgatgaactagagaatccaaccccaagaggacttttcgagaaatgggtacagcgcaagagtggctcgcgatacatgatgatggcaacacttgcgggcgttctgttcgctgtggtcctaggaatcttggggcttgctctaagcatctttcaagcctgggtcgcatggcagcaattaaaacaaggagccaacaatacctgaaccggaaggtacaccggcttcagggtgaaacaagtataatggcagatgactaccagttgcgaattttggggtacaggggctagttaaaacctctcattctgatcgagcaagcataattgcataagaggtagcatcagggcttatgattcatgacatatctagaaggaatctggaccgacaatcaacttcattagtaacgagagagccagggatattaaggatgtcaagcactgtgacgacaggcgatacaccttccagcttgcgagctactaatgctatgcaataatcgcaggacaagaaagcaagcagtttatattcagtgctgaggagcgttgattagagtatcaagttagttcctacccttgtcggtatcccgagtcgacggcagcatgtagccttgctcaaccaattcctcaatggcatgcacgatccaacgtcaacaccctaacagcctgagcctacgaggaggttccgttcgtaccgacttaaagacgcttacaagacatatggaaaatagtcatttgttgaccgagatgcctaccgtctgatcattcgccttattaagattctgcttgggcattgggactggtaagatcaactccttggatgaatctcaggcagccgtcacttcgctatgttattcctacatcagccgtaaatgcggcactacctctttggagcgattcggtgacatggcgcttcattttggcatcgccctccgtccgcaacttgcaaagaccacattttgacgagacagcggcgattcggcaactcacacttgcggcgagtgcggttgcgtctacaggagccacaactcccaccgcagccacaagcgacagaagcatggccattgtgtgcctgagacccaacaagaccgctaagactgccaacaagactgccaacaagaagcgcacagccgcagccgtggacttatacttcgaagacgcttaggacaacgaggactactctgacaccgagttggaagggttctcgaacgatggtgatgaggagccaggtactggtggcgacggccaaatcgcgagtgctcaggcagttcaggttgtctcaatatacctcgctgaggagccggcgacgaagtgaagttgatagtgtcgctgacgcacgggcacgtgaaactgagcagggtttaacactcttttacagttttgagatggggatctaatgggcgacgaagtagcgtatggcaaagtggcagtcggcaacgtaatagaggcggtctgcgcaacagtacgtggcctagaccatgcgggagaacatcatcgccaaagggaacggcaacagacttcttagtactgcgaggcatatcgaaagacggtatgatcgtcaaggcgagaaagtgtgatgcttggtgcagactcccaatcaatgggcagaggagttcctattctcagctccaagcacaaaatttcagaatcgtcgtgttcgccggtggccgagtcatcgcgttgctagtaaccgataggttatggacactaggatacaatctatacttctatccttgttttgctgggctatcgacgttttatttacctctctaactctaaaaccaagcattagtgtcaatactctaacctatattaaaaaaccctttcgtcctatttataatttcttatatttactacattgcagccgcagaagcagaccaccggcttaaaatacagtgggtatagtagctgtagctttaaaaggtataacgccaggtataacactaggtataattgtttctatccttacagttaacattggtaatgtgtgggtaacgactataggcagatttttagaagacgatcctcgctttaacataaacatacgaaactctgaagtcaattatagactaaagagacttgctgagatatactaagattatttctcctggtgcgcagaaaactactcgcaatgggataagccaatcgtgggatgattgccctcaaggcacctcagtccttctcccagacccttaataccagggcaagataccagggcaagggccgggggggcatatctcggacttggcacgctagactcgtttctgaccttgtttggaccaccattgcttatccctcttccactctcaggctgtctatggctttcaacaacgtagacctgtatagagcatcattgtgctttgc

SEQ ID NO: 33840 - DNA, 978 bp, Muscodor strobelii
  misc_feature: SGI cDNA ID NO. 571680
  misc_feature: Reduced expression when VOC is produced
  misc_feature: Encodes the peptide sequence at SEQ ID NO 33841
atgggctggtggaacaatctctgggcctccaacacgactgccgacgaccccctccgaaagctggacccgaagctccgcgaattcctcgagaaagaatcccccatcaaatacagcaaacaaaccgccaaagacaacacatcaccatcacaatcctccgcaactcaaccctcttcaaaaccccagactccgccctcagcgataccctctccacctactaccgaaaccacagagtccacagtaccgcgagaatcacaattccaagatgggcgctacgcacacctatggaaatcctacaaacccctcgcacagatcgaagccgagacgaaatccgaccacgagaaactcatggacgttctcgaaggcttcaaagagcggaaagcccagatcgggaaagctgcgcttgagaactgcgcgctagagcaggttgattggagggattgcatgaataatcccagttttaccgacaggatgaccatgtgtagagaccaggtcaagaagtttgagaagtgctatatgacgcagactagacttctaaaagccctaggctacctctcaaccctcgaccgctccgccgccgtcgaagaagagatccaaatgcacgccgacaccctctaccaccagatgctgcaccaagaatcccagatcgcccaagcgcgagccgagggccgtcccataccggacttcaaacccgttgtcgcacgtcccatggtgcccaccaccgtccctgcttccgacctgaaccccgagcaacaagaagctctggcgaaacggctggagaaagtgcaggatgaggataaggtcgcggaagaagaggcgtttaaggctgagcttagggctaaggcagaagttgcgaatagagtccagaatctgtggaaggagcaggagagggaaagacagatgaggaaggagagaggggaggagacttggtgggataaagcggccggggcttttggggggagtaaggatgggaagaagtga

SEQ ID NO: 33841 - protein, 325 aa, Muscodor strobelii
  misc_feature: SGI Peptide ID NO. 571680
  misc_feature (1)..(320): NCBI GI: 39943198 Blast Desc: MGG_03679 [Magnaporthe grisea 70-15] gi|145009726|gb|EDJ94382.1| MGG_03679 [Magnaporthe grisea 70-15]
  misc_feature (1)..(319): NCBI GI: 156057649 Blast Desc: SS1G_04556 [Sclerotinia sclerotiorum 1980] gi|154702341|gb|EDO02080.1| SS1G_04556 [Sclerotinia sclerotiorum 1980]
  misc_feature (1)..(318): NCBI GI: 85117722 Blast Desc: NCU03211 [Neurospora crassa OR74A] gi|28927118|gb|EAA36075.1| conserved [Neurospora crassa OR74A]
  misc_feature (1)..(319): NCBI GI: 154308458 Blast Desc: BC1G_08289 [Botryotinia fuckeliana B05.10] gi|150852830|gb|EDN28022.1| BC1G_08289 [Botryotinia fuckeliana B05.10]
  misc_feature (1)..(325): NCBI GI: 116181562 Blast Desc: CHGG_01409 [Chaetomium globosum CBS 148.51] gi|88185706|gb|EAQ93174.1| CHGG_01409 [Chaetomium globosum CBS 148.51]
  misc_feature (1)..(320): NCBI GI: 256734749 Blast Desc: [Nectria haematococca mpVI 77-13-4]
  misc_feature (1)..(320): NCBI GI: 46107574 Blast Desc: FG00670.1 [Gibberella zeae PH-1]
  misc_feature (1)..(224): NCBI GI: 261355271 Blast Desc: conserved [Verticillium albo-atrum VaMs.102]
  misc_feature (1)..(318): NCBI GI: 189212334 Blast Desc: conserved [Pyrenophora tritici-repentis Pt-1C-BFP] gi|187980723|gb|EDU47349.1| conserved [Pyrenophora tritici-repentis Pt-1C-BFP]
  misc_feature (1)..(315): NCBI GI: 242800415 Blast Desc: conserved [Talaromyces stipitatus ATCC 10500] gi|218716928|gb|EED16349.1| conserved [Talaromyces stipitatus ATCC 10500]
  misc_feature: Useful for introducing or modulating the production of volatile compounds
MGWWNNLWASNTTADDPLRKLDPKLREFLEKESPIKYSKQTAKDNTSPSQSSATQPSSKPQTPPSAIPSPPTTETTESTVPRESQFQDGRYAHLWKSYKPLAQIEAETKSDHEKLMDVLEGFKERKAQIGKAALENCALEQVDWRDCMNNPSFTDRMTMCRDQVKKFEKCYMTQTRLLKALGYLSTLDRSAAVEEEIQMHADTLYHQMLHQESQIAQARAEGRPIPDFKPVVARPMVPTTVPASDLNPEQQEALAKRLEKVQDEDKVAEEEAFKAELRAKAEVANRVQNLWKEQERERQMRKERGEETWWDKAAGAFGGSKDGKK

SEQ ID NO: 33842 - DNA, 1417 bp, Muscodor strobelii
  misc_feature: SGI EST ID NO. CUFF.80017.0
  misc_feature: Variant of the nucleotide sequence at SEQ ID NO 33840
ttcgcgacatactcaaattgtcccaggtccattatcgataagcgtcaagctactggctttctaaagtcgccagccaattccaaccaagattattgccaacaacgaaaacgatggaatcagcgcgaaaaagctagctcaagccgagcgtgtccaattgatagaatctcacgatgggctggtggaacaatctctgggcctccaacacgactgccgacgaccccctccgaaagctggacccgaagctccgcgaattcctcgagaaagaatcccccatcaaatacagcaaacaaaccgccaaagacaacacatcaccatcacaatcctccgcaactcaaccctcttcaaaaccccagactccgccctcagcgataccctctccacctactaccgaaaccacagagtccacagtaccgcgagaatcacaattccaagatgggcgctacgcacacctatggaaatcctacaaacccctcgcacagatcgaagccgagacgaaatccgaccacgagaaactcatggacgttctcgaaggcttcaaagagcggaaagcccagatcgggaaagctgcgcttgagaactgcgcgctagagcaggttgattggagggattgcatgaataatcccagttttaccgacaggatgaccatgtgtagagaccaggtcaagaagtttgagaagtgctatatgacgcagactagacttctaaaagccctaggctacctctcaaccctcgaccgctccgccgccgtcgaagaagagatccaaatgcacgccgacaccctctaccaccagatgctgcaccaagaatcccagatcgcccaagcgcgagccgagggccgtcccataccggacttcaaacccgttgtcgcacgtcccatggtgcccaccaccgtccctgcttccgacctgaaccccgagcaacaagaagctctggcgaaacggctggagaaagtgcaggatgaggataaggtcgcggaagaagaggcgtttaaggctgagcttagggctaaggcagaagttgcgaatagagtccagaatctgtggaaggagcaggagagggaaagacagatgaggaaggagagaggggaggagacttggtgggataaagcggccggggcttttggggggagtaaggatgggaagaagtgatgtggtgttaacgagtggtggtggtttgagagggagagtgatgtgtattctatgtgtatatcatggctctgagcttgaagatatccggttgagagttggaagcttgtatattcatagcttggacttggccgtactttatgactgcgtagacgtgaggtattgccgaatggtcttgttggtttctacttatgcttcagctgagtgagcttacatatatttgctaggcagagaagatgatatgtattatatactaaagcgctggttacgcc

SEQ ID NO: 33843 - DNA, 486 bp, Muscodor strobelii
  misc_feature: SGI cDNA ID NO. 571681
  misc_feature: Reduced expression when VOC is produced
  misc_feature: Encodes the peptide sequence at SEQ ID NO 33844
atggcgaccgaattgaccgtccagtcggagcgtgctttccagaagcagcctcacatcttccagaactccaagtccaaggccaagtccacgcgccccggcaagggtggccgaagatggtacaaggatgtcggtctgggtttccgtacccccaagaccgccattgagggcaactacattgacaagaagtgccccttcaccggtctcgtttccatccgtggccgtatcctgaccggcaccgtcgtctccaccaagatgcaccgcaccatcatcatccgccgcgagtacctccacttcatccgcaagtacgcccgttacgagaagcgccacaagaacatcgccgcccacgtctctcccgccttccgtgtcgaggagggtgaccaggttaccgtcggccagtgccgacctctcagcaagaccgtccgattcaacgtgctccgcgtgctcccccgcaccggcaaggcggtcaagaagttcagcaagttctaa

SEQ ID NO: 33844 - protein, 161 aa, Muscodor strobelii
  misc_feature: SGI Peptide ID NO. 571681
  misc_feature (78)..(147): Pfam Id: PF00366 Pfam Desc: Ribosomal protein S17
  misc_feature (1)..(161): NCBI GI: 154321682 Blast Desc: 40S ribosomal protein S11 [Botryotinia fuckeliana B05.10] gi|150850235|gb|EDN25428.1| 40S ribosomal protein S11 [Botryotinia fuckeliana B05.10]
  misc_feature (5)..(161): NCBI GI: 46107576 Blast Desc: FG00671.1 [Gibberella zeae PH-1]
  misc_feature (1)..(161): NCBI GI: 242800551 Blast Desc: 40S ribosomal protein S11 [Talaromyces stipitatus ATCC 10500] gi|218716957|gb|EED16378.1| 40S ribosomal protein S11 [Talaromyces stipitatus ATCC 10500]
  misc_feature (5)..(161): NCBI GI: 256734748 Blast Desc: [Nectria haematococca mpVI 77-13-4]
  misc_feature (1)..(161): NCBI GI: 212540860 Blast Desc: 40S ribosomal protein S11 [Penicillium marneffei ATCC 18224] gi|210067884|gb|EEA21976.1| 40S ribosomal protein S11 [Penicillium marneffei ATCC 18224]
  misc_feature (1)..(161): NCBI GI: 261355270 Blast Desc: 40S ribosomal protein S11 [Verticillium albo-atrum VaMs.102]
  misc_feature (1)..(161): NCBI GI: 171687797 Blast Desc: protein product [Podospora anserina] gi|170943860|emb|CAP69512.1| protein product [Podospora anserina]
  misc_feature (1)..(161): NCBI GI: 85115947 Blast Desc: NCU03102 [Neurospora crassa OR74A] gi|28926760|gb|EAA35725.1| conserved [Neurospora crassa OR74A]
  misc_feature (1)..(161): NCBI GI: 238839994 Blast Desc: 40S ribosomal protein S11 [Microsporum canis CBS 113480]
  misc_feature (1)..(161): NCBI GI: 39943200 Blast Desc: conserved [Magnaporthe grisea 70-15] gi|145009725|gb|EDJ94381.1| conserved [Magnaporthe grisea 70-15]
  misc_feature: Useful for introducing or modulating the production of volatile compounds
MATELTVQSERAFQKQPHIFQNSKSKAKSTRPGKGGRRWYKDVGLGFRTPKTAIEGNYIDKKCPFTGLVSIRGRILTGTVVSTKMHRTIIIRREYLHFIRKYARYEKRHKNIAAHVSPAFRVEEGDQVTVGQCRPLSKTVRFNVLRVLPRTGKAVKKFSKF

SEQ ID NO: 33845 - DNA, 1290 bp, Muscodor strobelii
  misc_feature: SGI EST ID NO. CUFF.80098.0
  misc_feature: Variant of the nucleotide sequence at SEQ ID NO 33843
gccgttcccacacaagcgagtttttgcccacacaacccgacgaatttacaccacctccattttttgactggtgcaatcctccgacgacaacctcgatcaaccaccaccctcgattcccgccatcccactaacctgcagctttcacgacaagcttcgcaaccatggcgaccgaattgaccgtccagtcggagcgtgctttccagaagcagcctcacatcttccagaactccaagtccaaggccaagtccacgcgccccggcaagggtggccgaagatggtacaaggatgtcggtctgggtttccgtacccccaagaccgccattgagggcaactacattgacaagaagtgccccttcaccggtctcgtttccatccgtggccgtatcctgaccggcaccgtcgtctccaccaagatgcaccgcaccatcatcatccgccgcgagtacctccacttcatccgcaagtacgcccgttacgagaagcgccacaagaacatcgccgcccacgtctctcccgccttccgtgtcgaggagggtgaccaggttaccgtcggccagtgccgacctctcagcaagaccgtccgattcaacgtgctccgcgtgctcccccgcaccggcaaggcggtcaagaagttcagcaagttctaagcttttacgggaactcctactcttacgggcatcgatggcgttgttgattcacggttgattcatgatacaaaatacttttcggaacggaaatggtccataggcacagacggcggcacggtgatgcaacgccggtagttctgaaataaacaaaagaagataccaaacacccccgtgtgcgagagagagcccccgatgtactgaatgaagtaatggaatgaacgactacgaacccgatcaatcttacggctgtcttgtgaaatgatgaaagacagagggaatctgatgtcaggttaaggctcccgaaggtctgagaagaagcggaggccggcaatgtgattcggctgcgagacgcgtagacggtaatgtcactagaaagacgggtgaagtcttgcgcgaatgctccgtcccagaatcaataaaaatatctaacaatcagacgatcatttcaatatcttcgaacttgaaaccatagctctgttgaccaaaggtatggcattagatacgcgcaaattgtgagcagggcaaggaacgatcaccatggtgcaggctatgtccattgcgaggaatcgtgacatatctgacttcaatgactgttgtcaagaaaatatatagagatatctcacaaatcacattttcatacatg

SEQ ID NO: 33846 - DNA, 4443 bp, Muscodor strobelii
  misc_feature: SGI cDNA ID NO. 571682
  misc_feature: Encodes the peptide sequence at SEQ ID NO 33847
atggctggtagcggtaatgccactatcccaccaactcgccgaccgcgcaagtctacgggccactcacctgtgagaaagaagatggagaaagaaaatatcacggtcgacctggcgagctccctggctggtaatgcgagccgtaagaagtcgcgcagcaagtccatgggacccggtggtctggatgtccttaagtcgggcaccggcaacagacgagtgtcactagctgcaccttcaaaaccaccgccgagatccatattgaagcccactatgccactgctaccagagatccctccacacaagtccaaacggaaatcacctccttcgggctcggtgcagggcgcagagaagctgtcaaaccctttccagaacgatgactcctcttcctctggcaccaagatagcactgcgaacagaagaagagcagcaagctgccgcccgtgcgcgcgaggaggaggagagaaagcagttggagaaggaaatcaacgatcgacgcgaggccagaagaaagtccttagccaaccgtcgcgtctcctttgctgccgaagccacgcttcacacctttcacgaagtctaccaagactccaccacatcgacagactctacgagaagagcttcgcgaacacccgcgccagcgcctcctcctgaggtggcagatgacccgccttcgactcccccagaacaagtcgaagaagatgttccagactccccagaggaccagcgagacctgcaccagaaaaaaagacgtagaagctccggcgtctctgccatggacgatgaccacacccttgcgtctagtgtctatagctcagactctgatgtgactgagggtgtgaccgagatacacgaagacatgggttctgactctgccagcgagtctgataccgatggcgtgactatggagatggatgctgacgaaatgaccggcacctccgtcgcatctgccatgactgcccgctcggcttttatggaagatgatggtggcgactctatcgatgacatactccggatggctaccgaaagagccgagactcaaaacatcgatgaagcagaagaggtcattccgtcctttgggtggatcaagaagccggcaccaaaaccagcaagcccggttcgacaacaacaagatccagcatcgccggtaaatgaggaggatcaggatcttgaaattacagcacccgttaatatggaaatgactagacttatgggcggtatcatcgaggcgaacgatgatgcggacgaagaagaactacccgaagaagagatgtcgatggatgtgacacacgccttaggtggcattctgccctctagaaatccaattgcagattcccctgaagctccgcttatccaatttgatagcgatccggtcgaagatgccacgatggaactcacgaaggctattggtggcatcagaggcaatcaacaggatgtagatgaacttgctgactcggacgccaacgaagatatgtcgatggagttcacctcagtgatgggcggtctgttgtcgacgaacaaagcaaatgttgctaagcgcaaaatgtctatgggtcggcgtaataccttggcaggaaatgatgaagcgacaatggatatgactatgggacttggtcgtattattcagagcaataacgaaattgaagaagaggaagacgatgccacgatgggtatggatatgacaacggcagttggaggaatcattggagcaacttcgcctgctaagtcttcacccgccaaagccgccaaagaccaagtccaagcaaagcacatcatggagcaagaggccgacagacctgatggcgaaggcatgccgacatcatcaccgaggcgccgcctgtctgatatgatcgagcctgcaagtattcacgcacccggtcaccccggcatgctcccatttagaggaaaggggctccggcgaagcaccgatcgtcgagcttcagagacacccaagcagcgatcgccatctcgagctcgcaccgtatccaaatctccaagcccgaagaaagcacccgcaccaagtactccccaagactcaagtcccgtgaagacacccgtatctcagacctctcaaagacgatctgcttcacccacgcgaccagcctcggctcgatcagctcgatcaactagatcaaatgcgacacccacttcaaccgccaaagctaatcctagactctcactattccaaacacacccttcaactggcgtcaccaccccacaagtcgtgctgacacctcaaagacgactctctggaattggcgccgaccgtgctggacttggttcgcccaaggtagctgctatttttgaacgaagaggttctattagcgactctgctaatatcttcgtgcctcgaagcggaccaagagctgtgagctccgcagatctacagctcctaaaagatgaagtggaaaaggagcgtcaaacggaacaggacaaggagaatggctgtagcattctggagagagaagcagatggagaagatgaaaacaacactgcttctctaaaagacatgatatcaagcatgactcctaagaagaacaagaagaatcttctaaagggccgaaaaagtttgcacgtcggcagtgccagtggacttctcgggaagcgacctgtcgaacttgatgacgacgatgacgattacgacagagatggtgtcaagaggctcaagaatcatcaaagcagtcccgtcaagaacgtgcgactacatgcaccgcccacgaaagaagagactaccggtcggttgactcggtcggcggggaagaagttggattttggaggcccgaacaactcaacaccatccctgaatctttcaccaacaaaagggcgggcggctgctccttcaccgcagggtaaaggtcgcttcaagcaggtcgagtcagatcagcctaccaacaccttcagcttcgatgatcccgtgcctctacaaaatcccgaaggcgtcattgatgacgacaccgagcacatccatctccaagacttcctcaacatgactagcatccgcttcatggagctcacaacaaccaaaagacgacataccgaagcacctacaacatcgaaaggctttcttccagacaaagaggacctctctctcgagcgatgcgtcgtcgcaggagcatgcaccgtaccgatgctggagctctaccaacattcctgccgcgagttgaagaagtacatctcagaaggtcgccgcatcgtacgggagatcgagacagagacctttgaagagaatccaccgcttttcaaagagtatatatcagcgactccggagttcaagacgctgatggacaatcagttcaagaatgtcaagactcatgccagacttctgagtaaagctatgtggtacgagtggcgtatgaaactccaggatggtctcaaagagggacttgttaagatctctgagggcatggtgcaagatgagattttgctgaatgagcagcaggcgctgcttgattccatattgccgaacatggcaaagaagttagaggccttgacggtggaggccgagaatcttgaaagcgccgcgaaggaattggaagattgcgatcctgatgaactccaagctgcgagagctgaacttgaggaagttgatcagggcattgaggagaagaagcgcgcgattgaggagttaagacgacagcttggtgagacggaagatggtattcaacaagctacgcagaagaagcatgcctatatttctgatatccagggggctgaaaaggtccgagaagagtgcagagggtggagttcgaaggatgttaatgcgctgaaagcaagagtagaagccctcgaaaaaaaacacggctgggcaatcgtcggtatggacggacaacgcatgcgtatgacgtaccggagggaaatcgaacttgtatttgatgctattgccctccaaaatcatacacaaaacaagagccagaagggtacgtcgactaagcagatcgatctccactacgtggcaaccaatcgcgacggagaacgcgaggaatcatcgcccgaaacggaattttttatccagagtattgtggatcatgtcagagacatggtctgtgcgcagactaaacccgacgtcaaagaggttttaagtgttattggcaatgcatgggatttggccagacatgtgaagtgggaggtcaggtatttgaatactacttttcctacgaaggtgcttcgtgccggggaagacgaactgtccattaagtcgactgtttttattggggagttggagacgaagatggagatcggttttaaactacggagaacaacaacacctggcgatggggagatgaatatgggtattgtgacggaggcgagggttgtgtatggggaacagtttaagattgagaatgttgaggcgtttttgagggagaggattggggatagagtggtgaagggtgagaggtggggtgatgttgttgcggagttggggaggaagttggttgggagtgggaagaagtag

SEQ ID NO: 33847 - protein, 1480 aa, Muscodor strobelii
  misc_feature: SGI Peptide ID NO. 571682
  misc_feature (969)..(1299): Pfam Id: PF08317 Pfam Desc: Spc7 kinetochore protein
  misc_feature (979)..(1299): Pfam Id: PF08317 Pfam Desc: Spc7 kinetochore protein
  misc_feature (1)..(1470): NCBI GI: 145615928 Blast Desc: MGG_03693 [Magnaporthe grisea 70-15] gi|145009712|gb|EDJ94368.1| MGG_03693 [Magnaporthe grisea 70-15]
  misc_feature (1)..(1480): NCBI GI: 261355269 Blast Desc: conserved [Verticillium albo-atrum VaMs.102]
  misc_feature (1)..(1475): NCBI GI: 171687795 Blast Desc: protein product [Podospora anserina] gi|170943859|emb|CAP69511.1| protein product [Podospora anserina]
  misc_feature (1)..(1480): NCBI GI: 85115951 Blast Desc: NCU03103 [Neurospora crassa OR74A] gi|28926761|gb|EAA35726.1| [Neurospora crassa OR74A]
  misc_feature (1)..(1471): NCBI GI: 156045970 Blast Desc: SS1G_09261 [Sclerotinia sclerotiorum 1980] gi|154693657|gb|EDN93395.1| SS1G_09261 [Sclerotinia sclerotiorum 1980]
  misc_feature (1)..(1480): NCBI GI: 154321684 Blast Desc: BC1G_00989 [Botryotinia fuckeliana B05.10] gi|150850236|gb|EDN25429.1| BC1G_00989 [Botryotinia fuckeliana B05.10]
  misc_feature (169)..(1480): NCBI GI: 256735456 Blast Desc: NECHADRAFT_75317 [Nectria haematococca mpVI 77-13-4]
  misc_feature (90)..(1480): NCBI GI: 46107578 Blast Desc: FG00672.1 [Gibberella zeae PH-1]
  misc_feature (1)..(1458): NCBI GI: 121710308 Blast Desc: conserved [Aspergillus clavatus NRRL 1] gi|119400920|gb|EAW11344.1| conserved [Aspergillus clavatus NRRL 1]
  misc_feature (1)..(1396): NCBI GI: 119480037 Blast Desc: NFIA_080940 [Neosartorya fischeri NRRL 181] gi|119408201|gb|EAW18150.1| conserved [Neosartorya fischeri NRRL 181]
MAGSGNATIPPTRRPRKSTGHSPVRKKMEKENITVDLASSLAGNASRKKSRSKSMGPGGLDVLKSGTGNRRVSLAAPSKPPPRSILKPTMPLLPEIPPHKSKRKSPPSGSVQGAEKLSNPFQNDDSSSSGTKIALRTEEEQQAAARAREEEERKQLEKEINDRREARRKSLANRRVSFAAEATLHTFHEVYQDSTTSTDSTRRASRTPAPAPPPEVADDPPSTPPEQVEEDVPDSPEDQRDLHQKKRRRSSGVSAMDDDHTLASSVYSSDSDVTEGVTEIHEDMGSDSASESDTDGVTMEMDADEMTGTSVASAMTARSAFMEDDGGDSIDDILRMATERAETQNIDEAEEVIPSFGWIKKPAPKPASPVRQQQDPASPVNEEDQDLEITAPVNMEMTRLMGGIIEANDDADEEELPEEEMSMDVTHALGGILPSRNPIADSPEAPLIQFDSDPVEDATMELTKAIGGIRGNQQDVDELADSDANEDMSMEFTSVMGGLLSTNKANVAKRKMSMGRRNTLAGNDEATMDMTMGLGRIIQSNNEIEEEEDDATMGMDMTTAVGGIIGATSPAKSSPAKAAKDQVQAKHIMEQEADRPDGEGMPTSSPRRRLSDMIEPASIHAPGHPGMLPFRGKGLRRSTDRRASETPKQRSPSRARTVSKSPSPKKAPAPSTPQDSSPVKTPVSQTSQRRSASPTRPASARSARSTRSNATPTSTAKANPRLSLFQTHPSTGVTTPQVVLTPQRRLSGIGADRAGLGSPKVAAIFERRGSISDSANIFVPRSGPRAVSSADLQLLKDEVEKERQTEQDKENGCSILEREADGEDENNTASLKDMISSMTPKKNKKNLLKGRKSLHVGSASGLLGKRPVELDDDDDDYDRDGVKRLKNHQSSPVKNVRLHAPPTKEETTGRLTRSAGKKLDFGGPNNSTPSLNLSPTKGRAAAPSPQGKGRFKQVESDQPTNTFSFDDPVPLQNPEGVIDDDTEHIHLQDFLNMTSIRFMELTTTKRRHTEAPTTSKGFLPDKEDLSLERCVVAGACTVPMLELYQHSCRELKKYISEGRRIVREIETETFEENPPLFKEYISATPEFKTLMDNQFKNVKTHARLLSKAMWYEWRMKLQDGLKEGLVKISEGMVQDEILLNEQQALLDSILPNMAKKLEALTVEAENLESAAKELEDCDPDELQAARAELEEVDQGIEEKKRAIEELRRQLGETEDGIQQATQKKHAYISDIQGAEKVREECRGWSSKDVNALKARVEALEKKHGWAIVGMDGQRMRMTYRREIELVFDAIALQNHTQNKSQKGTSTKQIDLHYVATNRDGEREESSPETEFFIQSIVDHVRDMVCAQTKPDVKEVLSVIGNAWDLARHVKWEVRYLNTTFPTKVLRAGEDELSIKSTVFIGELETKMEIGFKLRRTTTPGDGEMNMGIVTEARVVYGEQFKIENVEAFLRERIGDRVVKGERWGDVVAELGRKLVGSGKK

SEQ ID NO: 33848 - DNA, 2091 bp, Muscodor strobelii
  misc_feature: SGI cDNA ID NO. 571683
  misc_feature: Encodes the peptide sequence at SEQ ID NO 33849
atggcgatcacaacgcgtgatcgggaggacatgttcgccttcttactcctcctctcctttgggatgacggtcctcacctttctcggtctgcacgagattggtgccgcatccatcctcgagggttaccttggctatgagttgggaaacttcggcacccttctcatctctctctccttcatcgccactgtcatcgccacgaccacctacgttgtggagaccgtattctgcctcgtcattctggcggtgcatgtctcgtggctatgggatccaatcatgcagatggggccatccatcctgcagaaatggaattctatcgcccagttctctctctccgtccctttcttccttctctacgtcctctacgccctctgtttcgccctctacatcgtactcgccttcttcttgcaagctgtcatcgcccttctcgtcgcctttgtgcccgttatcctcggagctcaactcgtcaagttatacttgtggggccggcaacaacaagaaggcggttgcgccctgtgggtttggttcgcgggagtttgccgcagctctctatcttttgtgcgatatctcgtcgtctggcttcttccgagagttcctataattctcttctattactgcatccattgcatttactatctcaccgaaggagtgcccagcaagggaccatatttcccgttgcccgacaatcttacccccggtgggaagaagaagacccagaaacccgccgtcagcgtcgatgaacagcagccccgagagcaagaagcgccttctcctacaccggctggaaccgcaacgggatctcactacaagccctgcctcatcgcccccaagccatacgtcagttcggtcaattttcttcgggactcatctttttggcgcccagctcgtggcccggctcgtttctcgaagcctgtcgcccctgcgcccgctcccaagctcaccccgctcagacaatctggtaccttctctgttgaccagccatactcccctggcgtcgactccgacgctgatgaggactacgactaccccgttcacggccctgcccccccgcccgtcgccgccacgaagcctgtggacacggcttactgccgcaacagtccaggccacttctccgttgaccaggcatattttccgggtcccgatgacatcgtagaagacggctactacgacctcgacaacgagccggacgagtggctcatctctgggaaaaagatggaagcttactccgaggccttcttcgccgcccgcgactctggtaaacgcgctgcccgcaaagctgcccagcagcctccttggcacgtcaaggcaatactcaaaaggtgtggtatccgtgacccgaccgaggaggtggaggtcgaagactacccgaccaaccagtggcggctcttccccgaagggaagaccgaattccacaaccgtttccctggcgcccgggatgtcgaagaaaaattggcctgcactcctatgcccactgctgtttgggatccattgcctcgtcctcgtgccgttgtcgctcctggcccgttcgtgcccgaggcgccgttcgatatcaagtggggggagtcacatggttggcgacagacaataatctcggaacgccgtatgtacaggggccaggccccgtacaagggcccgttcacccattcggtgagcaaggccagcggataccatctcatcgaccatgtgaccaacccaggattctcggagaagacgttctggattgaccaccaccttactcccaagggaaatcgcaagggtccccctccgttcgagggcaagaccttcacatccccggagaacttgcgtggcagagtgaagcaggccactcgcaagatcaagtcgcgggcccagaaggagagggaaaaggctcccctgttcaccggagagaaccttgttcgcttccagaacgacaaatacgtcaaccgcatctatgctagtatggagaacatacaagagcgcaagaccattcttgagccattccctggcaatatgaacgattgggaggctcggtgccgcaaggagggcaagtgcagatgcctagtgagatgctgccccagatatgagatcccaatggatccggatgaggaactctga

SEQ ID NO: 33849 - protein, 696 aa, Muscodor strobelii
  misc_feature: SGI Peptide ID NO. 571683
MAITTRDREDMFAFLLLLSFGMTVLTFLGLHEIGAASILEGYLGYELGNFGTLLISLSFIATVIATTTYVVETVFCLVILAVHVSWLWDPIMQMGPSILQKWNSIAQFSLSVPFFLLYVLYALCFALYIVLAFFLQAVIALLVAFVPVILGAQLVKLYLWGRQQQEGGCALWVWFAGVCRSSLSFVRYLVVWLLPRVPIILFYYCIHCIYYLTEGVPSKGPYFPLPDNLTPGGKKKTQKPAVSVDEQQPREQEAPSPTPAGTATGSHYKPCLIAPKPYVSSVNFLRDSSFWRPARGPARFSKPVAPAPAPKLTPLRQSGTFSVDQPYSPGVDSDADEDYDYPVHGPAPPPVAATKPVDTAYCRNSPGHFSVDQAYFPGPDDIVEDGYYDLDNEPDEWLISGKKMEAYSEAFFAARDSGKRAARKAAQQPPWHVKAILKRCGIRDPTEEVEVEDYPTNQWRLFPEGKTEFHNRFPGARDVEEKLACTPMPTAVWDPLPRPRAVVAPGPFVPEAPFDIKWGESHGWRQTIISERRMYRGQAPYKGPFTHSVSKASGYHLIDHVTNPGFSEKTFWIDHHLTPKGNRKGPPPFEGKTFTSPENLRGRVKQATRKIKSRAQKEREKAPLFTGENLVRFQNDKYVNRIYASMENIQERKTILEPFPGNMNDWEARCRKEGKCRCLVRCCPRYEIPMDPDEEL

SEQ ID NO: 33850 - DNA, 471 bp, Muscodor strobelii
  misc_feature: SGI cDNA ID NO. 571684
  misc_feature: Encodes the peptide sequence at SEQ ID NO 33851
atgcagcttgagcttggtgttgttgagctagacgacgaggatgaagaagatgatgacgatgatgaggataacgacgacgaagatgatgaagacaacgaagaagaggagcttgatagtacgctgctggtggactctgtgctgactgactcggaagatcgagacgagaccaaattgctggaagaggaagctgaacttgagattccagaggaagaggtcataaaagagcgtggcgatgatgtgggccctaggttcagggagctggacccgggaggtagggaaatggatgtcctagtcagaactgatgaagagtctgaggctgatgctggaccgctgacgattgagttggtatttgttgtagttgttgaggtcaatgtcgcgacgctcgtgaatatcgatgtgttgctggtttcatcgctcgctgagattgaagtcaataccacatgcacggaccaaataacgagtatggaatag

SEQ ID NO: 33851 - protein, 156 aa, Muscodor strobelii
  misc_feature: SGI Peptide ID NO. 571684
MQLELGVVELDDEDEEDDDDDEDNDDEDDEDNEEEELDSTLLVDSVLTDSEDRDETKLLEEEAELEIPEEEVIKERGDDVGPRFRELDPGGREMDVLVRTDEESEADAGPLTIELVFVVVVEVNVATLVNIDVLLVSSLAEIEVNTTCTDQITSME

SEQ ID NO: 33852 - DNA, 1500 bp, Muscodor strobelii
  misc_feature: SGI cDNA ID NO. 571685
  misc_feature: Encodes the peptide sequence at SEQ ID NO 33853
atgcgctcagcaataacgtctttaagcgtcggtctaatcgccctcagtggcgtagaagccatttccaacgccgatgccgatgccatgtacaatgactggaatactgcatttctctccggaactcgctaccgccaatcggtcaagaacacaacacttgacaagacctggccggcttccttagatatactcgtcgctgaagatgcctatgaccggactggcgcttccgacaggaaaactctcgtgaacaacctcttgaattcgtggcttgctgacacaccgcctccgtggagctgggatgggtggaatgacgatattggctggttcacacttgctcttgcgagggggtaccagatcactggaacccagaactttctgactcaggcagagtatgggtttaattacgcctttggccgcgggtgggatgagcaatataacggcggcggtatatgggaagaacagccagccaacgcccagggagacggtcgcactccagcgaaggaggctttgtccaatgacagtctcgggaaggttgccacccttctgtaccaaagcaccgggaacaaaacttatcttcagagcgctgagaagatctacgcatgggtccgcaagaatctcttcgacgcgaatactggcgcactcagtactggagttgactggaatggcaaggtgactaccgccactgcggcatacaatcaaggtacattcatcgattttgccacgctactatggaagactactttcaacagcatgtaccatgacgatgctctgcttgcccttgagttcggcaagaatagtcttaccaagaatggaatattcagcaacagtaacactggcctgaatacctgggccgacgagatggctcggggtgtaggcaattttgtgagcgcagctggtctctgggataagtactttgactggatcaaccaaaacgcgaactccatcttggctaatcgccgaactgataagggaataacatggaatgcctgggatcaaccgactccgcagactgacttcattaccaatacgtttgccagtgctgttgcgtggctgcaatacacaccagcagtcaaacctagcaacgttagtgggatcatgtatatcacgaacaaggctacggggttgcggattgacagcggcggaagccttacggccggatcgaacgtccttcaatggggcgccaaccctgctttggcacagaagtggctcattacccaaagtccggatttctcctggacgctgatgaacactgcgacgtggctggtcgttgacaatcctgccggatcgacacagaatggagcagagatggtgcaatggagttcttctagagggacaaatcaaagatggtggatcgatcaacaaaccgatggtagttacaagatttggaacaaagagagcttgaaggctttagatggagctggcatgacaaacaatggcgctcatctagtacagaatgactggacgggagccaattcgcaaaggtggctgattacgagagcatga

SEQ ID NO: 33853 - protein, 499 aa, Muscodor strobelii
  misc_feature: SGI Peptide ID NO. 571685
  misc_feature (361)..(494): Pfam Id: PF00652 Pfam Desc: Ricin-type beta-trefoil lectin domain
  misc_feature (9)..(366): Pfam Id: PF03663 Pfam Desc: Glycosyl hydrolase family 76
  misc_feature (14)..(460): NCBI GI: 256421752 Blast Desc: glycoside hydrolase family 76 [Chitinophaga pinensis DSM 2588] gi|256036660|gb|ACU60204.1| glycoside hydrolase family 76 [Chitinophaga pinensis DSM 2588]
  misc_feature (12)..(498): NCBI GI: 256395991 Blast Desc: glycoside hydrolase family 76 [Catenulispora acidiphila DSM 44928] gi|256362217|gb|ACU75714.1| glycoside hydrolase family 76 [Catenulispora acidiphila DSM 44928]
  misc_feature (12)..(428): NCBI GI: 223940201 Blast Desc: glycoside hydrolase family 76 [bacterium Ellin514] gi|223891146|gb|EEF57646.1| glycoside hydrolase family 76 [bacterium Ellin514]
  misc_feature (13)..(334): NCBI GI: 223940233 Blast Desc: glycoside hydrolase family 76 [bacterium Ellin514] gi|223891120|gb|EEF57621.1| glycoside hydrolase family 76 [bacterium Ellin514]
  misc_feature (24)..(354): NCBI GI: 223934628 Blast Desc: Alpha-glucosidase [bacterium Ellin514] gi|223896583|gb|EEF63024.1| Alpha-glucosidase [bacterium Ellin514]
  misc_feature (66)..(272): NCBI GI: 251794256 Blast Desc: glycoside hydrolase family 76 [Paenibacillus sp. JDR-2] gi|247541882|gb|ACS98900.1| glycoside hydrolase family 76 [Paenibacillus sp. JDR-2]
  misc_feature (56)..(340): NCBI GI: 168052263 Blast Desc: [Physcomitrella patens subsp. patens] gi|162670024|gb|EDQ56600.1| [Physcomitrella patens subsp. patens]
  misc_feature (59)..(336): NCBI GI: 149276937 Blast Desc: exported glycosylhydrolase [Pedobacter sp. BAL39] gi|149232606|gb|EDM37982.1| exported glycosylhydrolase [Pedobacter sp. BAL39]
  misc_feature (24)..(357): NCBI GI: 223940455 Blast Desc: glycoside hydrolase family 76 [bacterium Ellin514] gi|223890858|gb|EEF57368.1| glycoside hydrolase family 76 [bacterium Ellin514]
  misc_feature (67)..(272): NCBI GI: 4519505 Blast Desc: alpha-1,6-mannanase [Bacillus circulans]
MRSAITSLSVGLIALSGVEAISNADADAMYNDWNTAFLSGTRYRQSVKNTTLDKTWPASLDILVAEDAYDRTGASDRKTLVNNLLNSWLADTPPPWSWDGWNDDIGWFTLALARGYQITGTQNFLTQAEYGFNYAFGRGWDEQYNGGGIWEEQPANAQGDGRTPAKEALSNDSLGKVATLLYQSTGNKTYLQSAEKIYAWVRKNLFDANTGALSTGVDWNGKVTTATAAYNQGTFIDFATLLWKTTFNSMYHDDALLALEFGKNSLTKNGIFSNSNTGLNTWADEMARGVGNFVSAAGLWDKYFDWINQNANSILANRRTDKGITWNAWDQPTPQTDFITNTFASAVAWLQYTPAVKPSNVSGIMYITNKATGLRIDSGGSLTAGSNVLQWGANPALAQKWLITQSPDFSWTLMNTATWLVVDNPAGSTQNGAEMVQWSSSRGTNQRWWIDQQTDGSYKIWNKESLKALDGAGMTNNGAHLVQNDWTGANSQRWLITRA

SEQ ID NO: 33854 - DNA, 1059 bp, Muscodor strobelii
  misc_feature: SGI cDNA ID NO. 571686
  misc_feature: Encodes the peptide sequence at SEQ ID NO 33855
atgactatcccgccgtgcgccgttatgaggttgcccgttcccgggttcatcacgtgctacgcaattggctttttaaaacgccagctcttcataaccccgcccgcggtcacagatgtcgacctcagcggaaagacagtagtcataaccggtggaggctcaggattagggtttgaagctgcaaagcaatttctcggcttgggaacaagtcatctaataatcactgtccgcgacgagaagaagggcacacaagcaagagaagagatactaaaggcaagagtttctacgagctcaaaacaaacggtagacgtctggagtcttgacctttcgagctacgagagtgttatatccttcgcgactcggttaaagacactcgagcacctcgacatattcgtcaataatgccggccttgctaagctgcaatttgagcggaacaagagcacgggacatgaagagactgtccaagtcaatcacctctcacatgctcttctaaatatcctgatcctctcgattcttaaagaaaagaacgactctcaacaccctgggcgtttggtttcagtcaactccgacgggtctgcgatggcgaaattcaaagagaaggatttgcctggacctctcctagcagcgttcgacgatgaggcgaacttcgacaatttagatagatattacacatctaagctactacctatgctcttccaagtcgagctcgcgaagcgcattccctcgtccgtggcaattatcaacctccccagcccaggtctgactcaatccggtcttcaacgcgaagccgctggcacagttgcgggctttttattcggactctttgtgaagatgattgggcggtcgacggccgttggtgcgcgcaccctcgtcgatgctgctgtccatcatggcgtggaatctcatgggcagtttgtggaggattgcaagattcaaccgttggctccactcgcctaccaacctaagggccaaaaggtcatggagaaactctggaatgagacaatggctgagttggacaagttcggggtcaatgctattgtcaatgagctgagtagtcaatag

SEQ ID NO: 33855 - protein, 352 aa, Muscodor strobelii
  misc_feature: SGI Peptide ID NO. 571686
  misc_feature (44)..(197): Pfam Id: PF00106 Pfam Desc: short chain dehydrogenase
  misc_feature (44)..(135): Pfam Id: PF00106 Pfam Desc: short chain dehydrogenase
  misc_feature (21)..(351): NCBI GI: 238844730 Blast Desc: retinol dehydrogenase 12 [Microsporum canis CBS 113480]
  misc_feature (22)..(345): NCBI GI: 46103007 Blast Desc: FG00073.1 [Gibberella zeae PH-1]
  misc_feature (24)..(337): NCBI GI: 242773397 Blast Desc: short-chain dehydrogenase, [Talaromyces stipitatus ATCC 10500] gi|218721851|gb|EED21269.1| short-chain dehydrogenase, [Talaromyces stipitatus ATCC 10500]
  misc_feature (24)..(349): NCBI GI: 256728146 Blast Desc: NECHADRAFT_54058 [Nectria haematococca mpVI 77-13-4]
  misc_feature (22)..(337): NCBI GI: 256725584 Blast Desc: NECHADRAFT_94266 [Nectria haematococca mpVI 77-13-4]
  misc_feature (33)..(352): NCBI GI: 256730051 Blast Desc: NECHADRAFT_82657 [Nectria haematococca mpVI 77-13-4]
  misc_feature (24)..(337): NCBI GI: 46138187 Blast Desc: FG10608.1 [Gibberella zeae PH-1]
  misc_feature (24)..(352): NCBI GI: 238505799 Blast Desc: short-chain dehydrogenase/reductase family protein, [Aspergillus flavus NRRL3357] gi|220690218|gb|EED46568.1| short-chain dehydrogenase/reductase family protein, [Aspergillus
  misc_feature (22)..(337): NCBI GI: 238492577 Blast Desc: short-chain dehydrogenase/reductase family protein, [Aspergillus flavus NRRL3357] gi|220696019|gb|EED52361.1| short-chain dehydrogenase/reductase family protein, [Aspergillus
  misc_feature (43)..(312): NCBI GI: 256727323 Blast Desc: NECHADRAFT_34006 [Nectria haematococca mpVI 77-13-4]
  misc_feature (31)..(261): SWISSPROT Homolog: EC 1.3.1.33 Protochlorophyllide reductase
MTIPPCAVMRLPVPGFITCYAIGFLKRQLFITPPAVTDVDLSGKTVVITGGGSGLGFEAAKQFLGLGTSHLIITVRDEKKGTQAREEILKARVSTSSKQTVDVWSLDLSSYESVISFATRLKTLEHLDIFVNNAGLAKLQFERNKSTGHEETVQVNHLSHALLNILILSILKEKNDSQHPGRLVSVNSDGSAMAKFKEKDLPGPLLAAFDDEANFDNLDRYYTSKLLPMLFQVELAKRIPSSVAIINLPSPGLTQSGLQREAAGTVAGFLFGLFVKMIGRSTAVGARTLVDAAVHHGVESHGQFVEDCKIQPLAPLAYQPKGQKVMEKLWNETMAELDKFGVNAIVNELSSQ

SEQ ID NO: 33856 - DNA, 1257 bp, Muscodor strobelii
  misc_feature: SGI cDNA ID NO. 571687
  misc_feature: Encodes the peptide sequence at SEQ ID NO 33857
atgccttttgtgaggtttcctcggataatcgcgcgactgctgctgttcagtcctgtgccactgttaggctatcggcatgaaaatcccaaccttgcatctcttgatgccgagctcacctacttgcttcctataccgttcacgggaaatctcactagtgacttcgtgggcagcacgaaagttgcgaatgagaccgtcgctgatgccctgaatgcggctgagaaagcgccctttgtatcatatagcgacgagtttgaagatctggtaggcgatgcgtccatcgtgacggctaaccatggcatgaacctgtctggttctgaagcctacgaggctggaatctgggtcccggatcacgacgaggtttggttcgtgtctagcatccgtgtagggcccactgagacatacatctattcacttaagaataacaccgtctttcaacctgaactcaaagccgcaaagcactgggaggggtacctaccagtcccaaatccaaatggaggatactatttcgatggcgatgtctacctcgccgtgcttggagacgagacacgtcctgccggagttctcgccgttgactctgtcacttatgtcgtgaggcctgtggtgaactcctggttcggactcgggttcaacaacgtagacgatgtggttgttacttataccggcgaaacacgtcatatatatttttccgatgtagacctggctgtctttggcgttgacgttggccggccaggaccgtatctccctaatgccgtttggatgttcacccctagtacaaaaacactgcagccagtcattcctcgctcagacatcttgatcccaaatggagtggcaaccgacaaggacttcaagcacctttttgtgacagatacctcggagacggcgacacaaggtgcaggtgcgcagatgaacgtgacctcatcaccggctatctatcggtatgacatctcgccgcacgacggtctggtatctaacaaaacactactgggattctcgcggcaagggattgccgacgggatcaaggttgatgacaagggcagaatttggacagctgagttcgagggcatcatggtacgaaacgctgaaggcaaattgctcggcttctttaataagaactaccttttgggcacagagtacccgacaactcagcttgctaactttgcgcttgccggtgacacgcttgtcgtgttaggaatcagtaagattttcacagtcaagctcgctgagtgtgtaatgcaacccaatcggtactcaaaatga

SEQ ID NO: 33857 - protein, 418 aa, Muscodor strobelii
  misc_feature: SGI Peptide ID NO. 571687
  misc_feature (107)..(399): Pfam Id: PF08450 Pfam Desc: SMP-30/Gluconolaconase/LRE-like region
  misc_feature (267)..(354): Pfam Id: PF08450 Pfam Desc: SMP-30/Gluconolaconase/LRE-like region
  misc_feature (32)..(410): NCBI GI: 145252902 Blast Desc: An16g06620 [Aspergillus niger] gi|134083519|emb|CAK46996.1| protein product [Aspergillus niger]
  misc_feature (26)..(411): NCBI GI: 154310079 Blast Desc: BC1G_06960 [Botryotinia fuckeliana B05.10] gi|150851748|gb|EDN26941.1| BC1G_06960 [Botryotinia fuckeliana B05.10]
  misc_feature (59)..(406): NCBI GI: 226281370 Blast Desc: lactonohydrolase [Paracoccidioides brasiliensis Pb01]
  misc_feature (50)..(274): NCBI GI: 154315916 Blast Desc: BC1G_04530 [Botryotinia fuckeliana B05.10] gi|150846926|gb|EDN22119.1| BC1G_04530 [Botryotinia fuckeliana B05.10]
  misc_feature (77)..(406): NCBI GI: 225685043 Blast Desc: conserved [Paracoccidioides brasiliensis Pb03]
  misc_feature (77)..(406): NCBI GI: 226294356 Blast Desc: lactonohydrolase [Paracoccidioides brasiliensis Pb18]
  misc_feature (58)..(366): NCBI GI: 154284117 Blast Desc: [Ajellomyces capsulatus NAm1] gi|150411034|gb|EDN06422.1| [Ajellomyces capsulatus NAm1]
  misc_feature (74)..(407): NCBI GI: 46115948 Blast Desc: FG03816.1 [Gibberella zeae PH-1]
  misc_feature (76)..(396): NCBI GI: 171683181 Blast Desc: protein product [Podospora anserina] gi|170941550|emb|CAP67202.1| protein product [Podospora anserina]
  misc_feature (80)..(406): NCBI GI: 261189496 Blast Desc: AkeP [Ajellomyces dermatitidis SLH14081] gi|239591736|gb|EEQ74317.1| AkeP [Ajellomyces dermatitidis SLH14081]
MPFVRFPRIIARLLLFSPVPLLGYRHENPNLASLDAELTYLLPIPFTGNLTSDFVGSTKVANETVADALNAAEKAPFVSYSDEFEDLVGDASIVTANHGMNLSGSEAYEAGIWVPDHDEVWFVSSIRVGPTETYIYSLKNNTVFQPELKAAKHWEGYLPVPNPNGGYYFDGDVYLAVLGDETRPAGVLAVDSVTYVVRPVVNSWFGLGFNNVDDVVVTYTGETRHIYFSDVDLAVFGVDVGRPGPYLPNAVWMFTPSTKTLQPVIPRSDILIPNGVATDKDFKHLFVTDTSETATQGAGAQMNVTSSPAIYRYDISPHDGLVSNKTLLGFSRQGIADGIKVDDKGRIWTAEFEGIMVRNAEGKLLGFFNKNYLLGTEYPTTQLANFALAGDTLVVLGISKIFTVKLAECVMQPNRYSK

SEQ ID NO: 33858 - DNA, 306 bp, Muscodor strobelii
  misc_feature: SGI cDNA ID NO. 571688
  misc_feature: Encodes the peptide sequence at SEQ ID NO 33859
atgtccgaccatgaaccctcgcctgacacgatatctcttcctgagcgacttgaaacacaggctgtggatcctcagctctcatcacctctcttcaatggacggattcctgctgagatcaggactatgatattcgagtatgccgtgaccgagttccttgatactgacgatctccatacatttcttatgatttccgatcacgtcttgaaaaggcatttcatggaagtccgtctgggaccgggtgggatcattcccgggagatacgagatggttatgattggctccgctttgacaatgctcgatgcctga

SEQ ID NO: 33859 - protein, 101 aa, Muscodor strobelii
  misc_feature: SGI Peptide ID NO. 571688
MSDHEPSPDTISLPERLETQAVDPQLSSPLFNGRIPAEIRTMIFEYAVTEFLDTDDLHTFLMISDHVLKRHFMEVRLGPGGIIPGRYEMVMIGSALTMLDA

SEQ ID NO: 33860 - DNA, 1711 bp, Muscodor strobelii
  misc_feature: SGI EST ID NO. CUFF.80081.0
  misc_feature: Variant of the nucleotide sequence at SEQ ID NO 33858
gtcgcaatctctcagatctttgccttcacctcgtttcttctccaatccatctacttttcgccatttgaattcttcagcaaacgcaattcttcaattaagtgtcagatattcggcaaatctcacaatgtccgaccatgaaccctcgcctgacacgatatctcttcctgagcgacttgaaacacaggctgtggatcctcagctctcatcacctctcttcaatggacggattcctgctgagatcaggactatgatattcgagtatgccgtgaccgagttccttgatactgacggtcccgtcttgcccactgaagttttccaacttcaacactcacatgatccagtccctgctcctgactttagatctccatacatttcttatgatttccgatcacgtcttgaaaaggcatttcatggaagtccgtctgggaccgggtgggatcattcccgggagatacgagatggttatgattggctccgctttgacaatgctcgatgcctgagaccatctttcactttgttattgacctgtcgtcgagtttatttggaaacccacgaactacgtctgaagcagattgagcatcgcatctattgcatgaatggacccacattcatcgagggatcgcattcgcaggggccgagatacagagtgacggaaaattatccctttcgcgttgtacgattgccagaaaaacacgaagccgtacggttcatgcgattatatacacaacagtattggttggaggacaacaagctagagcctattatgcaattttctaacatagagtaccttcgaattacactacggaggagcgattggtggaactgggagtcaaacgcggccctacgaatcaatccatttcgaggaaattctcaacacataacgaatgtgttgtttatgcgtcaaacaatgtcaaatcatacgggcaacccgggttttagtcgagatgcttggggaagagctttctctaaatttcccaagctcaagggtctctccattgatttcgagacgtctcaagacaaacgttccgagatggaagcaattatcgaatgggccgtaacatggaaattgcctctttcagacggtcagcatttgagcgcagacggccgtcctgtcaagaaattaagctggcgtggcttaccccatcataacagtgacgtttgcagtcagtgtcatgaaaattacaggttatcgcggcggcgcccttgcaccaaatgcgacgagagaaccacactgaccgagctgggttatggaccgcagctcttggtatggtcggtctcatgggtgcctgtcccggacacggtatcctgaaaaaaagcttccctctcttcaagcacaccatgtgctccgctctattccacactgtcattttagtatgctttttgggaccgctgttacgcttgaatgcaaaattcaatatggagatcaaatacaagagtctaatgttgggttctacgactctaggctggcatcaatttgtattctcaagcgcgcatgaacggtgacaggacagcattctgggctgtgggcaggttcgaattcagccgtgaagagatggaaaagagagtagtacgactgcaacgatactcataaaattaaatgaacgcgggaaatcgagattggtttatatgaacgattttcaactagtcatacattgtaagacattcccctcaaggctgatagccttcgtccggacgatctgcagactcaaag

SEQ ID NO: 33861 - DNA, 849 bp, Muscodor strobelii
  misc_feature: SGI cDNA ID NO. 571689
  misc_feature: Encodes the peptide sequence at SEQ ID NO 33862
atgctaacagtattttatgactcaagtattgagtacaactatgtcaatctagacatgagtaaaggcgaacctggggctaagtggtttactacaaacatcaatccaaatggtcgtgtacccgccatcgttcatgtcaaggaagatggcacctccgtaaccgtgttcgaaagtgccgcttgcttgctctacattgctagtgagtttgacgaggagcacatgatttcatacccctttggtacagcagaatattggacacagttgtcctgggtaggctaccctctccctttcttcgccggaaatccactgatcctccgttcgcagctctcgtggcaaatagcaagctatggaccgtcgatgggtcaagcagtttatttcaatcgatatgcaactgagcccgtgccacatggctcctggcgccatacttcagagtcccgacggcttcatcacgttcttaatgagcgactgtcggtatctccattcgtcgctggggaacgtctcacaattgcggacttcgctatcttcatatttgctcattctgctaagtggtgtggcatcgatatcaaccagtatgctcatgtcaaagcgtggcatgacaagctggcacagcgcccggcgttccagatggctttgcaagtgcctgtgccttaccagttcagtgatgaggcagtatccaacccgataccgcggctcaggggttcttacaagactatgcgcagattcggtggccagatgatcaaaggagcaactgatcagtggaacggaactatcccctctgtgccttcagactatgctaattttcttaagggctttgagtctgcagatcgtccggacgaaggctatcagccttga

SEQ ID NO: 33862 - protein, 282 aa, Muscodor strobelii
  misc_feature: SGI Peptide ID NO. 571689
  misc_feature (150)..(204): Pfam Id: PF00043 Pfam Desc: Glutathione S-transferase, C-terminal domain
  misc_feature (1)..(66): Pfam Id: PF02798 Pfam Desc: Glutathione S-transferase, N-terminal domain
  misc_feature (4)..(220): NCBI GI: 46110236 Blast Desc: FG02000.1 [Gibberella zeae PH-1]
  misc_feature (12)..(220): NCBI GI: 121705648 Blast Desc: glutathione S-transferase GstA [Aspergillus clavatus NRRL 1] gi|119399233|gb|EAW09661.1| glutathione S-transferase GstA [Aspergillus clavatus NRRL 1]
  misc_feature (12)..(251): NCBI GI: 119491761 Blast Desc: glutathione S-transferase GstA [Neosartorya fischeri NRRL 181] gi|119411535|gb|EAW21478.1| glutathione S-transferase GstA [Neosartorya fischeri NRRL 181]
  misc_feature (10)..(216): NCBI GI: 46114316 Blast Desc: FG03000.1 [Gibberella zeae PH-1]
  misc_feature (10)..(216): NCBI GI: 256728538 Blast Desc: [Nectria haematococca mpVI 77-13-4]
  misc_feature (12)..(220): NCBI GI: 70999638 Blast Desc: glutathione S-transferase GstA [Aspergillus fumigatus Af293] gi|59799757|gb|AAX07320.1| glutathione transferase 3 [Aspergillus fumigatus] gi|59799759|gb|AAX07321.1| glutathione 3
  misc_feature (4)..(220): NCBI GI: 39977725 Blast Desc: MGG_06747 [Magnaporthe grisea 70-15] gi|145013733|gb|EDJ98374.1| MGG_06747 [Magnaporthe grisea 70-15]
  misc_feature (12)..(220): NCBI GI: 115396300 Blast Desc: ATEG_04611 [Aspergillus terreus NIH2624] gi|114193358|gb|EAU35058.1| ATEG_04611 [Aspergillus terreus NIH2624]
  misc_feature (10)..(216): NCBI GI: 259482227 Blast Desc: TPA: uncharacterized proteinTheta class glutathione S-transferase ;(EC 2.5.1.18) [Source:UniProtKB/TrEMBL;Acc:Q8NJZ8] [Aspergillus nidulans FGSC A4]
  misc_feature (10)..(216): NCBI GI: 67537470 Blast Desc: AN4905.2 [Aspergillus nidulans FGSC A4] gi|21326939|gb|AAM48104.1|AF425746_1 theta class glutathione S-transferase [Emericella nidulans] gi|40741793|gb|EAA60983.1|
  misc_feature (9)..(211): SWISSPROT Homolog: EC 2.5.1.18 Glutathione transferase
MLTVFYDSSIEYNYVNLDMSKGEPGAKWFTTNINPNGRVPAIVHVKEDGTSVTVFESAACLLYIASEFDEEHMISYPFGTAEYWTQLSWVGYPLPFFAGNPLILRSQLSWQIASYGPSMGQAVYFNRYATEPVPHGSWRHTSESRRLHHVLNERLSVSPFVAGERLTIADFAIFIFAHSAKWCGIDINQYAHVKAWHDKLAQRPAFQMALQVPVPYQFSDEAVSNPIPRLRGSYKTMRRFGGQMIKGATDQWNGTIPSVPSDYANFLKGFESADRPDEGYQP

SEQ ID NO: 33863 - DNA, 1317 bp, Muscodor strobelii
  misc_feature: SGI EST ID NO. CUFF.80086.0
  misc_feature: Variant of the nucleotide sequence at SEQ ID NO 33861
ctagtgtctacgtataacttagtcaacaccgaatatgcggagtaggttcgatgatatcaaaaaggcgcttcatcatccacgctgggaacgggcgggaggacgaatgtagagggtgcgtggcgctagtgtgttgtcgtacctgagtggtctcatgtagctcctgtagcgtaggagtacactcattcttccttcagcctcaaatggtcctatcacttatagtaggaagagagcgggccatacatatatgtcatggatgtgcgaggtagacacttgtaattgacttcctggttatccaagcttcaagttggctattgctctcatttaaacgtctcccgggcgtcccagtgaggtggtcgcgagggatttgattcgctagtcagacagaatttttggcattttcgcctcccttgcttcaactcgtgatgtgcttaagtcttcatcggggcccgccttgatcccaaagtttcccatctaatcattctgtcaaaatcattggaagcagctcgtgttcctgtttgcgcgacgtctcattcaccatctccacaaaatgactgacatcccagctgagaaagccccaaaaccgggtctgaatatctacggatgcgcatctgtcaatcccgtaaagctcactatagcagctgaggagctgggcttcgttctcctttcgcttggacaagtttttgatcagcatgctaacagtattttatgactcaagtattgagtacaactatgtcaatctagacatgagtaaaggcgaacctggggctaagtggtttactacaaacatcaatccaaatggtcgtgtacccgccatcgttcatgtcaaggaagatggcacctccgtaaccgtgttcgaaagtgccgcttgcttgctctacattgctagtgagtttgacgaggagcacatgatttcatacccctttggtacagcagaatattggacacagttgtcctgggtaggctaccctctccctttcttcgccggaaatccactgatcctccgttcgcagctctcgtggcaaatagcaagctatggaccgtcgatgggtcaagcagtttatttcaatcgatatgcaactgagcccgtgccacatggctcctggcgccatacttcagagtcccgacggcttcatcacgttcttaatgagcgactgtcggtatctccattcgtcgctggggaacgtctcacaattgcggacttcgctatcttcatatttgctcattctgctaagtggtgtggcatcgatatcaaccagtatgctcatgtcaaagcgtggcatgacaagctggcacagcgcccggcgttccagatggctt

SEQ ID NO: 33864 - DNA, 441 bp, Muscodor strobelii
  misc_feature: SGI cDNA ID NO. 571690
  misc_feature: Encodes the peptide sequence at SEQ ID NO 33865
atggagtcaaagcaggacaactcctcgggcggaaggaaagctccgaaaccatttgttacgatcaaagccgccagaattgctctgaacgaatccctgctcgcagtgaacacctccgaactagccaggaatgaattaaagatggccgagttgatgtccaagattgatcaactgagagccaagctcgccgagggagacaaagaagttgctcagatgggtgccaagatagaggccaatgagaaggccgctgtcactgatgctgccaagcaagctgtaatccaagaaattcgagccctgactgcgaaggaagaggccttggtggccttggtcaataatctcaaggctgagattgacgcttgccaagctctttcggagatccagatggatctattgaagaagcaggaccaactcgtagctgagggttgggctcttctcgaagagtaa

SEQ ID NO: 33865 - protein, 146 aa, Muscodor strobelii
  misc_feature: SGI Peptide ID NO. 571690
MESKQDNSSGGRKAPKPFVTIKAARIALNESLLAVNTSELARNELKMAELMSKIDQLRAKLAEGDKEVAQMGAKIEANEKAAVTDAAKQAVIQEIRALTAKEEALVALVNNLKAEIDACQALSEIQMDLLKKQDQLVAEGWALLEE

SEQ ID NO: 33866 - DNA, 885 bp, Muscodor strobelii
  misc_feature: SGI cDNA ID NO. 571691
  misc_feature: Encodes the peptide sequence at SEQ ID NO 33867
atggcagagtcacaggaagaacagaagcacgagcttgccaatcacctcaggcttcgcacttctcccgcgatgcaggctgatgagtcttcacccgaagcggcaaagcagcccaacaggatggcaggcatcgagagtacacaacacccgcaccctttcagtgtccagcagcagtctgcccgacaccaattcccaccccatctccgacaacatggccatgacggaatgatcggagactcgcgcaccccatggggcgaaggaggccagaaattcacgggaatctcaccggatgctgctacgtccatctacaccacggaacgagtgaataagagaacacctaccaccactgccccagccggcaggcccaatgacttagttgtcaagtcagaggcttggatcgctcacatcgctaagcagactccggttctgaccataagagagaagaccggttcaaccacccctcatgctctctgcgctactgcttctaacgttgctgattcaaatgttgctgcttctaacaccgctgctaccgacaccactaccctacacggttctgtcctaatcgctggtatcattaatttggtccgcaccattgatgacaagaaggccagattagaggctctccgtctattccatgataccctgatcacaatcctcaagaatgagaagaatatccgcgaaatgaaagctgccctcgagaccaagacagctcagctcaatgcatctgtggatgctggcaagagtcagcaagccgtcgctgcaaagcctttgctagatgataaacctgagaaggaagatattggtttgattgccatgatcaaggagctagatggtatgattgtgtccgagcactggcgtgaggaggttgctaaaaatgaggataaatag

SEQ ID NO: 33867 - protein, 294 aa, Muscodor strobelii
  misc_feature: SGI Peptide ID NO. 571691
MAESQEEQKHELANHLRLRTSPAMQADESSPEAAKQPNRMAGIESTQHPHPFSVQQQSARHQFPPHLRQHGHDGMIGDSRTPWGEGGQKFTGISPDAATSIYTTERVNKRTPTTTAPAGRPNDLVVKSEAWIAHIAKQTPVLTIREKTGSTTPHALCATASNVADSNVAASNTAATDTTTLHGSVLIAGIINLVRTIDDKKARLEALRLFHDTLITILKNEKNIREMKAALETKTAQLNASVDAGKSQQAVAAKPLLDDKPEKEDIGLIAMIKELDGMIVSEHWREEVAKNEDK

SEQ ID NO: 33868 - DNA, 1062 bp, Muscodor strobelii
  misc_feature: SGI cDNA ID NO. 571692
  misc_feature: Encodes the peptide sequence at SEQ ID NO 33869
atgtcgttctccttttcgtttgctggtgaagacatcgaagatgatggcgacagcaagcagccagcagcgaatcagccttcaacttcgacaagcgcgtttcctgtggcagggaagccattactacctgccataaaccatgacacgacggaaatgctatctcaattaccgtcgaaggtggcattcagcttcctcgatgtcgaccttgacgaccaagggaaaattcagctacctcgccgcgagctttgggacgtgcgcgttcagctgatggctgaagagggtggaggcgaaacggaaccgggtctaggcacacatgatgtaaagactggagtctacgaagggggcttcaagtcttgggagagtagcgtggatcttgtcaaggtcctcgccgcatctaatccgttttcaattacaatgcccagaatttcaagaattgtcgagttaggttgtggcacagccttaccttcgttggctctcttccaatgggcgatgacttcggcggcctcttcactgtctattattctagccgactacaacccaacagtcctgcaacttgtgacgttgccaaatttcatcttgacctgggctattcaccatcgtggtgaattggctgttctcaatgatgctttctcggaggaaggggaacttgaccttacaccggaggtccttcaagccttccaagccttcctcctagcacgccgaatttctctctccttcttctccggcgcctggtcttccgagttcattgaactttttgccaatgttcagacccatacgagcggatcaaatgcacaacagtccacaatcgtcttgggcgcagagaccatctactctccattcgctttaagctctttcttacagactatcctcactctgctgcagcgcgaaagggaccaagcgcgtatggccgccgtgctagtgggtgcaaaaaagctctactttggcgtcggcggctctttggatgactttgttgtccaagctcgcgaacaaggtgctattgtcgagtctctacgagaggagacggagggagtacgcagaggcgtcgttcgttgtactttaccttga

SEQ ID NO: 33869 - protein, 353 aa, Muscodor strobelii
  misc_feature: SGI Peptide ID NO. 571692
  misc_feature (1)..(352): NCBI GI: 46108946 Blast Desc: FG01355.1 [Gibberella zeae PH-1]
  misc_feature (3)..(352): NCBI GI: 164428714 Blast Desc: NCU00956 [Neurospora crassa OR74A] gi|157072252|gb|EAA35913.2| conserved [Neurospora crassa OR74A]
  misc_feature (1)..(352): NCBI GI: 256734297 Blast Desc: [Nectria haematococca mpVI 77-13-4]
  misc_feature (3)..(352): NCBI GI: 38567028 Blast Desc: conserved [Neurospora crassa]
  misc_feature (1)..(352): NCBI GI: 116180558 Blast Desc: CHGG_00907 [Chaetomium globosum CBS 148.51] gi|88185204|gb|EAQ92672.1| CHGG_00907 [Chaetomium globosum CBS 148.51]
  misc_feature (1)..(352): NCBI GI: 171687719 Blast Desc: protein product [Podospora anserina] gi|170943821|emb|CAP69473.1| protein product [Podospora anserina]
  misc_feature (3)..(353): NCBI GI: 39974657 Blast Desc: MGG_00525 [Magnaporthe grisea 70-15] gi|145018575|gb|EDK02854.1| MGG_00525 [Magnaporthe grisea 70-15]
  misc_feature (2)..(310): NCBI GI: 261356361 Blast Desc: Mni1p [Verticillium albo-atrum VaMs.102]
  misc_feature (3)..(350): NCBI GI: 154308960 Blast Desc: BC1G_08008 [Botryotinia fuckeliana B05.10] gi|150852634|gb|EDN27826.1| BC1G_08008 [Botryotinia fuckeliana B05.10]
  misc_feature (73)..(348): NCBI GI: 156063156 Blast Desc: SS1G_01694 [Sclerotinia sclerotiorum 1980] gi|154697030|gb|EDN96768.1| SS1G_01694 [Sclerotinia sclerotiorum 1980]
MSFSFSFAGEDIEDDGDSKQPAANQPSTSTSAFPVAGKPLLPAINHDTTEMLSQLPSKVAFSFLDVDLDDQGKIQLPRRELWDVRVQLMAEEGGGETEPGLGTHDVKTGVYEGGFKSWESSVDLVKVLAASNPFSITMPRISRIVELGCGTALPSLALFQWAMTSAASSLSIILADYNPTVLQLVTLPNFILTWAIHHRGELAVLNDAFSEEGELDLTPEVLQAFQAFLLARRISLSFFSGAWSSEFIELFANVQTHTSGSNAQQSTIVLGAETIYSPFALSSFLQTILTLLQRERDQARMAAVLVGAKKLYFGVGGSLDDFVVQAREQGAIVESLREETEGVRRGVVRCTLP

SEQ ID NO: 33870 - DNA, 2159 bp, Muscodor strobelii
  misc_feature: SGI EST ID NO. CUFF.80137.2
  misc_feature: Variant of the nucleotide sequence at SEQ ID NO 33868
agaaaaagccatgcagtaatgtgatgggcatgaaacgtgtcgatcgaattcgaattcgaaggtttataaattttcctatcagaaattagattcacgcggtctatcaatctgtcatcctcatgtcgttctccttttcgtttgctggtgaagacatcgaagatgatggcgacagcaagcagccagcagcgaatcagccttcaacttcgacaagcgcgtttcctgtggcagggaagccattactacctgccataaaccatgacacgacggaaatgctatctcaattaccgtcgaaggtggcattcagcttcctcgatgtcgaccttgacgaccaagggaaaattcagctacctcgccgcgagctttgggacgtgcgcgttcagctgatggctgaagagggtggaggcgaaacggaaccgggtctaggcacacatgatgtaaagactggagtctacgaagggggcttcaagtcttgggagagtagcgtggatcttgtcaaggtcctcgccgcatctaatccgttttcaattacaatgcccagaatttcaagaattgtcgagttaggttgtggcacagccttaccttcgttggctctcttccaatgggcgatgacttcggcggcctcttcactgtctattattctagccgactacaacccaacagtcctgcaacttgtgacgttgccaaatttcatcttgacctgggctattcaccatcgtggtgaattggctgttctcaatgatgctttctcggaggaaggggaacttgaccttacaccggaggtccttcaagccttccaagccttcctcctagcacgccgaatttctctctccttcttctccggcgcctggtcttccgagttcattgaactttttgccaatgttcagacccatacgagcggatcaaatgcacaacagtccacaatcgtcttgggcgcagagaccatctactctccattcgctttaagctctttcttacagactatcctcactctgctgcagcgcgaaagggaccaagcgcgtatggccgccgtgctagtgggtgcaaaaaagctctactttggcgtcggcggctctttggatgactttgttgtccaagctcgcgaacaaggtgctattgtcgagtctctacgagaggagacggagggagtacgcagaggcgtcgttcgttgtactttaccttgaagccgcggcattcaagacgttcaagcatgtttccgaggaaacatgttcacctcccaactagcaaccatcagtttcactgaaacgtgccaactatgctacaaccatcaatggccgctacaactgttagcgatcagtgggagcaccggatcatgtctggactcaaccgccgagatcgcttcttgatacaccatggcaactgttcaggcagagaatgcttgtgcaagagttacttgaaaatcctattgccataaccgtaccaatggtgggacataagggggaccaaagtaccacgagccattgttcacgtcggcagtttgatagaacaagtatcatggtccgggcgtaagtctccgagcccgtcacggatagaatcccaatggttgggatgaacttaggtacatacttccgttgtgttagaattgatatgtgcacgctgggtttacggccgagccttgccggcggtgtgaaacttgtctcgaagaggtgagatgccgacacagatttcaactgtggcatccgcatacgatgccttcctacatacgttctacgaggcagccaccttaaaattcgacacgaagtgcagacgcaattctaggttctgtcggtcgccggtggttgtatgctcattaaggtgacttgaagggatgagatgaattatgcttgcttcctgcaaatcttcaataacagacacatacctcgttcacacgtatttgtggttggatatgggtggctgctagtactctgctcgtcgggtctaggcctatgaaaaggggaaacagccaatgagagtgtgaatctatgaagccaattcaatgcctcgatctagaattgacccctgcaggagacatgcagactccacatctgaccttgacgcatcgagtgcatgcagctcgaaactgtcgcaattgagctactacagcactgcctcttcttagcgatctgttgtcttaccaaagagacgaattggtatttgtgtcg

SEQ ID NO: 33871 - DNA, 1797 bp, Muscodor strobelii
  misc_feature: SGI cDNA ID NO. 571693
  misc_feature: Encodes the peptide sequence at SEQ ID NO 33872
atgacccgattgagattcacctcgcatgccccgaaccataatacgagtattacgagagaattcaatagcactaacatcaagtgtggtcatacagcacgaggaaattactcagtcctggagcaacctctgggtactactaaacatgtccggatcgttggtatcggcgccggtgccagcggtctcaacatgatacggacgttgaggcgaaatctgagcaactacgagcacgttgtatacgaaaagaacagcaaagtaggcggcacatggtttgagaaccgctatcctggctgcaaatgtgacgtgccaagtcacaactaccaattttcttggagacagaatcctgaatggtcaaactttttctctccagctggagagatagaagagtaccttgataccatttgcgaagaggagcatatgctggataccattaagacatgtcatcgcgtagttggggcatggtgggacgaatctcgaggcttatgggatctcaaagtgcaaaacctggagaccggcgaggagttcaaggaccatgctaattttctcatcgatgcctccggaatcttaaacaattggagatggccttcaatacccaatttgaactcatttcagggagatttgatacatacggcaaactggcccaaaaacttcgactatgccaacaaaaccgtagctgtaatcggcaatggctcatccggcatccaactcgtaccagctatccacccagctatcaagaaactcgtacacttcgttcgcacacccacatggattcttcctcctcgcatcatggccatgatgatgatgaaaagtcctgccgcgccaatgctagctcagctcgagcttgacgaaaaggaaaacttcagtgcggcgcagatggagaagttcaagaacgatcctgtattctacaaggatttcgtcaagactatagaacgggacatcaatggcgcattccctatgctcctcaatggtggacaaatccagcagcttgtaacagccaaagtagtggagttcatgaagatgtgtctaggtggcgacgagaagctttgcaaagctctgattcccacgtatcctttaggctgccgtcggttgacgccagctcctggctaccttgaagctctgcgcaaacccaacaccgatgtaatcaccgaggctatcgctggaatcgttccagaaggcattcagctcgagtctggagaaatcatcaaattggatgccattatctgcgctactggatttgatacctctttcaccccacgtttccctcttgttggccggaacggtaacgtccaagacatattcaagaatgaaacaccgaggagctacatgtcgtgtgctctctctggcctgccaaattacttcacgataatgggcccaagtgcacccatcgggcatggcagtgtgttcacccttactgagcacattgctcggtacatcacacgaatcatcaagaagtgtcagactgaagggataaagtccatttgcccccaagatgcggcaattgtcgatttcagcgagcacatcgctgccttcatgcctcgtacctcttgggcagcctcttgctcatcttggttcaaaggtggtaaggtcgatggccccgtcacagccctccaccccgggagccgtatacactttttccacatgctcgagaacttccgcggggaggactgggagtacgtatatgactcgcgatccgccaaccgcttcaactatctcggtaatggcttttctaccaaggagtttgatcccaaaggcgactccacgtggtatttggagcccagcgcagatgctccgttactataa

SEQ ID NO: 33872 - protein, 598 aa, Muscodor strobelii
  misc_feature: SGI Peptide ID NO. 571693
  misc_feature (35)..(590): NCBI GI: 164428712 Blast Desc: NCU00955 [Neurospora crassa OR74A] gi|157072251|gb|EAA35912.2| [Neurospora crassa OR74A]
  misc_feature (35)..(590): NCBI GI: 38567027 Blast Desc: related to steroid monooxygenase [Neurospora crassa]
  misc_feature (36)..(590): NCBI GI: 116180562 Blast Desc: CHGG_00909 [Chaetomium globosum CBS 148.51] gi|88185206|gb|EAQ92674.1| CHGG_00909 [Chaetomium globosum CBS 148.51]
  misc_feature (35)..(593): NCBI GI: 171687721 Blast Desc: protein product [Podospora anserina] gi|170943822|emb|CAP69474.1| protein product [Podospora anserina]
  misc_feature (23)..(578): NCBI GI: 261356362 Blast Desc: phenylacetone monooxygenase [Verticillium albo-atrum VaMs.102]
  misc_feature (36)..(593): NCBI GI: 256720507 Blast Desc: NECHADRAFT_55865 [Nectria haematococca mpVI 77-13-4]
  misc_feature (35)..(590): NCBI GI: 60738772 Blast Desc: MoxY [Phaeomoniella chlamydospora]
  misc_feature (36)..(589): NCBI GI: 242799328 Blast Desc: monooxygenase, [Talaromyces stipitatus ATCC 10500] gi|218716700|gb|EED16121.1| monooxygenase, [Talaromyces stipitatus ATCC 10500]
  misc_feature (39)..(597): NCBI GI: 169613494 Blast Desc: SNOG_09878 [Phaeosphaeria nodorum SN15] gi|111062023|gb|EAT83143.1| SNOG_09878 [Phaeosphaeria nodorum SN15]
  misc_feature (12)..(589): NCBI GI: 238481869 Blast Desc: dimethylaniline monooxygenase, [Aspergillus flavus NRRL3357] gi|220700223|gb|EED56561.1| dimethylaniline monooxygenase, [Aspergillus flavus NRRL3357]
  misc_feature (43)..(556): SWISSPROT Homolog: EC 1.14.13.84 4-hydroxyacetophenone monooxygenase
MTRLRFTSHAPNHNTSITREFNSTNIKCGHTARGNYSVLEQPLGTTKHVRIVGIGAGASGLNMIRTLRRNLSNYEHVVYEKNSKVGGTWFENRYPGCKCDVPSHNYQFSWRQNPEWSNFFSPAGEIEEYLDTICEEEHMLDTIKTCHRVVGAWWDESRGLWDLKVQNLETGEEFKDHANFLIDASGILNNWRWPSIPNLNSFQGDLIHTANWPKNFDYANKTVAVIGNGSSGIQLVPAIHPAIKKLVHFVRTPTWILPPRIMAMMMMKSPAAPMLAQLELDEKENFSAAQMEKFKNDPVFYKDFVKTIERDINGAFPMLLNGGQIQQLVTAKVVEFMKMCLGGDEKLCKALIPTYPLGCRRLTPAPGYLEALRKPNTDVITEAIAGIVPEGIQLESGEIIKLDAIICATGFDTSFTPRFPLVGRNGNVQDIFKNETPRSYMSCALSGLPNYFTIMGPSAPIGHGSVFTLTEHIARYITRIIKKCQTEGIKSICPQDAAIVDFSEHIAAFMPRTSWAASCSSWFKGGKVDGPVTALHPGSRIHFFHMLENFRGEDWEYVYDSRSANRFNYLGNGFSTKEFDPKGDSTWYLEPSADAPLL

SEQ ID NO: 33873 - DNA, 2139 bp, Muscodor strobelii
  misc_feature: SGI EST ID NO. CUFF.80353.1
  misc_feature: Variant of the nucleotide sequence at SEQ ID NO 33871
caatgaactatatctcagctctggttggccatttcatttgtcttaatattttcagctaagctctgcaattcgtccattgccgctttcaggacttcagctgcatacaagcataagcatcagcactgcattgagttcagattgcctataaatactagacgctgcgacttacgtagcaggatgactcgaattacgagtgataaagcacgaggaaattactcagtcctggagcaacctctgggtactactaaacatgtccggatcgttggtatcggcgccggtgccagcggtctcaacatgatacggacgttgaggcgaaatctgagcaactacgagcacgttgtatacgaaaagaacagcaaagtaggcggcacatggtttgagaaccgctatcctggctgcaaatgtgacgtgccaagtcacaactaccaattttcttggagacagaatcctgaatggtcaaactttttctctccagctggagagatagaagagtaccttgataccatttgcgaagaggagcatatgctggataccattaagacatgtcatcgcgtagttggggcatggtgggacgaatctcgaggcttatgggatctcaaagtgcaaaacctggagaccggcgaggagttcaaggaccatgctaattttctcatcgatgcctccggaatcttaaacaattggagatggccttcaatacccaatttgaactcatttcagggagatttgatacatacggcaaactggcccaaaaacttcgactatgccaacaaaaccgtagctgtaatcggcaatggctcatccggcatccaactcgtaccagctatccacccagctatcaagaaactcgtacacttcgttcgcacacccacatggattcttcctcctcgcatcatggccatgatgatgatgaaaagtcctgccgcgccaatgctagctcagctcgagcttgacgaaaaggaaaacttcagtgcggcgcagatggagaagttcaagaacgatcctgtattctacaaggatttcgtcaagactatagaacgggacatcaatggcgcattccctatgctcctcaatggtggacaaatccagcagcttgtaacagccaaagtagtggagttcatgaagatgtgtctaggtggcgacgagaagctttgcaaagctctgattcccacgtatcctttaggctgccgtcggttgacgccagctcctggctaccttgaagctctgcgcaaacccaacaccgatgtaatcaccgaggctatcgctggaatcgttccagaaggcattcagctcgagtctggagaaatcatcaaattggatgccattatctgcgctactggatttgatacctctttcaccccacgtttccctcttgttggccggaacggtaacgtccaagacatattcaagaatgaaacaccgaggagctacatgtcgtgtgctctctctggcctgccaaattacttcacgataatgggcccaagtgcacccatcgggcatggcagtgtgttcacccttactgagcacattgctcggtacatcacacgaatcatcaagaagtgtcagactgaagggataaagtccatttgcccccaagatgcggcaattgtcgatttcagcgagcacatcgctgccttcatgcctcgtacctcttgggcagcctcttgctcatcttggttcaaaggtggtaaggtcgatggccccgtcacagccctccaccccgggagccgtatacactttttccacatgctcgagaacttccgcggggaggactgggagtacgtatatgactcgcgatccgccaaccgcttcaactatctcggtaatggcttttctaccaaggagtttgatcccaaaggcgactccacgtggtatttggagcccagcgcagatgctccgttactataaagaatctgcatggatgtaattgtgctgtttaggcgtttgtctatttgttacgacttaatgatgttctcctggatataaaccgttggtgcatacacggatgccagaatcatggtagactggcatacaagggcggactagcgatgagaatttacacacgtatataatggggtattttatagtctttgtataatgatgcaaataaatagaaggcaaccatgtttcttctctccgtgc

SEQ ID NO: 33874 - DNA, 999 bp, Muscodor strobelii
  misc_feature: SGI cDNA ID NO. 571694
  misc_feature: Reduced expression when VOC is produced
  misc_feature: Encodes the peptide sequence at SEQ ID NO 33875
atgtcggagaagcagcagaccgatgctgcgccgcctgcgcgcaaaagccacctgaagcgcttttggtggctctacttgatcgtgtttcttatcgtcgccgttgtaattgtggtacctgttgtattgttggtagcggtaccgaagatcgcgcaggacaagttgaacgctgccaccttgacgatagacggcatctcggtcacaaatgctaagtctaaatcatatactatgtcgatcaactcgacgatccacgcagactcgtcagtccatgctactgtcgatgccttcaccggctcgatgtatcttacctcggtcgacccgccgctgctcatctctacgatcgagttcccacagacatccactgcctccgtacagtctgtcaatgtgacccaggatatagatattgccgacgagtctgctttcacgactttcaacgagtatcttttggcaaacaagtctgtcagcgtgcaggtgaaaggagacacgcatgtgcacgtgtcaggcattgctcgtggttatggagtgaccttcgataagacactggaattggctggtcttaatggattccagggcatcaccgtcacagatgccaagatcagtctggcaactgataacaacttcaacggcacgactcacattccgaacccctctgtgttgacacttgacatcggcaacgtgactttcaccaactactacaatggtagtgccattggcaccacattcatcaaggacctcgttcttcgccctggcaacaactcatactccaccaacgcgactatcctacaagtgccgatcatcaacgcgctgactacggagcccgattgcaaattgaatggtgcactgcctttccaactttctggcaaagacgtcacgaacaatggcgaggaattggcgtatttcagagatacccttgcatctgccaatcagagcgtcactatcgacctgaaggacgcggccgaggctgttggcctcaaacctggctgccccaccaaatctacgtag

SEQ ID NO: 33875 - protein, 332 aa, Muscodor strobelii
  misc_feature: SGI Peptide ID NO. 571694
  misc_feature (1)..(314): NCBI GI: 256734449 Blast Desc: NECHADRAFT_74729 [Nectria haematococca mpVI 77-13-4]
  misc_feature (12)..(327): NCBI GI: 171684673 Blast Desc: protein product [Podospora anserina] gi|170942297|emb|CAP67949.1| protein product [Podospora anserina]
  misc_feature (1)..(327): NCBI GI: 261356275 Blast Desc: conserved [Verticillium albo-atrum VaMs.102]
  misc_feature (1)..(327): NCBI GI: 46108288 Blast Desc: FG01026.1 [Gibberella zeae PH-1]
  misc_feature (9)..(317): NCBI GI: 116192563 Blast Desc: CHGG_05999 [Chaetomium globosum CBS 148.51] gi|88181912|gb|EAQ89380.1| CHGG_05999 [Chaetomium globosum CBS 148.51]
  misc_feature (5)..(327): NCBI GI: 39975041 Blast Desc: MGG_00333 [Magnaporthe grisea 70-15] gi|145018782|gb|EDK03061.1| MGG_00333 [Magnaporthe grisea 70-15]
  misc_feature (3)..(327): NCBI GI: 85089528 Blast Desc: NCU07363 [Neurospora crassa OR74A] gi|28919291|gb|EAA28755.1| conserved [Neurospora crassa OR74A]
  misc_feature (3)..(324): NCBI GI: 255939087 Blast Desc: Pc15g00880 [Penicillium chrysogenum Wisconsin 54-1255] gi|211584935|emb|CAP82974.1| Pc15g00880 [Penicillium chrysogenum Wisconsin 54-1255]
  misc_feature (15)..(323): NCBI GI: 169603393 Blast Desc: SNOG_04706 [Phaeosphaeria nodorum SN15] gi|111067346|gb|EAT88466.1| SNOG_04706 [Phaeosphaeria nodorum SN15]
  misc_feature (9)..(314): NCBI GI: 258566101 Blast Desc: [Uncinocarpus reesii 1704] gi|237907496|gb|EEP81897.1| [Uncinocarpus reesii 1704]
  misc_feature: Useful for introducing or modulating the production of volatile compounds
MSEKQQTDAAPPARKSHLKRFWWLYLIVFLIVAVVIVVPVVLLVAVPKIAQDKLNAATLTIDGISVTNAKSKSYTMSINSTIHADSSVHATVDAFTGSMYLTSVDPPLLISTIEFPQTSTASVQSVNVTQDIDIADESAFTTFNEYLLANKSVSVQVKGDTHVHVSGIARGYGVTFDKTLELAGLNGFQGITVTDAKISLATDNNFNGTTHIPNPSVLTLDIGNVTFTNYYNGSAIGTTFIKDLVLRPGNNSYSTNATILQVPIINALTTEPDCKLNGALPFQLSGKDVTNNGEELAYFRDTLASANQSVTIDLKDAAEAVGLKPGCPTKST

SEQ ID NO: 33876 - DNA, 2107 bp, Muscodor strobelii
  misc_feature: SGI EST ID NO. CUFF.80119.0
  misc_feature: Variant of the nucleotide sequence at SEQ ID NO 33874
cctgaacctccttctctttgcgatcgtggatttgcagagctagtgcacgtaaagccacccgtggcgatcgggatgcctctcgcttcgtccgtcatttttgttccctgtaaaagagacttgtccatatcagcattgtttgtgtcgacagacacatcgtgagctaggatcggttcggctccattgtaactgcagtatggggacggagcgcagcaccaaggcgataccaaggcgatagacatttgtccttgcctgttcctgtcgaactgcccgtacatagacagatacatgggagcaccttctccattattgtgcatccagtggccaacggcaatcacaagcgaatggagtgacatgcgcgcatgccgtgactgatgaacatcgatggtccatattatcttcaactaaccctgtgcacgtctcgctctggatctttctccctcttcttcgacgttgagattgtgcctatgacatcttcgcccgggctgctgggacctagaacggactaacagacttcttcttctttcactcctcagtactctcttccatactttcgttaattccctgtcgagatgtcggagaagcagcagaccgatgctgcgccgcctgcgcgcaaaagccacctgaagcgcttttggtggctctacttgatcgtgtttcttatcgtcgccgttgtaattgtggtacctgttgtattgttggtagcggtaccgaagatcgcgcaggacaagttgaacgctgccaccttgacgatagacggcatctcggtcacaaatgctaagtctaaatcatatactatgtcgatcaactcgacgatccacgcagactcgtcagtccatgctactgtcgatgccttcaccggctcgatgtatcttacctcggtcgacccgccgctgctcatctctacgatcgagttcccacagacatccactgcctccgtacagtctgtcaatgtgacccaggatatagatattgccgacgagtctgctttcacgactttcaacgagtatcttttggcaaacaagtctgtcagcgtgcaggtgaaaggagacacgcatgtgcacgtgtcaggcattgctcgtggttatggagtgaccttcgataagacactggaattggctggtcttaatggattccagggcatcaccgtcacagatgccaagatcagtctggcaactgataacaacttcaacggcacgactcacattccgaacccctctgtgttgacacttgacatcggcaacgtgactttcaccaactactacaatggtagtgccattggcaccacattcatcaaggacctcgttcttcgccctggcaacaactcatactccaccaacgcgactatcctacaagtgccgatcatcaacgcgctgactacggagcccgattgcaaattgaatggtgcactgcctttccaactttctggcaaagacgtcacgaacaatggcgaggaattggcgtatttcagagatacccttgcatctgccaatcagagcgtcactatcgacctgaaggacgcggccgaggctgttggcctcaaacctggctgccccaccaaatctacgtagactgcctgggcactataagatattgagtgagaacactgagggcatatgatagggacatgggttcgtaaggcacagagtttcgattacttggggaaatcaatggcaaaactatgtctggctgctgaggaaatctgatgcattagtgggcaggcaggacacgaattacatggcattgccgaataagacaatgctcagaacaacgaattctacggcgtcttatttcccatcataattcgaaccgttattcgaatttattcccgaataactactaagccatatctgtagataagacttgactaaacagtgtgtattttacgagatcacttgctggcgttgttaggaacacccaaatgggcatatcagttattttgtcaacggtctggcagcgaagcgggcttctgtccacggacgggtgactagagcattaccatcacacaaatcattgctattgatatccttactagtaggtcattcaacaaaataacagacacaaagtttgcatgttccgaatgagtcgtatgcgcagatatcttctcgta

SEQ ID NO: 33877 - DNA, 1638 bp, Muscodor strobelii
  misc_feature: SGI cDNA ID NO. 571695
  misc_feature: Encodes the peptide sequence at SEQ ID NO 33878
atggataggctgacaggcaaggacaggtgcgtagaaggcatccgcgatcgcttacagaccgctaacccaccccatatctccactaattctccaatcctaggggtggctaccatctccaccgcctccaaagacatgcagtttgctatgacgacggcgcagaggaaggtcttagttgccaagcacacctcgccagatagctgctgggtggtcctttacggcgatgtatatgacttgaccgagtttttgccatcacatccaggtggctccaagatcattctgcagcttgcaggtagcgatgcgacggaagaatatgaccccatccatcctccgggtacactcgaggataacctaaagcccgaagccaaactaggacgacttgatcctgctacggtcactcagacctcccaacccgcggccaaagaggaagcaacgccagaaaaagatagcgtgccgcccatggagcatctactaaatcttgatgagatcgagtcggtcgccacaaagcggatacccgagaaggcatgggcctactattactcagccagcgacgacatgtggaccaagacgaataacaacactgcatatcgggatatcttgctacggccacgcgttttcatggactgcactcaatgtgatacttctactacactgttgggtggtcagtacaaggttgatgtgcccatatttgttgcaccagccgctatggcgcgtctcgcacaccctgatggcgagcaaggtatagcaagagcttgtgctcgtttcggggcgatgcaggtcatctcgaataacgcatcaatgacgcccgaacagatcgtggcagacgccaagccaggccaggtatttgggtggcagttgtacgtacaaaacaacaggcctaagagcgaggcgatgctcgcccgtatcaacaagatgaaagaccaatttaagttcatatgtcttacccttgacgcgcccgttccagggaaacgtgagatcgatgaaaggcagggattcaagaacaagacgaaggtcgcgtctggagtcaagacgaaggatgaacccgagcgtcctggcggcggcggcgtcgggcagcagcttttctggggtacggccgcggacctcacgtggaagataacactaccttggcttgcgaagcacacagatctccctattgttgtgaaggggcttcagacacatgaggatgcttatctagctgccaaatacgcaccgcaagtcaaagccgtgattctatcaaatcatggtgggcgtgctctggacacagcgcccccggctgtacacaccttgcttgaaattcgaaaatactgtcctgaagtattcaatcacgtcgatgtgtgggtcgatggcggtataaaacgtggtactgatgttgtcaaggcgctcgctctgggagcaaaagccgttggcattggcagggcagcgttgtttggccttggagcagcgggacaggagggtgtagagcgaacgtttgaaattctgaaagccgaaaccgaaacgtgcatgaaacttctcggtgtcaagaccatcgccgagcttggcccgcagcatatcaatacaaggaaggttgagagagatatctttgacggcgatgcaaacttggagacatttgggttgtgggacaaggtgaagtcaaagttatga

SEQ ID NO: 33878 - protein, 545 aa, Muscodor strobelii
  misc_feature: SGI Peptide ID NO. 571695
  misc_feature (52)..(127): Pfam Id: PF00173 Pfam Desc: Cytochrome b5-like Heme/Steroid binding domain
  misc_feature (166)..(518): Pfam Id: PF01070 Pfam Desc: FMN-dependent dehydrogenase
  misc_feature (58)..(127): Pfam Id: PF00173 Pfam Desc: Cytochrome b5-like Heme/Steroid binding domain
  misc_feature (440)..(478): Pfam Id: PF01645 Pfam Desc: Conserved region in glutamate synthase
  misc_feature (58)..(542): NCBI GI: 46108290 Blast Desc: FG01027.1 [Gibberella zeae PH-1]
  misc_feature (58)..(542): NCBI GI: 256734448 Blast Desc: [Nectria haematococca mpVI 77-13-4]
  misc_feature (58)..(538): NCBI GI: 85089526 Blast Desc: NCU07362 [Neurospora crassa OR74A] gi|28919290|gb|EAA28754.1| NCU07362 [Neurospora crassa OR74A]
  misc_feature (58)..(542): NCBI GI: 145611506 Blast Desc: MGG_00335 [Magnaporthe grisea 70-15] gi|145018780|gb|EDK03059.1| MGG_00335 [Magnaporthe grisea 70-15]
  misc_feature (58)..(528): NCBI GI: 169596887 Blast Desc: SNOG_01213 [Phaeosphaeria nodorum SN15] gi|111069742|gb|EAT90862.1| SNOG_01213 [Phaeosphaeria nodorum SN15]
  misc_feature (52)..(542): NCBI GI: 119196201 Blast Desc: CIMG_02475 [Coccidioides immitis RS]
  misc_feature (46)..(545): NCBI GI: 116192565 Blast Desc: CHGG_06000 [Chaetomium globosum CBS 148.51] gi|88181913|gb|EAQ89381.1| CHGG_06000 [Chaetomium globosum CBS 148.51]
  misc_feature (49)..(540): NCBI GI: 154298987 Blast Desc: L-lactate ferricytochrome c oxidoreductase [Botryotinia fuckeliana B05.10] gi|150857509|gb|EDN32701.1| L-lactate ferricytochrome c oxidoreductase [Botryotinia B05.10]
  misc_feature (49)..(540): NCBI GI: 156058067 Blast Desc: SS1G_04765 [Sclerotinia sclerotiorum 1980] gi|154702550|gb|EDO02289.1| SS1G_04765 [Sclerotinia sclerotiorum 1980]
  misc_feature (58)..(545): NCBI GI: 171684671 Blast Desc: protein product [Podospora anserina] gi|170942296|emb|CAP67948.1| protein product [Podospora anserina]
  misc_feature (58)..(517): SWISSPROT Homolog: EC 1.1.2.3 L-lactate dehydrogenase (cytochrome)
MDRLTGKDRCVEGIRDRLQTANPPHISTNSPILGVATISTASKDMQFAMTTAQRKVLVAKHTSPDSCWVVLYGDVYDLTEFLPSHPGGSKIILQLAGSDATEEYDPIHPPGTLEDNLKPEAKLGRLDPATVTQTSQPAAKEEATPEKDSVPPMEHLLNLDEIESVATKRIPEKAWAYYYSASDDMWTKTNNNTAYRDILLRPRVFMDCTQCDTSTTLLGGQYKVDVPIFVAPAAMARLAHPDGEQGIARACARFGAMQVISNNASMTPEQIVADAKPGQVFGWQLYVQNNRPKSEAMLARINKMKDQFKFICLTLDAPVPGKREIDERQGFKNKTKVASGVKTKDEPERPGGGGVGQQLFWGTAADLTWKITLPWLAKHTDLPIVVKGLQTHEDAYLAAKYAPQVKAVILSNHGGRALDTAPPAVHTLLEIRKYCPEVFNHVDVWVDGGIKRGTDVVKALALGAKAVGIGRAALFGLGAAGQEGVERTFEILKAETETCMKLLGVKTIAELGPQHINTRKVERDIFDGDANLETFGLWDKVKSKL

SEQ ID NO: 33879 - DNA, 2186 bp, Muscodor strobelii
  misc_feature: SGI EST ID NO. CUFF.80128.0
  misc_feature: Variant of the nucleotide sequence at SEQ ID NO 33877
tatcgggaaatcgatttaggagcggaagagaatgaagccatctccggcgataatagcctcattcgctgcaaatgtaggtaggtatccaatttccagcttcatcagccaatacaaaccgcgatggataggctgacaggcaaggacaggtgcgtagaaggcatccgcgatcgcttacagaccgctaacccaccccatatctccactaattctccaatcctaggggtggctaccatctccaccgcctccaaagacatgcagtttgctatgacgacgggtgagatactgccgaaacccacgagagcttcacctttgattccatagtctctctttctccattcttatacttccttcgcattgatctcgaccaccggtttgtatccgaagaacaaaattctgtgtccattggcggccttcgattaaacaactcgatcacctaaattgaccattgacttcaaaaatcaacgtcagactcgtcaagattgctcaagatagcaattcgtgcccagtcgagtttgtggtaatattgcaagatggcggacaaattaattagcgcagaggaagttgccaagcacacctcgccagatagctgctgggtggtcctttacggcgatgtatatgacttgaccgagtttttgccatcacatccaggtggctccaagatcattctgcagcttgcaggtagcgatgcgacggaagaatatgaccccatccatcctccgggtacactcgaggataacctaaagcccgaagccaaactaggacgacttgatcctgctacggtcactcagacctcccaacccgcggccaaagaggaagcaacgccagaaaaagatagcgtgccgcccatggagcatctactaaatcttgatgagatcgagtcggtcgccacaaagcggatacccgagaaggcatgggcctactattactcagccagcgacgacatgtggaccaagacgaataacaacactgcatatcgggatatcttgctacggccacgcgttttcatggactgcactcaatgtgatacttctactacactgttgggtggtcagtacaaggttgatgtgcccatatttgttgcaccagccgctatggcgcgtctcgcacaccctgatggcgagcaaggtatagcaagagcttgtgctcgtttcggggcgatgcaggtcatctcgaataacgcatcaatgacgcccgaacagatcgtggcagacgccaagccaggccaggtatttgggtggcagttgtacgtacaaaacaacaggcctaagagcgaggcgatgctcgcccgtatcaacaagatgaaagaccaatttaagttcatatgtcttacccttgacgcgcccgttccagggaaacgtgagatcgatgaaaggcagggattcaagaacaagacgaaggtcgcgtctggagtcaagacgaaggatgaacccgagcgtcctggcggcggcggcgtcgggcagcagcttttctggggtacggccgcggacctcacgtggaagataacactaccttggcttgcgaagcacacagatctccctattgttgtgaaggggcttcagacacatgaggatgcttatctagctgccaaatacgcaccgcaagtcaaagccgtgattctatcaaatcatggtgggcgtgctctggacacagcgcccccggctgtacacaccttgcttgaaattcgaaaatactgtcctgaagtattcaatcacgtcgatgtgtgggtcgatggcggtataaaacgtggtactgatgttgtcaaggcgctcgctctgggagcaaaagccgttggcattggcagggcagcgttgtttggccttggagcagcgggacaggagggtgtagagcgaacgtttgaaattctgaaagccgaaaccgaaacgtgcatgaaacttctcggtgtcaagaccatcgccgagcttggcccgcagcatatcaatacaaggaaggttgagagagatatctttgacggcgatgcaaacttggagacatttgggttgtgggacaaggtgaagtcaaagttatgaggcaaccctcaatgatgcaggatattagaccctcgaagcatgtagttgataaacttgtggtatctctatgaccgacatattaatacttagaaagacttacgagatgtatgaattacatttatcatctatgttagttcaagttctatccttttaccagcg

SEQ ID NO: 33880 - DNA, 1173 bp, Muscodor strobelii
  misc_feature: SGI cDNA ID NO. 571696
  misc_feature: Encodes the peptide sequence at SEQ ID NO 33881
atgacggctttgggtggtgtcgacataacactaagcttccctcgtcctgtaccaccaaccgcacggattttccgtcacttattcttgggagagttagaaactattagggatttattctcagttggcttggcctctccatgggacggaaccaccgcacttcactatgccgtttcctcctgcaatgagaagacgatccattatttgctcaataagggtgcgaatcgcagcacgagagatgccacgggacgctccgcgattcaagaaggctggactatgttactaaccaactccgtgtcggcctcgaaacgaaaagtactggaagctatctgtgatcctgacgacttagaggatttcgaatttccggatctccaccgcagcgttcttcgtgttagtcatgatagcgtagaaagctcacttagggccttgatgctctcctctgctaccatcgaggacactgatgtccacgataaaacagcgctcttatgggccgccgagtcgggcgatgcccacgccgtgcgccttcttctcgatcatggcgctaatcccaatcatatcgcgaaagggcgaagtaacctgcttgcattggttggacacagtgatttagagcttaccgatattaacggacggaccgctgcattccatgctgcgagcgcaggcgtcatcccactctcaatcttaatcgaggccggctgcaatgtgaatcatgcagatgataaaggaattacggcacttcatctcgccgtctcttataatcgcagtggcgtactacggatgcttctcggtgctggtgcggattaccaagcgcgagtctcaggatccgatgacacgtttttgcacctaattgcgcagcatagcacctctgaaattatggatgaattgcggacgtgtcatttagctggtcttgacgtcaatcgtatcaacagcgacgggtgtacacccttggaccacctggaaaagaggttaccagaagcaacctcggaagttttcgaggccttctctaagctgtgtatgcatatagagacacagactaccatgatggtcagtccgacggagaatcctgcccagcgcagcgtctctgacagcgatgcgagtgcagtagaatgggaaactgcctccgagggcgggagtgataagtcagatactcttcgaagccccttagacgaccgcctttaa

SEQ ID NO: 33881 - protein, 390 aa, Muscodor strobelii
  misc_feature: SGI Peptide ID NO. 571696
  misc_feature (48)..(80): Pfam Id: PF00023 Pfam Desc: Ankyrin repeat
  misc_feature (155)..(187): Pfam Id: PF00023 Pfam Desc: Ankyrin repeat
  misc_feature (239)..(271): Pfam Id: PF00023 Pfam Desc: Ankyrin repeat
  misc_feature (6)..(294): NCBI GI: 238844076 Blast Desc: TPR Domain containing protein [Microsporum canis CBS 113480]
  misc_feature (47)..(314): NCBI GI: 123482602 Blast Desc: ankyrin repeat protein [Trichomonas vaginalis G3] gi|121906709|gb|EAY11614.1| ankyrin repeat protein, [Trichomonas vaginalis G3]
  misc_feature (48)..(329): NCBI GI: 123444605 Blast Desc: ankyrin repeat protein [Trichomonas vaginalis G3] gi|121892867|gb|EAX98141.1| ankyrin repeat protein, [Trichomonas vaginalis G3]
  misc_feature (32)..(319): NCBI GI: 123498830 Blast Desc: ankyrin repeat protein [Trichomonas vaginalis G3] gi|121910415|gb|EAY15262.1| ankyrin repeat protein, [Trichomonas vaginalis G3]
  misc_feature (48)..(302): NCBI GI: 123506713 Blast Desc: ankyrin repeat protein [Trichomonas vaginalis G3] gi|121912212|gb|EAY17036.1| ankyrin repeat protein, [Trichomonas vaginalis G3]
  misc_feature (48)..(329): NCBI GI: 123480790 Blast Desc: ankyrin repeat protein [Trichomonas vaginalis G3] gi|121906277|gb|EAY11190.1| ankyrin repeat protein, [Trichomonas vaginalis G3]
  misc_feature (51)..(329): NCBI GI: 154414622 Blast Desc: ankyrin repeat protein [Trichomonas vaginalis G3] gi|121914554|gb|EAY19352.1| ankyrin repeat protein, [Trichomonas vaginalis G3]
  misc_feature (48)..(316): NCBI GI: 123447455 Blast Desc: ankyrin repeat protein [Trichomonas vaginalis G3] gi|121894315|gb|EAX99537.1| ankyrin repeat protein, [Trichomonas vaginalis G3]
  misc_feature (48)..(314): NCBI GI: 123507472 Blast Desc: ankyrin repeat protein [Trichomonas vaginalis G3] gi|121912377|gb|EAY17199.1| ankyrin repeat protein, [Trichomonas vaginalis G3]
  misc_feature (49)..(316): NCBI GI: 123475671 Blast Desc: ankyrin repeat protein [Trichomonas vaginalis G3] gi|121903829|gb|EAY08789.1| ankyrin repeat protein, [Trichomonas vaginalis G3]
  misc_feature (30)..(272): SWISSPROT Homolog: EC 2.4.2.30 NAD(+) ADP-ribosyltransferase
MTALGGVDITLSFPRPVPPTARIFRHLFLGELETIRDLFSVGLASPWDGTTALHYAVSSCNEKTIHYLLNKGANRSTRDATGRSAIQEGWTMLLTNSVSASKRKVLEAICDPDDLEDFEFPDLHRSVLRVSHDSVESSLRALMLSSATIEDTDVHDKTALLWAAESGDAHAVRLLLDHGANPNHIAKGRSNLLALVGHSDLELTDINGRTAAFHAASAGVIPLSILIEAGCNVNHADDKGITALHLAVSYNRSGVLRMLLGAGADYQARVSGSDDTFLHLIAQHSTSEIMDELRTCHLAGLDVNRINSDGCTPLDHLEKRLPEATSEVFEAFSKLCMHIETQTTMMVSPTENPAQRSVSDSDASAVEWETASEGGSDKSDTLRSPLDDRL

SEQ ID NO: 33882 - DNA, 1371 bp, Muscodor strobelii
  misc_feature: SGI cDNA ID NO. 571697
  misc_feature: Encodes the peptide sequence at SEQ ID NO 33883
atggatgttataaatatcaccatcacatcttttacagttcgagatatacgatggccgacatctctcgaaaatatcggctcggatcctatgaacttggcgggcgagaatgcgttcggctaccttcagtacgcgacgaatgtagaagggcttgtcggcacaggatggtcattttcaaatggccaaggaaatgatatcctatgcacagcaataagatccttagccccccgtctagttgggcgcactctagggtctctcgtctctaatatgggggtgacacaacgtaaactacaatctggccagattcgattcatgtctcccgagcgcggagtgctgcagctcgcgacctgtgctgtcctcaatgctatctgggatatgtgggcaaaagccgaagggaagccgctttggcggcttgtggccgacttcacgccggaggaagtcgtccgtaccatcgattttcgatatatttctgatgtaatcacaccaactcaggcgctagacttcctcagagagcacgcgaaggggaaggcagagagggtggagttggcgctgcagaacagagctgttccggcttataatacgtcggctgggtggctgggacactccgatgacaaggtccgggacttactcgcagaagctgttaagcagggttttcgtcacttcaagctcaaagctggcttaggtctagagacggaccgcaagaggctcaatcttgttcgcgagaccgtaggcgacgagggtatcctaatggtcgacgtgaaccaaatctgggatgtcgacgaagctatcgagtatatgaaagaccttgccgacttgaaattatggttcatcgaagagccaacatcccccgacgatatcctaggccacgccaagatacgagctgcgctcaagccctacgggattggcgtcgcgacaggagaacatgtgaataaccgcgtgatgttcaaacagctgcttcaagctgaagcaattgacgcagtacagctcgacgccctgcgcctggcatctattaacgagattctcattgtgttgttaatggcggccaaatttggtgtgccggtcgtgcctcactcgggcggggcaggtatggttgagctgtgtagtcacatcagcacgatagacttcgtcgttgtctctgggaagaagagcattcttgagtatacagaccatctacacgaggtgttcgtggcgccggccagcgtcacaggtgacgggtatcatgtttcgcctaccgtgccgggatattcttgcgatgtgaaagagagcgaattcgagagattcgagtgtcctgacggctccttttggaagtcggaaaagggacagaagatgctgggggatccttggaggggtacattgggagagcagacttcgtag

SEQ ID NO: 33883 - protein, 456 aa, Muscodor strobelii
  misc_feature: SGI Peptide ID NO. 571697
  misc_feature (202)..(297): Pfam Id: PF01188 Pfam Desc: Mandelate racemase / muconate lactonizing enzyme, C-terminal domain
  misc_feature (5)..(446): NCBI GI: 164424530 Blast Desc: NCU07064 [Neurospora crassa OR74A] gi|157070553|gb|EAA31093.2| NCU07064 [Neurospora crassa OR74A]
  misc_feature (6)..(443): NCBI GI: 169620796 Blast Desc: SNOG_13604 [Phaeosphaeria nodorum SN15] gi|111057931|gb|EAT79051.1| SNOG_13604 [Phaeosphaeria nodorum SN15]
  misc_feature (6)..(443): NCBI GI: 154308516 Blast Desc: conserved [Botryotinia fuckeliana B05.10] gi|150852859|gb|EDN28051.1| conserved [Botryotinia fuckeliana B05.10]
  misc_feature (6)..(443): NCBI GI: 156036432 Blast Desc: conserved [Sclerotinia sclerotiorum 1980] gi|154698310|gb|EDN98048.1| conserved [Sclerotinia sclerotiorum 1980]
  misc_feature (6)..(443): NCBI GI: 116202475 Blast Desc: conserved [Chaetomium globosum CBS 148.51] gi|88177640|gb|EAQ85108.1| conserved [Chaetomium globosum CBS 148.51]
  misc_feature (6)..(443): NCBI GI: 261359650 Blast Desc: L-galactonate dehydratase [Verticillium albo-atrum VaMs.102]
  misc_feature (6)..(443): NCBI GI: 76886462 Blast Desc: L-galactonate dehydratase [Hypocrea jecorina]
  misc_feature (5)..(443): NCBI GI: 171682092 Blast Desc: protein product [Podospora anserina] gi|170941005|emb|CAP66655.1| protein product [Podospora anserina]
  misc_feature (6)..(443): NCBI GI: 189210483 Blast Desc: L-galactonate dehydratase [Pyrenophora tritici-repentis Pt-1C-BFP] gi|187977666|gb|EDU44292.1| L-galactonate dehydratase [Pyrenophora tritici-repentis
  misc_feature (6)..(443): NCBI GI: 256727158 Blast Desc: [Nectria haematococca mpVI 77-13-4]
MDVINITITSFTVRDIRWPTSLENIGSDPMNLAGENAFGYLQYATNVEGLVGTGWSFSNGQGNDILCTAIRSLAPRLVGRTLGSLVSNMGVTQRKLQSGQIRFMSPERGVLQLATCAVLNAIWDMWAKAEGKPLWRLVADFTPEEVVRTIDFRYISDVITPTQALDFLREHAKGKAERVELALQNRAVPAYNTSAGWLGHSDDKVRDLLAEAVKQGFRHFKLKAGLGLETDRKRLNLVRETVGDEGILMVDVNQIWDVDEAIEYMKDLADLKLWFIEEPTSPDDILGHAKIRAALKPYGIGVATGEHVNNRVMFKQLLQAEAIDAVQLDALRLASINEILIVLLMAAKFGVPVVPHSGGAGMVELCSHISTIDFVVVSGKKSILEYTDHLHEVFVAPASVTGDGYHVSPTVPGYSCDVKESEFERFECPDGSFWKSEKGQKMLGDPWRGTLGEQTS

SEQ ID NO: 33884 - DNA, 979 bp, Muscodor strobelii
  misc_feature: SGI EST ID NO. CUFF.80147.0
  misc_feature: Variant of the nucleotide sequence at SEQ ID NO 33882
cgtcacttcaagctcaaagctggcttaggtctagagacggaccgcaagaggctcaatcttgttcgcgagaccgtaggcgacgagggtatcctaatggtcgacgtgaaccaaatctgggatgtcgacgaagctatcgagtatatgaaagaccttgccgacttgaaattatgagccaacatcccccgacgatatcctaggccacgccaagatacgagctgcgctcaagccctacgggattggcgtcgcgacaggagaacatgtgaataaccgcgtgatgttcaaacagctgcttcaagctgaagcaattgacgcagtacagctcgacgccctgcgcctggcatctattaacgagattctcattgtgttgttaatggcggccaaatttggtgtgccggtcgtgcctcactcgggcggggcaggtatggttgagctgtgtagtcacatcagcacgatagacttcgtcgttgtctctgggaagaagagcattcttgagtatacagaccatctacacgaggtgttcgtggcgccggccagcgtcacaggtgacgggtatcatgtttcgcctaccgtgccgggatattcttgcgatgtgaaagagagcgaattcgagagattcgagtgtcctgacggctccttttggaagtcggaaaagggacagaagatgctgggggatccttggaggggtacattgggagagcagacttcgtagggctttgaggaatcatcgacaacataccatagctgtttatgttgctattctggcgagatctggagctctatattgaaagaattccatcatgtcatacaaggtactgaacgtaactctcgccatgtgttcgatcatctctgctacatgcatctcaattcccatgtcgagattatacctaatcagaacatacagtgttaactactacatatagatgatttaaacactcaagcgtcattcttcttcgcctcgacagactcatcatgacctctc

SEQ ID NO: 33885 - DNA, 846 bp, Muscodor strobelii
  misc_feature: SGI cDNA ID NO. 571698
  misc_feature: Encodes the peptide sequence at SEQ ID NO 33886
atgattgcattctcaaagttcgctggagaagtatcagatcagctattttcctttgcctcgtcgcatgatcctgcggccggagagaagatcacaatacttgatgcccggatcaagtattggatggacacgaaatttctcgagatgcctctcctgccaatgatacctacaaaacgtcggctcgagcagaaatcaacagttctgacacgaatgaatcatctgcgacttctcctgcgtcgtcgcactatggtatcgctactctacagcaattcggatggtcgcctgtgtggcgagctggcgatggacatagttaaggagttgcagacacatgccacagtcactgagattgcgagtgcgtttcgacttcacatggcaacttctctgggtggtgcggttcttatactcgccactctactcgtgcgagatcttacaatcgtcgatttgcagatgcatcgacaagcatatgcgacctcttaccgacagggaatctctatcttgcgagagttgtcggcatacctcatacccgcaagtaacatattgcaaaatctgacagacattgtcaacgtcgtcgatctcattctcgaaagagaagaacaagaaccacaaaatggtgacttttctagtattttaccgaccaacatgaatgatgtcttcccttacgggctcatggattcggacctagatctggtcgctggatcattgtcagagccctatacaataacatcaaacttatggaacacaggccagcctgagccggatacggccactgacatgtccacggcgtgggacacgttttggagcgaatcaggcgggcagtccattggcgctgaaagaaatttctggaactga

SEQ ID NO: 33886 - protein, 281 aa, Muscodor strobelii
  misc_feature: SGI Peptide ID NO. 571698
MIAFSKFAGEVSDQLFSFASSHDPAAGEKITILDARIKYWMDTKFLEMPLLPMIPTKRRLEQKSTVLTRMNHLRLLLRRRTMVSLLYSNSDGRLCGELAMDIVKELQTHATVTEIASAFRLHMATSLGGAVLILATLLVRDLTIVDLQMHRQAYATSYRQGISILRELSAYLIPASNILQNLTDIVNVVDLILEREEQEPQNGDFSSILPTNMNDVFPYGLMDSDLDLVAGSLSEPYTITSNLWNTGQPEPDTATDMSTAWDTFWSESGGQSIGAERNFWN

SEQ ID NO: 33887 - DNA, 1593 bp, Muscodor strobelii
  misc_feature: SGI cDNA ID NO. 571699
  misc_feature: Encodes the peptide sequence at SEQ ID NO 33888
atgagagccgctaacagtagaactacggcatacagtcaatttcaaaacaacaccaatccacgatggtggtgcgatccagggttacgactcaatgtgcttcattgtacctgtctctacttctgtgtgttttatctcggctatgatgcttctctgttaaatggattacaaaacatccctcaatggaatgcgtattttggtcatccaagtagcaattatcttggactgatctctgctagcctgttcttacgtaagttcatccagcagcacattgccttgccctcaaatatatggctaataacaactccttatttcagctcagccgtcaactcccggtttgggaggaaagcagccttagctgttggatcaataatactgagtcgcttaaagattgccggagctattgtcaacgctacggcacgaagcggtggtgtttttataggtggccgagttctcatgggtgtcgccggaccatttggaaagattactgctattgccctgctccaagagatagctcaccctagactgaggcctcttctttcgtgttcgttctatgcaaactattatatcggttcgattgctgccgcttggtttacctacggtgcactggaatggggaaaagatgactgggcatggagaggcccctggctagttcatcatggtctcaaagacaaggcgatgactattttggccaaataccatgcaaatggaaataatcgggacgaattggtaaatcatgaattccaagaaatatgtgctgctttagagctcgaagcagagaaaaataagtcaaaattcgccgatttcttcaaaacatccggaaatcgaagaagattgctagtgctcattactatggcaattgggacaaactggactggaaatggtatcatcacttattacctaacaccagtgctgaaactggtgggcatcattgagcctaagcaaattgctaaaataaatggtggactggccatttggaatttgttcctttcctatgcaggttctctctccgctgagcgccttgggcgacggccgctttggcttatttcaacaatcggattattgatctctttcatagtcatcgccggtctctctggtggctttgcagcatccgaaaacaaagctacaggcattgcgaccgtgccggtgctcttcatattctacggattctatagtttcggctggaccccgttgccattctcttacggcgctgagattctgccttatcatttgcgactcaaaggactcagcatacttttatcggtgcaaagcatcctgcaagcattcaaccaatacgtaaatccagtagctttggcggcaattcattggaaatactattttctttatgttgcgcttgatgtagtgtatttgattatcatattctttttctttcctgagacaaagtgtctcacgatcgaggaggtgtctgtggttttcgatcagggtcgtttgggaagtggtactgcggcggtggctgagctgcgtgagcgaagccaaatcaaccagggactcaagacagttgatgaagacaataaagtagacgttgaacatcaacatgtcgagagtcaagagaatgcaattcgttcttcgatctag

SEQ ID NO: 33888 - protein, 530 aa, Muscodor strobelii
  misc_feature: SGI Peptide ID NO. 571699
  misc_feature (34)..(478): Pfam Id: PF00083 Pfam Desc: Sugar (and other) transporter
  misc_feature (215)..(478): Pfam Id: PF00083 Pfam Desc: Sugar (and other) transporter
  misc_feature (13)..(509): NCBI GI: 256722292 Blast Desc: NECHADRAFT_54362 [Nectria haematococca mpVI 77-13-4]
  misc_feature (52)..(520): NCBI GI: 261353682 Blast Desc: sugar transporter [Verticillium albo-atrum VaMs.102]
  misc_feature (16)..(521): NCBI GI: 159128521 Blast Desc: MFS sugar transporter, [Aspergillus fumigatus A1163]
  misc_feature (48)..(521): NCBI GI: 119473503 Blast Desc: sugar transporter (hexose transporter [Neosartorya fischeri NRRL 181] gi|119406780|gb|EAW16730.1| sugar transporter (hexose transporter [Neosartorya fischeri NRRL 181]
  misc_feature (11)..(523): NCBI GI: 242812344 Blast Desc: hexose transporter protein [Talaromyces stipitatus ATCC 10500] gi|218714277|gb|EED13700.1| hexose transporter protein [Talaromyces stipitatus ATCC 10500]
  misc_feature (16)..(497): NCBI GI: 256720422 Blast Desc: NECHADRAFT_55927 [Nectria haematococca mpVI 77-13-4]
  misc_feature (48)..(480): NCBI GI: 146323117 Blast Desc: MFS sugar transporter [Aspergillus fumigatus Af293] gi|129556473|gb|EAL86306.2| MFS sugar transporter, [Aspergillus fumigatus Af293]
  misc_feature (8)..(517): NCBI GI: 58267778 Blast Desc: hexose transport-related protein [Cryptococcus neoformans var. neoformans JEC21] gi|134112539|ref|XP_775245.1| CNBE5180 [Cryptococcus neoformans var. neoformans B-3501A] var.
  misc_feature (6)..(517): NCBI GI: 146323113 Blast Desc: hexose transporter protein [Aspergillus fumigatus Af293] gi|129556471|gb|EAL86303.2| hexose transporter protein [Aspergillus fumigatus Af293]
  misc_feature (6)..(523): NCBI GI: 159128523 Blast Desc: hexose transporter protein [Aspergillus fumigatus A1163]
MRAANSRTTAYSQFQNNTNPRWWCDPGLRLNVLHCTCLYFCVFYLGYDASLLNGLQNIPQWNAYFGHPSSNYLGLISASLFLRKFIQQHIALPSNIWLITTPYFSSAVNSRFGRKAALAVGSIILSRLKIAGAIVNATARSGGVFIGGRVLMGVAGPFGKITAIALLQEIAHPRLRPLLSCSFYANYYIGSIAAAWFTYGALEWGKDDWAWRGPWLVHHGLKDKAMTILAKYHANGNNRDELVNHEFQEICAALELEAEKNKSKFADFFKTSGNRRRLLVLITMAIGTNWTGNGIITYYLTPVLKLVGIIEPKQIAKINGGLAIWNLFLSYAGSLSAERLGRRPLWLISTIGLLISFIVIAGLSGGFAASENKATGIATVPVLFIFYGFYSFGWTPLPFSYGAEILPYHLRLKGLSILLSVQSILQAFNQYVNPVALAAIHWKYYFLYVALDVVYLIIIFFFFPETKCLTIEEVSVVFDQGRLGSGTAAVAELRERSQINQGLKTVDEDNKVDVEHQHVESQENAIRSSI

SEQ ID NO: 33889 - DNA, 993 bp, Muscodor strobelii
  misc_feature: SGI cDNA ID NO. 571700
  misc_feature: Encodes the peptide sequence at SEQ ID NO 33890
atgttgtcatctctctggaagcaacctcagatccccaaaatcaccggcgcggacccagagccgcccgcaccgctcctaagtacatggcgagtgcgtgctgaggccggcgaaccagaagcaatagtgcgcgtccgcaacctgcagagtaccatgaccgcaggtcgcgatgcctggggccgtgcttctaaatcacaacctgtgctactatcctctgaagtctcgttcgcgcaggctttcgacacagcctcgaccagcgacagcgtgaatgctgagactgtgcattatggaaatctcagcaagacgctactagcgggcatggagtatgctacttccagtgatgccaaaaagggtaaggaagtaaagaaggaggacgtgagcactccgagcacgggagacattttcgagctcctctgggtaaagatgacaggacgcctggtagacggctcgactgttgcactgccgccggaccaggtcccattcttagatgcgaagcgtctgcgctcactttctctcaccctacatctgccaaaggcttcactgttgggtggaggtgtaagcctgacgacgactgctgccttcaaggatgctgggttgttggacaaggaggagaggcggaatccgttgcgctcttattctagatgcttgcgtcttcatggcttacatatcccaacgctaattggcgtaaattcgaacgagcgtacggcaaagcagatggtcgttgcagatattgaaattgatcgatatgatttgggccaggatgtccacacagatcttgagcgaattatcgttgataccatagaagcctcctctttcgagactctcgaggcccttggcacacacctgggtaacataattctcaacgattttcgggtcggtgataatccacaagtgatgaaagaacgaggttggatggttaggatttgcctcgagaaaccgattgccgttccatttgcggattgtccgtctgtagagatccggatgggaccaaaataa

SEQ ID NO: 33890 - protein, 330 aa, Muscodor strobelii
  misc_feature: SGI Peptide ID NO. 571700
  misc_feature (25)..(328): NCBI GI: 85113054 Blast Desc: NCU02798 [Neurospora crassa OR74A] gi|28926237|gb|EAA35218.1| [Neurospora crassa OR74A]
  misc_feature (23)..(325): NCBI GI: 256734525 Blast Desc: NECHADRAFT_74876 [Nectria haematococca mpVI 77-13-4]
  misc_feature (40)..(326): NCBI GI: 116181756 Blast Desc: CHGG_01506 [Chaetomium globosum CBS 148.51] gi|88185803|gb|EAQ93271.1| CHGG_01506 [Chaetomium globosum CBS 148.51]
  misc_feature (24)..(325): NCBI GI: 46107286 Blast Desc: FG00526.1 [Gibberella zeae PH-1]
  misc_feature (24)..(326): NCBI GI: 171696098 Blast Desc: protein product [Podospora anserina] gi|170948291|emb|CAP60455.1| protein product [Podospora anserina]
  misc_feature (21)..(263): NCBI GI: 261357328 Blast Desc: conserved [Verticillium albo-atrum VaMs.102]
  misc_feature (26)..(299): NCBI GI: 154301157 Blast Desc: BC1G_10551 [Botryotinia fuckeliana B05.10] gi|150856299|gb|EDN31491.1| BC1G_10551 [Botryotinia fuckeliana B05.10]
  misc_feature (33)..(325): NCBI GI: 189208245 Blast Desc: conserved [Pyrenophora tritici-repentis Pt-1C-BFP] gi|187976549|gb|EDU43175.1| conserved [Pyrenophora tritici-repentis Pt-1C-BFP]
  misc_feature (27)..(149): NCBI GI: 145613453 Blast Desc: MGG_01629 [Magnaporthe grisea 70-15] gi|145020523|gb|EDK04652.1| MGG_01629 [Magnaporthe grisea 70-15]
  misc_feature (27)..(325): NCBI GI: 169613426 Blast Desc: SNOG_09844 [Phaeosphaeria nodorum SN15] gi|160702722|gb|EAT83109.2| SNOG_09844 [Phaeosphaeria nodorum SN15]
  misc_feature (42)..(325): SWISSPROT Homolog: EC 4.1.2.25 Dihydroneopterin aldolase
  misc_feature (42)..(325): SWISSPROT Homolog: EC 2.7.6.3 2-amino-4-hydroxy-6-hydroxymethyldihydropteridine diphosphokinase
  misc_feature (42)..(325): SWISSPROT Homolog: EC 2.5.1.15 Dihydropteroate synthase
MLSSLWKQPQIPKITGADPEPPAPLLSTWRVRAEAGEPEAIVRVRNLQSTMTAGRDAWGRASKSQPVLLSSEVSFAQAFDTASTSDSVNAETVHYGNLSKTLLAGMEYATSSDAKKGKEVKKEDVSTPSTGDIFELLWVKMTGRLVDGSTVALPPDQVPFLDAKRLRSLSLTLHLPKASLLGGGVSLTTTAAFKDAGLLDKEERRNPLRSYSRCLRLHGLHIPTLIGVNSNERTAKQMVVADIEIDRYDLGQDVHTDLERIIVDTIEASSFETLEALGTHLGNIILNDFRVGDNPQVMKERGWMVRICLEKPIAVPFADCPSVEIRMGPK

SEQ ID NO: 33891 - DNA, 1932 bp, Muscodor strobelii
  misc_feature: SGI EST ID NO. CUFF.80177.0
  misc_feature: Variant of the nucleotide sequence at SEQ ID NO 33889
ggtgaatcggttgcatttttcatccagatcaaagtacggaacacattttcatcatctacgatactagcacatatcgaaaggctgctttaggcaacatcgattcagacgccatttctatctgcacagacagtccactatcagggttctgctgccccacctccaaacctcgattcaccttcattaggtagtcacccctccatccacctgtagtttgggtcgatctgaagttttgaactgcgtcttccatcatcaatatgttgtcatctctctggaagcaacctcagatccccaaaatcaccggcgcggacccagagccgcccgcaccgctcctaagtacatggcgagtgcgtgctgaggccggcgaaccagaagcaatagtgcgcgtccgcaacctgcagagtaccatgaccgcaggtcgcgatgcctggggccgtgcttctaaatcacaacctgtgctactatcctctgaagtctcgttcgcgcaggctttcgacacagcctcgaccagcgacagcgtgaatgctgagactgtgcattatggaaatctcagcaagacgctactagcgggcatggagtatgctacttccagtgatgccaaaaagggtaaggaagtaaagaaggaggacgtgagcactccgagcacgggagacattttcgagctcctctgggtaaagatgacaggacgcctggtagacggctcgactgttgcactgccgccggaccaggtcccattcttagatgcgaagcgtctgcgctcactttctctcaccctacatctgccaaaggcttcactgttgggtggaggtgtaagcctgacgacgactgctgccttcaaggatgctgggttgttggacaaggaggagaggcggaatccgttgcgctcttattctagatgcttgcgtcttcatggcttacatatcccaacgctaattggcgtaaattcgaacgagcgtacggcaaagcagatggtcgttgcagatattgaaattgatcgatatgatttgggccaggatgtccacacagatcttgagcgaattatcgttgataccatagaagcctcctctttcgagactctcgaggcccttggcacacacctgggtaacataattctcaacgattttcgggtcggtgataatccacaagtgatgaaagaacgaggttggatggttaggatttgcctcgagaaaccgattgccgttccatttgcggattgtccgtctgtagagatccggatgggaccaaaataagtgcaatctttttggtaagctgtttacttcggcggcgatgcataacgaggatgaagttcagcacacttcgagagcacatgatgattgagagacaatgtagaaaataaatgagttttgtctacaaagtcaatcgtcgcgggtaaacgctacggagcctatcggcggtctactctagcaccaagtcctttgcctccgtgcccaggaaagcaattgcgaacaatgattgcgattattgttgggaaacttgcttcccaataagagtaagggagatgggcgaaaatgaatattcatacggaacctcttagattttgagattgttttcttgttcttcttttttgtcgttcctcaattcgaaatgcgtacgaaatgcgtgcgcacccgactctcctctcctatgcagttggcgataattatacaatgagtgcagtggttgagatacagatgacgatatttagttgacacagatacctttattgcatatgatacttacaaaagcatctacctatgaatgatcatcgttctggcgtttcaagcaaaataagtctagccagcatacatataataacgttatctaagtcgtgtgttacacatcatgagcgatcgacgattgtcgagatggcataatctagaccttcctcttggcgacgccagggacaagacgttacacgatattgcaacaggggct

SEQ ID NO: 33892 - DNA, 633 bp, Muscodor strobelii
  misc_feature: SGI cDNA ID NO. 571701
  misc_feature: Elevated expression when VOC is produced
  misc_feature: Encodes the peptide sequence at SEQ ID NO 33893
atgcctttcgagctgcaaattgcgaccgaagccgacgccttacggtcggctaaaatcgagagacttgcgtatgcacctcttgctacgacccctatactcttccccggcgctatgcctcccgatgtgatgaaccatcgggccgccgagttagccaagctcctgcgcgatgatcctacgtgccgttggcttaaggttgttgagactgacatcgaacctaatgaagccaatgatcaaatgattggttttgcgcagtggaacattcgggctgcgggtgagccattgccagggccgaggacatggccccccggagtcaatggcgaagcgcttgaggcactctttggtggaatcaaccgattgcgtgttaagaccattggcgatcaaccgcatcttcatctaaagagcctctacgttgatcctaagtacgagcgcaaaggcgccggccaacaaatgattatgtggggagtcgaggaagcaaagaaactcggtcttccggccttcctcgaagcttccgaggttggttatccactctatgtgagatgcggattccgtgaggtcgatagaacctccgtggacttcaatagatggggccttgacgaaattgcgaccaccgttgcaatggtgaaagatccatag

SEQ ID NO: 33893 - protein, 210 aa, Muscodor strobelii
  misc_feature: SGI Peptide ID NO. 571701
  misc_feature (71)..(183): Pfam Id: PF00583 Pfam Desc: Acetyltransferase (GNAT) family
  misc_feature (1)..(208): NCBI GI: 256727759 Blast Desc: NECHADRAFT_76908 [Nectria haematococca mpVI 77-13-4]
  misc_feature (9)..(210): NCBI GI: 169611903 Blast Desc: SNOG_09066 [Phaeosphaeria nodorum SN15] gi|111062138|gb|EAT83258.1| SNOG_09066 [Phaeosphaeria nodorum SN15]
  misc_feature (1)..(208): NCBI GI: 261352647 Blast Desc: conserved [Verticillium albo-atrum VaMs.102]
  misc_feature (15)..(207): NCBI GI: 261357792 Blast Desc: [Verticillium albo-atrum VaMs.102]
  misc_feature (8)..(196): NCBI GI: 189189284 Blast Desc: conserved [Pyrenophora tritici-repentis Pt-1C-BFP] gi|187972587|gb|EDU40086.1| conserved [Pyrenophora tritici-repentis Pt-1C-BFP]
  misc_feature (1)..(208): NCBI GI: 169601066 Blast Desc: SNOG_03387 [Phaeosphaeria nodorum SN15] gi|111067472|gb|EAT88592.1| SNOG_03387 [Phaeosphaeria nodorum SN15]
  misc_feature (3)..(208): NCBI GI: 240111563 Blast Desc: GNAT family acetyltransferase, [Coccidioides posadasii C735 delta SOWgp]
  misc_feature (3)..(208): NCBI GI: 119188563 Blast Desc: [Coccidioides immitis RS]
  misc_feature (5)..(209): NCBI GI: 119483798 Blast Desc: GNAT family acetyltransferase, [Neosartorya fischeri NRRL 181] gi|119409958|gb|EAW19905.1| GNAT family acetyltransferase, [Neosartorya fischeri NRRL 181]
  misc_feature (39)..(207): NCBI GI: 238506971 Blast Desc: conserved [Aspergillus flavus NRRL3357] gi|220689400|gb|EED45751.1| conserved [Aspergillus flavus NRRL3357]
  misc_feature: Useful for introducing or modulating the production of volatile compounds
MPFELQIATEADALRSAKIERLAYAPLATTPILFPGAMPPDVMNHRAAELAKLLRDDPTCRWLKVVETDIEPNEANDQMIGFAQWNIRAAGEPLPGPRTWPPGVNGEALEALFGGINRLRVKTIGDQPHLHLKSLYVDPKYERKGAGQQMIMWGVEEAKKLGLPAFLEASEVGYPLYVRCGFREVDRTSVDFNRWGLDEIATTVAMVKDP

SEQ ID NO: 33894 - DNA, 1098 bp, Muscodor strobelii
  misc_feature: SGI EST ID NO. CUFF.80190.0
  misc_feature: Variant of the nucleotide sequence at SEQ ID NO 33892
gcatgcaatgcttctcgatattctagaatccaaaggtccgatcctacagagctgagccggtagttaactaaataatggagtatttatgaatcgacgggttcgctgtgtatatgcccgcggttcctacaacattgggtatcgtattacttagtgaaaaacaagcgacctttgaagatgcctttcgagctgcaaattgcgaccgaagccgacgccttacggtcggctaaaatcgagagacttgcgtatgcacctcttgctacgacccctatactcttccccggcgctatgcctcccgatgtgatgaaccatcgggccgccgagttagccaagctcctgcgcgatgatcctacgtgccgttggcttaaggttgttgagactgacatcgaacctaatgaagccaatgatcaaatgattggttttgcgcagtggaacattcgggctgcgggtgagccattgccagggccgaggacatggccccccggagtcaatggcgaagcgcttgaggcactctttggtggaatcaaccgattgcgtgttaagaccattggcgatcaaccgcatcttcatctaaagagcctctacgttgatcctaagtacgagcgcaaaggcgccggccaacaaatgattatgtggggagtcgaggaagcaaagaaactcggtcttccggccttcctcgaagcttccgaggttggttatccactctatgtgagatgcggattccgtgaggtcgatagaacctccgtggacttcaatagatggggccttgacgaaattgcgaccaccgttgcaatggtgaaagatccatagatcatatgttggtagactcgcttcgacccatgtatgagacgagcttgggatagactttcatgtggttcctacctggaaacacgcactgactacttacatgtagtattccttctttgccttcgggagatcgtgatgagttgtgtgcttaggttgctttcaacattggagattacattttacatgtacgctaaggcagtttcataggattgttgcatctcttttagaagccttgaacctagcgaatatcgcaatacagtttatttctttagaatatttcaattatcagactgt

SEQ ID NO: 33895 - DNA, 1692 bp, Muscodor strobelii
  misc_feature: SGI cDNA ID NO. 571702
  misc_feature: Encodes the peptide sequence at SEQ ID NO 33896
atgtctacgcttgcagagggacttgtcgtgaaaggaacaacaacctcaccgagagggcgcagacttgcggcctcgcaaactttccacccgggcgatgtgatcgctacctttgagaagccaagcattgcgattcctgatagtccacaccttcaaataacttgcagcggatgtctctcgccctctaccgcaggcaaatctgttcgagcatgtacgggttgcagggcggtatcatactgttcgccagcatgccagaagctagactggactacaggcgcccacaaggctgaatgcaaggttttcaagcgtgtactcgccgacggtcactcctctctaccaactcccgtacgagccctcgttcaggttctcattcggcctgatattctcactgctctgcaagacgtagaaggtcatgttgacaagttccgccaagatcggggtaagctttgggccgacatggaactccaggccatgggcgctttgcattatctcggtcgtgaagcgaatccgatgagaatagcagaagcaatcgatattctgtgcaagcttcaagtgaactccttcaaccgaatagatgacgacgtcggccaaaccggatttttcatgaacccggcactcgcaatgataaaccactcatgtattccgaatgcatttgtacagctcagtggccgacaggctatagtgcatgcctcccaagaaatcaagacaaacgaagagatcgagatttcgtacattagtaagtggcacacttcccagaaatgctcttacggacatcgtgtcaagatcctgacagtcgaccaagactatgctttaccacgctcagcccgccaagaagcactcaaagagcgatatcacttcatctgcgattgctcgcgttgcaagcgggatctagatgtctattcagtcgcaaaacaatattcgcacttacctctcaacgctttgagcttggtcccagatatcgaggaaaagctgcaatccttcccaacgtctctcaaagcaaacaactcgctcaacagtacaatcaaggacatatacccttggtgctccgtccccttaccgaacgacatgccactatcagaaaagaccaaacagctccgccaacgctggcgagcctgcactaccatcctcgcagctaaatgttacgctatcgagcccctccaacaaatcttcaacgaaacaaccgcctacttcggacagaaagcagacttcgcagcagccctcgcagtctacagtttcgtcgcactgaacatccactcattcacatacccagcacccttccacccacaacgagtcaaagacctgatgatgattgccaaactcctgtccaacacagctccctggagtgcagagagcaaattactcacccaatctcccaaaaacaacgagttgatgcagaagctagccaaaatggaccaagcgacgatctgccaggtattgctcgagctcgtgatatactacgctcccatggcacactcaaaggagtggcaaatttgcaaaatggcaaaagatatgcttagtgacattgaggcattgcccggcagggagacggagaactctcttgtgaaggcgtttttacgcaatgcgaatggagtcgtggaacggcagttctttgagcaggccatacttgatcctatccgagacatatcgtcgttttctttggatgttatggacgaggaatttggttcgcgagcgtga

SEQ ID NO: 33896 - protein, 563 aa, Muscodor strobelii
  misc_feature: SGI Peptide ID NO. 571702
  misc_feature (54)..(97): Pfam Id: PF01753 Pfam Desc: MYND finger
  misc_feature (7)..(555): NCBI GI: 39941986 Blast Desc: MGG_10842 [Magnaporthe grisea 70-15] gi|145021653|gb|EDK05782.1| MGG_10842 [Magnaporthe grisea 70-15]
  misc_feature (18)..(560): NCBI GI: 46108572 Blast Desc: FG01168.1 [Gibberella zeae PH-1]
  misc_feature (18)..(560): NCBI GI: 256734383 Blast Desc: NECHADRAFT_74600 [Nectria haematococca mpVI 77-13-4]
  misc_feature (14)..(557): NCBI GI: 171684729 Blast Desc: protein product [Podospora anserina] gi|170942325|emb|CAP67977.1| protein product [Podospora anserina]
  misc_feature (10)..(561): NCBI GI: 38566954 Blast Desc: conserved [Neurospora crassa]
  misc_feature (10)..(561): NCBI GI: 85117964 Blast Desc: NCU02962 [Neurospora crassa OR74A] gi|28927157|gb|EAA36113.1| [Neurospora crassa OR74A]
  misc_feature (15)..(560): NCBI GI: 261357601 Blast Desc: conserved [Verticillium albo-atrum VaMs.102]
  misc_feature (19)..(293): NCBI GI: 255950300 Blast Desc: Pc22g20170 [Penicillium chrysogenum Wisconsin 54-1255] gi|211592934|emb|CAP99305.1| Pc22g20170 [Penicillium chrysogenum Wisconsin 54-1255]
  misc_feature (51)..(530): NCBI GI: 156050587 Blast Desc: SS1G_07881 [Sclerotinia sclerotiorum 1980] gi|154692281|gb|EDN92019.1| SS1G_07881 [Sclerotinia sclerotiorum 1980]
  misc_feature (19)..(294): NCBI GI: 159129417 Blast Desc: SET and MYND domain protein, [Aspergillus fumigatus A1163]
  misc_feature (12)..(292): SWISSPROT Homolog: EC 2.1.1.43 Histone-lysine N-methyltransferase
MSTLAEGLVVKGTTTSPRGRRLAASQTFHPGDVIATFEKPSIAIPDSPHLQITCSGCLSPSTAGKSVRACTGCRAVSYCSPACQKLDWTTGAHKAECKVFKRVLADGHSSLPTPVRALVQVLIRPDILTALQDVEGHVDKFRQDRGKLWADMELQAMGALHYLGREANPMRIAEAIDILCKLQVNSFNRIDDDVGQTGFFMNPALAMINHSCIPNAFVQLSGRQAIVHASQEIKTNEEIEISYISKWHTSQKCSYGHRVKILTVDQDYALPRSARQEALKERYHFICDCSRCKRDLDVYSVAKQYSHLPLNALSLVPDIEEKLQSFPTSLKANNSLNSTIKDIYPWCSVPLPNDMPLSEKTKQLRQRWRACTTILAAKCYAIEPLQQIFNETTAYFGQKADFAAALAVYSFVALNIHSFTYPAPFHPQRVKDLMMIAKLLSNTAPWSAESKLLTQSPKNNELMQKLAKMDQATICQVLLELVIYYAPMAHSKEWQICKMAKDMLSDIEALPGRETENSLVKAFLRNANGVVERQFFEQAILDPIRDISSFSLDVMDEEFGSRA

SEQ ID NO: 33897 - DNA, 2119 bp, Muscodor strobelii
  misc_feature: SGI EST ID NO. CUFF.80186.0
  misc_feature: Variant of the nucleotide sequence at SEQ ID NO 33895
gctcaatgctcactctctggtgtttgagatactgtggcgggcgcgtgcatgtggactgacaattcctccccacgtcaaattcgctcgaacgcggacgaatgatcagtaacgcttaataaacacaatgtctacgcttgcagagggacttgtcgtgaaaggaacaacaacctcaccgagagggcgcagacttgcggcctcgcaaactttccacccgggcgatgtgatcgctacctttgagaagccaagcattgcgattcctgatagtccacaccttcaaataacttgcagcggatgtctctcgccctctaccgcaggcaaatctgttcgagcatgtacgggttgcagggcggtatcatactgttcgccagcatgccagaagctagactggactacaggcgcccacaaggctgaatgcaaggttttcaagcgtgtactcgccgacggtcactcctctctaccaactcccgtacgagccctcgttcaggttctcattcggcctgatattctcactgctctgcaagacgtagaaggtcatgttgacaagttccgccaagatcggggtaagctttgggccgacatggaactccaggccatgggcgctttgcattatctcggtcgtgaagcgaatccgatgagaatagcagaagcaatcgatattctgtgcaagcttcaagtgaactccttcaaccgaatagatgacgacgtcggccaaaccggatttttcatgaacccggcactcgcaatgataaaccactcatgtattccgaatgcatttgtacagctcagtggccgacaggctatagtgcatgcctcccaagaaatcaagacaaacgaagagatcgagatttcgtacattaactatgctttaccacgctcagcccgccaagaagcactcaaagagcgatatcacttcatctgcgattgctcgcgttgcaagcgggatctagatgtctattcagtcgcaaaacaatattcgcacttacctctcaacgctttgagcttggtcccagatatcgaggaaaagctgcaatccttcccaacgtctctcaaagcaaacaactcgctcaacagtacaatcaaggacatatacccttggtgctccgtccccttaccgaacgacatgccactatcagaaaagaccaaacagctccgccaacgctggcgagcctgcactaccatcctcgcagctaaatgttacgctatcgagcccctccaacaaatcttcaacgaaacaaccgcctacttcggacagaaagcagacttcgcagcagccctcgcagtctacagtttcgtcgcactgaacatccactcattcacatacccagcacccttccacccacaacgagtcaaagacctgatgatgattgccaaactcctgtccaacacagctccctggagtgcagagagcaaattactcacccaatctcccaaaaacaacgagttgatgcagaagctagccaaaatggaccaagcgacgatctgccaggtattgctcgagctcgtgatatactacgctcccatggcacactcaaaggagtggcaaatttgcaaaatggcaaaagatatgcttagtgacattgaggcattgcccggcagggagacggagaactctcttgtgaaggcgtttttacgcaatgcgaatggagtcgtggaacggcagttctttgagcaggccatacttgatcctatccgagacatatcgtcgttttctttggatgttatggacgaggaatttggttcgcgagcgtgaggagtgctgggatttgatagtaggagagtgcattcctattagatatagattcgtgcgtaaacatatctaggaaatggcgagacatcgaatgcatatgctattgccgaagcccgtactcaacccgtcactgtaatgagaagagtggctaaaaatataaatgaatacattcacgtcgtgaaataccagttactggcctatctaggtcgtagttccgtgtttgaaaacaggcagccggttttctctgtaatcgaagcaatgacacgagtacgatgccatgatcgtctgccgagacttcgcgaatagatgtctcctccacgtagaatgcagcttcgtggcgtgcgagccttatcatcatctcctacgctcgga

SEQ ID NO: 33898 - DNA, 2370 bp, Muscodor strobelii
  misc_feature: SGI cDNA ID NO. 571703
  misc_feature: Reduced expression when VOC is produced
  misc_feature: Encodes the peptide sequence at SEQ ID NO 33899
atggaggacctcaattctgcgtcgcatgacgaccacgacgtcaatggcgatgtctttaacccgagcgactacttgctagttgaccacgacggtgccgagcttcacgatgtcgcaagcacacataccgatctacacaacaccacctctcatgctgatgtcaccagcctggcaattgccgacacaggtgctctgtctggcaaccacatcgacattcatctctcgcaccttccagagatgccatcaccgcccctcccctcacaactgcccccacaacttccttccgagctgcctacagacttgacagcagaccttgaaacaggaattcaatccgagatccagacgaccattgccactgaacttgcgcccaccatcgcaaaagagcctgccgctgagagcgaaaccggcattagcgacgccagcagtcgcaagcgtgcccggtcagccgacgatgaagacgacatccccgaagccgccggccgcaagcccaagaagaagaagactaagaagatcccccagcccgagtcgaccaattaccctgccatcaccttcaaccacaatgcgaagctgcagtccaagatctccctcgagcagctgcgcaccctcatcctctacatcttcgccgagggcatagcgccccagtgggtcgccattggcaaccgcacccagtttcgcaagattgtcgcaatcatggtccccggcctcgaggaggccatgttcaagcagaacgtcgacttcagcacctacgccacccgccccgacgacaccgatcccaactcccgcgtcctgacctcgcccgacgactactacccgcgcctcctgaagcaagacgagctccccaccatactcaagggcttcgctgacatgtttgtccacctctggcctgtcaagacaccgggcagtgagaagcatgggtatataaggtcgcccatgggtatcatgttatcagccccggcagagaagacaaaggaggagaaatccggcaaagggccgcagcccgccagggagccgaaaggctggaaggacactcgtaccagaatcaccgaattcctcgccatgcccgaggacttctacaacaacgactacatactccatcctgcctgcgtctcccctgagcgtcgcaagaacctgcagttccccgacggctatgtacacactcgtgtcgagaactttgaggacggcgatgtgccagaggaccagattcagcagggcagtgtcacagctggtcgcgatgtatacgctttggactgcgagatggttgtcactggcaaggagactaacggaagagacgagctggcgctggcacggatcagtctagtgagctgggatggcactactgtgatggatgagctcgtcaagccggataaacccatccttgactacgtcactagatactcaggcatcactgaagagatgcttcttcccgtcacaacaactttacatgacatccaggcaaggctgcttgacattcttggtccgcatgctatcttagtcggccattcgctagagtcagatatgaaggttttgcgcatgacacatcccttcatcgttgatactgcactccaatacccccataaccggggccctccactgaagaacgctctgaagcacttggccacgcgatttctcaagcgcgacatccaaaaccgagctgctggtcacgactccgtcgaggatgccaaagcctgcttggatctcatccggcagaaatgcgaaaagggaaaagcatggggaaatcaagaggcacagtgtgagaacctgtttcgccgactgacgcgtgttggcacatcgtatcgcgccaatggcggagtcgaggcaacaggcggtgtcaaactcggcaagaccagtgccatgattgattggggcgatcccatgaagggtgcgggtgcggcatctacgtaccccatcggctgcaagagcgacgaggaggtgttgcaaggcgtcatacgtgctgtgcaaggtgatctaataggtgaggagatacctgccggtggtgtcgactttgtctttgcacgcttccgtgagctcgaagcaaagcaaggctggtggaataacagcagaggagacgccgctccgcctcctgacatgtccagcgtgtctctcgagacctgtatccagaatcttgccgacagaatcaagcagatttatgatgctctcccgaagtgtacgggcttcgtcatattcagcggatccggtgatcctcgcgacatgagccgtctccaggccatgaacgctcaatttaaaaaggagtacaacgtccctggcagcaattgggacgatctgagtgttcgctggactgatgttgaggccgaggcactcaagaagtctgttggtgtcgctcgaaatggtatcggcttcattggcgtcaaatag

SEQ ID NO: 33899 - protein, 789 aa, Muscodor strobelii
  misc_feature: SGI Peptide ID NO. 571703
  misc_feature (411)..(566): Pfam Id: PF00929 Pfam Desc: Exonuclease
  misc_feature (165)..(789): NCBI GI: 85117960 Blast Desc: NCU02961 [Neurospora crassa OR74A] gi|28927156|gb|EAA36112.1| conserved [Neurospora crassa OR74A] gi|38566953|emb|CAE76255.1| related to ribonuclease H [Neurospora
  misc_feature (119)..(781): NCBI GI: 46108570 Blast Desc: FG01167.1 [Gibberella zeae PH-1]
  misc_feature (165)..(789): NCBI GI: 261357600 Blast Desc: RNA exonuclease [Verticillium albo-atrum VaMs.102]
  misc_feature (117)..(789): NCBI GI: 256734384 Blast Desc: [Nectria haematococca mpVI 77-13-4]
  misc_feature (125)..(789): NCBI GI: 171684725 Blast Desc: protein product [Podospora anserina] gi|170942323|emb|CAP67975.1| protein product [Podospora anserina]
  misc_feature (142)..(789): NCBI GI: 116192355 Blast Desc: CHGG_05895 [Chaetomium globosum CBS 148.51] gi|88181808|gb|EAQ89276.1| CHGG_05895 [Chaetomium globosum CBS 148.51]
  misc_feature (116)..(789): NCBI GI: 39941984 Blast Desc: MGG_10841 [Magnaporthe grisea 70-15] gi|145021652|gb|EDK05781.1| MGG_10841 [Magnaporthe grisea 70-15]
  misc_feature (177)..(789): NCBI GI: 154308777 Blast Desc: BC1G_07811 [Botryotinia fuckeliana B05.10] gi|150852762|gb|EDN27954.1| BC1G_07811 [Botryotinia fuckeliana B05.10]
  misc_feature (152)..(789): NCBI GI: 169763060 Blast Desc: [Aspergillus oryzae RIB40] gi|83770458|dbj|BAE60591.1| protein product [Aspergillus oryzae]
  misc_feature (152)..(789): NCBI GI: 238488915 Blast Desc: exonuclease, [Aspergillus flavus NRRL3357] gi|220698083|gb|EED54423.1| exonuclease, [Aspergillus flavus NRRL3357]
  misc_feature: Useful for introducing or modulating the production of volatile compounds
MEDLNSASHDDHDVNGDVFNPSDYLLVDHDGAELHDVASTHTDLHNTTSHADVTSLAIADTGALSGNHIDIHLSHLPEMPSPPLPSQLPPQLPSELPTDLTADLETGIQSEIQTTIATELAPTIAKEPAAESETGISDASSRKRARSADDEDDIPEAAGRKPKKKKTKKIPQPESTNYPAITFNHNAKLQSKISLEQLRTLILYIFAEGIAPQWVAIGNRTQFRKIVAIMVPGLEEAMFKQNVDFSTYATRPDDTDPNSRVLTSPDDYYPRLLKQDELPTILKGFADMFVHLWPVKTPGSEKHGYIRSPMGIMLSAPAEKTKEEKSGKGPQPAREPKGWKDTRTRITEFLAMPEDFYNNDYILHPACVSPERRKNLQFPDGYVHTRVENFEDGDVPEDQIQQGSVTAGRDVYALDCEMVVTGKETNGRDELALARISLVSWDGTTVMDELVKPDKPILDYVTRYSGITEEMLLPVTTTLHDIQARLLDILGPHAILVGHSLESDMKVLRMTHPFIVDTALQYPHNRGPPLKNALKHLATRFLKRDIQNRAAGHDSVEDAKACLDLIRQKCEKGKAWGNQEAQCENLFRRLTRVGTSYRANGGVEATGGVKLGKTSAMIDWGDPMKGAGAASTYPIGCKSDEEVLQGVIRAVQGDLIGEEIPAGGVDFVFARFRELEAKQGWWNNSRGDAAPPPDMSSVSLETCIQNLADRIKQIYDALPKCTGFVIFSGSGDPRDMSRLQAMNAQFKKEYNVPGSNWDDLSVRWTDVEAEALKKSVGVARNGIGFIGVK

SEQ ID NO: 33900 - DNA, 2895 bp, Muscodor strobelii
  misc_feature: SGI EST ID NO. CUFF.80198.0
  misc_feature: Variant of the nucleotide sequence at SEQ ID NO 33898
ctcgtcgcaaacctttcacgccacccgtagttgcagtctctattgccaacgctggcttctgacgccgatttcgatctcgcctccgtattgcgcgtccagtcaattatcgactgcgccatcatggaggacctcaattctgcgtcgcatgacgaccacgacgtcaatggcgatgtctttaacccgagcgactacttgctagttgaccacgacggtgccgagcttcacgatgtcgcaagcacacataccgatctacacaacaccacctctcatgctgatgtcaccagcctggcaattgccgacacaggtgctctgtctggcaaccacatcgacattcatctctcgcaccttccagagatgccatcaccgcccctcccctcacaactgcccccacaacttccttccgagctgcctacagacttgacagcagaccttgaaacaggaattcaatccgagatccagacgaccattgccactgaacttgcgcccaccatcgcaaaagagcctgccgctgagagcgaaaccggcattagcgacgccagcagtcgcaagcgtgcccggtcagccgacgatgaagacgacatccccgaagccgccggccgcaagcccaagaagaagaagactaagaagatcccccagcccgagtcgaccaattaccctgccatcaccttcaaccacaatgcgaagctgcagtccaagatctccctcgagcagctgcgcaccctcatcctctacatcttcgccgagggcatagcgccccagtgggtcgccattggcaaccgcacccagtttcgcaagattgtcgcaatcatggtccccggcctcgaggaggccatgttcaagcagaacgtcgacttcagcacctacgccacccgccccgacgacaccgatcccaactcccgcgtcctgacctcgcccgacgactactacccgcgcctcctgaagcaagacgagctccccaccatactcaagggcttcgctgacatgtttgtccacctctggcctgtcaagacaccgggcagtgagaagcatgggtatataaggtcgcccatgggtatcatgttatcagccccggcagagaagacaaaggaggagaaatccggcaaagggccgcagcccgccagggagccgaaaggctggaaggacactcgtaccagaatcaccgaattcctcgccatgcccgaggacttctacaacaacgactacatactccatcctgcctgcgtctcccctgagcgtcgcaagaacctgcagttccccgacggctatgtacacactcgtgtcgagaactttgaggacggcgatgtgccagaggaccagattcagcagggcagtgtcacagctggtcgcgatgtatacgctttggactgcgagatggttgtcactggcaaggagactaacggaagagacgagctggcgctggcacggatcagtctagtgagctgggatggcactactgtgatggatgagctcgtcaagccggataaacccatccttgactacgtcactagatactcaggcatcactgaagagatgcttcttcccgtcacaacaactttacatgacatccaggcaaggctgcttgacattcttggtccgcatgctatcttagtcggccattcgctagagtcagatatgaaggttttgcgcatgacacatcccttcatcgttgatactgcactccaatacccccataaccggggccctccactgaagaacgctctgaagcacttggccacgcgatttctcaagcgcgacatccaaaaccgagctgctggtcacgactccgtcgaggatgccaaagcctgcttggatctcatccggcagaaatgcgaaaagggaaaagcatggggaaatcaagaggcacagtgtgagaacctgtttcgccgactgacgcgtgttggcacatcgtatcgcgccaatggcggagtcgaggcaacaggcggtgtcaaactcggcaagaccagtgccatgattgattggggcgatcccatgaagggtgcgggtgcggcatctacgtaccccatcggctgcaagagcgacgaggaggtgttgcaaggcgtcatacgtgctgtgcaaggtgatctaataggtgaggagatacctgccggtggtgtcgactttgtctttgcacgcttccgtgagctcgaagcaaagcaaggctggtggaataacagcagaggagacgccgctccgcctcctgacatgtccagcgtgtctctcgagacctgtatccagaatcttgccgacagaatcaagcagatttatgatgctctcccgaagtgtacgggcttcgtcatattcagcggatccggtgatcctcgcgacatgagccgtctccaggccatgaacgctcaatttaaaaaggagtacaacgtccctggcagcaattgggacgatctgagtgttcgctggactgatgttgaggccgaggcactcaagaagtctgttggtgtcgctcgaaatggtatcggcttcattggcgtcaaatagggacctttgtttgaacgaacggtgcatgatttacgatgatgggcatttctgcgatgctttgtatgagtatattagagtcgggatactacttgtgataccccagaacaaacttcattttgttggttgtatataagggaggcatggatggttgcatggctatggtcgcatgttcgtcgcatatgacgggacggcatttaagatcccacctcctacctacagcagagagtagatggaacttcgctgtgaatacaaaaattataaaaatcaaattagttggataggtggagtccttgtgattagaatgaactagatgccaacatacggaacccaggaaaatgtaagaccagctattaacaagctgctatgaaacagtatagacaagacaaaccatagaatatacgacga

SEQ ID NO: 33901 - DNA, 450 bp, Muscodor strobelii
  misc_feature: SGI cDNA ID NO. 571704
  misc_feature: Encodes the peptide sequence at SEQ ID NO 33902
atggcggaagtaaggttgccccgcgtggaaatatcatgcgcagagtgcgaccataccttgggccacgccgtcaatttgtggatccaaatcggcacaaatccggaaaccaaattcatcacctcagttggcccgaattgcgaatgttgtgagacgcaagaaacagcggaagcatatccagcaaaggaggggacttgggtagagaactgccaattccaggagatagaatgcatggagtgtgacgctcccgtgggtgccatttgcacggatgcaccttcattccatatactgaatacgggccagtacatgttcagatccgcacgtattaacgtcacgcggtcgaacacgggcgtctctgtctgcccatccatcatcagaatcctgaacgtccgacatccacttcctctagatcgagaccaacctcacgaacctcgtatccagaggatgatatag

SEQ ID NO: 33902 - protein, 149 aa, Muscodor strobelii
  misc_feature: SGI Peptide ID NO. 571704
  misc_feature (13)..(132): NCBI GI: 171684727 Blast Desc: protein product [Podospora anserina] gi|170942324|emb|CAP67976.1| protein product [Podospora anserina]
MAEVRLPRVEISCAECDHTLGHAVNLWIQIGTNPETKFITSVGPNCECCETQETAEAYPAKEGTWVENCQFQEIECMECDAPVGAICTDAPSFHILNTGQYMFRSARINVTRSNTGVSVCPSIIRILNVRHPLPLDRDQPHEPRIQRMI

SEQ ID NO: 33903 - DNA, 826 bp, Muscodor strobelii
  misc_feature: SGI EST ID NO. CUFF.80204.0
  misc_feature: Variant of the nucleotide sequence at SEQ ID NO 33901
tcccgttccgccttctacttcccttgaagcttcattgctgtcgtcttcaagccagatacagcaccatctgcccatccgccttctacaccatccagcatctcacgatggcggaagtaaggttgccccgcgtggaaatatcatgcgcagagtgcgaccataccttgggccacgccgtcaatttgtggatccaaatcggcacaaatccggaaaccaaattcatcacctcagttggcccgaattgcgaatgttgtgagacgcaagaaacagcggaagcatatccagcaaaggaggggacttgggtagagaactgccaattccaggagatagaatgcatggagtgtgacgctcccgtgggtgccatttgcacggatgcaccttcattccatatactgaatacgggccagtacatgttcagatccgcacgtattaacgtcacgcggtcgaacacgggcgtctctgtctgcccatccatcatcagaatcctgaacgtccgacatccacttcctctagatcgagaccaacctcacgaacctcgtatccagaggatgatatagcgggccgaacatcattagcattacttccaacacttccggtttaagacttcctatggacgcaatggtagaagaatgacaacctatagtccttggcatggtcgcggggtagatgacagcaaagacttcatttacatctatgcaatcattggactggagattagggaaattcaacagatcgaccgagtgggacagtcatgattatgaaagaaacaaaggtggccgcaagcatgtttaagatagaccaaaccgtctcttcgtaagccaactcgatg

SEQ ID NO: 33904 - DNA, 1938 bp, Muscodor strobelii
  misc_feature: SGI cDNA ID NO. 571705
  misc_feature: Encodes the peptide sequence at SEQ ID NO 33905
atgtcatttctcggtggtggtgccgagtgctcgaccgccggcaacccgctcagccagctcgccaaacacacacaagacgacaacagtctccagcgcgacaggctgcggaatggcactcctcaaggcagcgccgccagttttcgtagtgtccagcagaacggctcgcagcaagaggccatgaacagcttcatgcaacagaacgctcgcctacaagccgagcaccacatgcagcagaatgcccagctagacataatgcgctccgcccagcgctccggaaccccaatgtccggatgggccagcgaattccagcagcacggccctcgccccgcatccgagcagcagcagatgatgaacgacttcaagatggcctatccgaacacgggcttcgactcggccgaatacgcccgctggcagcagatgagccagcccagctcctcacagcagcagacccagccacacatgggctatcagagccccatgatgggcatgggcatgatgaacggtatgggtatgatgggcgggatgaactacggcatgcacaacaacatgatgtacaataccaacaatcaacagcagttcgatcagggtaagggcaaaggcaaggttgtcgagctggacgatcagcagtgggaggagcacttcaagcagctggaaataagcgacaagcaaaagcaagaagaggacgaggcccaggctctggaaccagaactcaacaagttggacgagcagatcctcgagtccgagacaaactacggcgacttcgaatcaatatggaaaggcatacaagctgaacaggccgcggctaaagaggtcttagacgaggaggagtgggttgatcagcttggaaacccggagtggacagatcggtttggtgaatgggatggtctgggcaccaatagtaggcttattggtgaccctcaagtcgaagactatctattcgaggaagacaatctcttcaaagacaccggaaacccctttgaagagggcatgcgcatcctagacgaaggtggcaacctctcgcttgccgcactcgcattcgaggcggctatccagaaggatcacacccatgtggaggcctgggtgcagctgggtattgcacaggcccagaacgaaaaggagacggcggcgatccgggcattagaacaagcaaagaaacttgatcctaataacccagttgcgctcatgaccttagcagtctcctacacaaacgagggttacgacagcactgcctaccgaactctcgaacgctggctatccatccgatacccctctatcatatcccccgctgatctatctcccgccacagatctcggatttacagacaggcaagtgttacatgacaaagtcagcaacctcttcatacaggccgcacgtctcagtccagatggcgagcacatggaccccgatgtccaggtcgggctcggcgtccttttctacggtgcagaggaatacgaaaaagccgtcgactgtttctcctccgctctcgcatcctcggaacttggacacgttaacaaccagaaccaaatacacctcctatggaaccgtctcggcgccaccctagccaactccggaaagagcgaggatgccatcgcagcatacgagaaagccctcaccctccggccgaatttcgtccgcgctcgttacaacttgggtgtcagctgcattaacatggggtgccactcggaagctgctggacacttgctggcagcgctgaacatgcacaagacggtggagaaggaggggagggaaaaggcgagggagttgttagggggcgacgtgagcgatgcgcagatcgacgccatgactacgcagaataggagtacgaatctgtacgatacgctgagacgggtgtttagtcagatgggacggagggatctcgctgagaaggtggttaatggtgttgatcctgagatattcaggggggatgtcgatttttag

SEQ ID NO: 33905 - protein, 645 aa, Muscodor strobelii
  misc_feature: SGI Peptide ID NO. 571705
  misc_feature (510)..(543): Pfam Id: PF00515 Pfam Desc: Tetratricopeptide repeat
  misc_feature (357)..(390): Pfam Id: PF00515 Pfam Desc: Tetratricopeptide repeat
  misc_feature (510)..(543): Pfam Id: PF07719 Pfam Desc: Tetratricopeptide repeat
  misc_feature (357)..(390): Pfam Id: PF07719 Pfam Desc: Tetratricopeptide repeat
  misc_feature (1)..(645): NCBI GI: 171684723 Blast Desc: protein product [Podospora anserina] gi|111607549|gb|ABH10692.1| PTS1-targeted peroxisomal matrix protein import [Podospora anserina] gi|170942322|emb|CAP67974.1|
  misc_feature (1)..(645): NCBI GI: 116192353 Blast Desc: CHGG_05894 [Chaetomium globosum CBS 148.51] gi|88181807|gb|EAQ89275.1| CHGG_05894 [Chaetomium globosum CBS 148.51]
  misc_feature (1)..(645): NCBI GI: 38566952 Blast Desc: related to peroxisomal targeting signal receptor [Neurospora crassa]
  misc_feature (1)..(645): NCBI GI: 154308773 Blast Desc: BC1G_07809 [Botryotinia fuckeliana B05.10] gi|150852760|gb|EDN27952.1| BC1G_07809 [Botryotinia fuckeliana B05.10]
  misc_feature (1)..(645): NCBI GI: 156050579 Blast Desc: SS1G_07877 [Sclerotinia sclerotiorum 1980] gi|154692277|gb|EDN92015.1| SS1G_07877 [Sclerotinia sclerotiorum 1980]
  misc_feature (1)..(640): NCBI GI: 164427596 Blast Desc: peroxisomal targeting signal receptor [Neurospora crassa OR74A] gi|157071809|gb|EAA36111.2| peroxisomal targeting signal receptor [Neurospora crassa OR74A]
  misc_feature (1)..(645): NCBI GI: 256734379 Blast Desc: [Nectria haematococca mpVI 77-13-4]
  misc_feature (1)..(645): NCBI GI: 46108584 Blast Desc: FG01174.1 [Gibberella zeae PH-1]
  misc_feature (1)..(645): NCBI GI: 226278198 Blast Desc: peroxisomal targeting signal receptor [Paracoccidioides brasiliensis Pb01]
  misc_feature (1)..(645): NCBI GI: 169766392 Blast Desc: [Aspergillus oryzae RIB40] gi|238483101|ref|XP_002372789.1| peroxisomal targeting receptor pex5, [Aspergillus flavus NRRL3357] gi|83765522|dbj|BAE55665.1|
MSFLGGGAECSTAGNPLSQLAKHTQDDNSLQRDRLRNGTPQGSAASFRSVQQNGSQQEAMNSFMQQNARLQAEHHMQQNAQLDIMRSAQRSGTPMSGWASEFQQHGPRPASEQQQMMNDFKMAYPNTGFDSAEYARWQQMSQPSSSQQQTQPHMGYQSPMMGMGMMNGMGMMGGMNYGMHNNMMYNTNNQQQFDQGKGKGKVVELDDQQWEEHFKQLEISDKQKQEEDEAQALEPELNKLDEQILESETNYGDFESIWKGIQAEQAAAKEVLDEEEWVDQLGNPEWTDRFGEWDGLGTNSRLIGDPQVEDYLFEEDNLFKDTGNPFEEGMRILDEGGNLSLAALAFEAAIQKDHTHVEAWVQLGIAQAQNEKETAAIRALEQAKKLDPNNPVALMTLAVSYTNEGYDSTAYRTLERWLSIRYPSIISPADLSPATDLGFTDRQVLHDKVSNLFIQAARLSPDGEHMDPDVQVGLGVLFYGAEEYEKAVDCFSSALASSELGHVNNQNQIHLLWNRLGATLANSGKSEDAIAAYEKALTLRPNFVRARYNLGVSCINMGCHSEAAGHLLAALNMHKTVEKEGREKARELLGGDVSDAQIDAMTTQNRSTNLYDTLRRVFSQMGRRDLAEKVVNGVDPEIFRGDVDF

SEQ ID NO: 33906 - DNA, 2431 bp, Muscodor strobelii
  misc_feature: SGI EST ID NO. CUFF.80286.0
  misc_feature: Variant of the nucleotide sequence at SEQ ID NO 33904
cctcacttttacagggtcgaccccaccactaacgctgctgttgatgtatgcatttgtaagatggacatcaacgttggccattcgtgtctcccaaccgttcaatacaccaacaaaacaccaataacgtctttgcttagcttcactcattatcttcactgtcactgtagacttagtagcatcgtttctagattttcttttgctccgtaatacattcaccgtccataccgccccgcatatgtattcgtcgtaaattgccaccacagcgattgggtcgacacacgttcgacactttgtgtagccgcctcagctccttgtccccatacccagacgaatcccaaccatcatgtcatttctcggtggtggtgccgagtgctcgaccgccggcaacccgctcagccagctcgccaaacacacacaagacgacaacagtctccagcgcgacaggctgcggaatggcactcctcaaggcagcgccgccagttttcgtagtgtccagcagaacggctcgcagcaagaggccatgaacagcttcatgcaacagaacgctcgcctacaagccgagcaccacatgcagcagaatgcccagctagacataatgcgctccgcccagcgctccggaaccccaatgtccggatgggccagcgaattccagcagcacggccctcgccccgcatccgagcagcagcagatgatgaacgacttcaagatggcctatccgaacacgggcttcgactcggccgaatacgcccgctggcagcagatgagccagcccagctcctcacagcagcagacccagccacacatgggctatcagagccccatgatgggcatgggcatgatgaacggtatgggtatgatgggcgggatgaactacggcatgcacaacaacatgatgtacaataccaacaatcaacagcagttcgatcagggtaagggcaaaggcaaggttgtcgagctggacgatcagcagtgggaggagcacttcaagcagctggaaataagcgacaagcaaaagcaagaagaggacgaggcccaggctctggaaccagaactcaacaagttggacgagcagatcctcgagtccgagacaaactacggcgacttcgaatcaatatggaaaggcatacaagctgaacaggccgcggctaaagaggtcttagacgaggaggagtgggttgatcagcttggaaacccggagtggacagatcggtttggtgaatgggatggtctgggcaccaatagtaggcttattggtgaccctcaagtcgaagactatctattcgaggaagacaatctcttcaaagacaccggaaacccctttgaagagggcatgcgcatcctagacgaaggtggcaacctctcgcttgccgcactcgcattcgaggcggctatccagaaggatcacacccatgtggaggcctgggtgcagctgggtattgcacaggcccagaacgaaaaggagacggcggcgatccgggcattagaacaagcaaagaaacttgatcctaataacccagttgcgctcatgaccttagcagtctcctacacaaacgagggttacgacagcactgcctaccgaactctcgaacgctggctatccatccgatacccctctatcatatcccccgctgatctatctcccgccacagatctcggatttacagacaggcaagtgttacatgacaaagtcagcaacctcttcatacaggccgcacgtctcagtccagatggcgagcacatggaccccgatgtccaggtcgggctcggcgtccttttctacggtgcagaggaatacgaaaaagccgtcgactgtttctcctccgctctcgcatcctcggaacttggacacgttaacaaccagaaccaaatacacctcctatggaaccgtctcggcgccaccctagccaactccggaaagagcgaggatgccatcgcagcatacgagaaagccctcaccctccggccgaatttcgtccgcgctcgttacaacttgggtgtcagctgcattaacatggggtgccactcggaagctgctggacacttgctggcagcgctgaacatgcacaagacggtggagaaggaggggagggaaaaggcgagggagttgttagggggcgacgtgagcgatgcgcagatcgacgccatgactacgcagaataggagtacgaatctgtacgatacgctgagacgggtgtttagtcagatgggacggagggatctcgctgagaaggtggttaatggtgttgatcctgagatattcaggggggatgtcgatttttagtggaatgggaagtgcccgaagtacctgttttagcattgcattgttgtgggttgagaatagattggtgaatgaacatcatgaacatcgtacggattggcttttgaagaaatttgagttacttgccattttgtttatgaaaggtttgaggat

SEQ ID NO: 33907 - DNA, 852 bp, Muscodor strobelii
  misc_feature: SGI cDNA ID NO. 571706
  misc_feature: Reduced expression when VOC is produced
  misc_feature: Encodes the peptide sequence at SEQ ID NO 33908
atgaaatatcatgaggctcagtcgggcggtggcgggcattccgttcgccgagcagcccttcgcgcagcgctgtcctcttccacgagggcggtcgccgtgccccgacagcagattgcccttgctgcaagacaactcgctaaggctaacaccacccccggtgccgttctccctctcgcccgctacttctcccagacagcttcggcgaggaatgaagagggggcgcccgcgtccgaggaggccgtgaatgaggtcaacagcgacacacagcagcccggcatcaccgacggcaccggcatctttgtcagcaacatgactttcgatgccaccgatgttcacatgcgtgaggccttcagcaagtatggcgagattgtctccactagcatcggacgagacgggcgcggcttgagcagaggttttgggttcatcacgttcacgaccaaggaagcagccgagagagcggtgaatgaagctaacaagtccttctggcacggccgtcgcatcgttgtgcagccccgcgcccaaaaggacgactctgagtctcaaaggcgtagaaacggctccgctgagccctcaaactcgctgtatatcggcaacatcccgtacgagacgtcggatgccgacctcaacaagctgttccgcaccctggagaatgtccgggatgtccgcgtcgccgtagaccgcaacacgggctggccccgtggctttgcccacgccgacttttccgatgtcgacagcgctgtgaaggcccatgagtatctcagcaagacccagattggcggccgacaactgcgtgtggatttctccaagcccaagagcgccgggaacagtttcatctcgagtgacaggcagtaa

SEQ ID NO: 33908 - protein, 283 aa, Muscodor strobelii
  misc_feature: SGI Peptide ID NO. 571706
  misc_feature (99)..(169): Pfam Id: PF00076 Pfam Desc: RNA recognition motif. (a.k.a. RRM, RBD, or RNP domain)
  misc_feature (194)..(265): Pfam Id: PF00076 Pfam Desc: RNA recognition motif. (a.k.a. RRM, RBD, or RNP domain)
  misc_feature (13)..(275): NCBI GI: 145614764 Blast Desc: MGG_11418 [Magnaporthe grisea 70-15] gi|145021650|gb|EDK05779.1| MGG_11418 [Magnaporthe grisea 70-15]
  misc_feature (13)..(273): NCBI GI: 38566951 Blast Desc: related to heterogeneous nuclear ribonucleoprotein HRP1 [Neurospora crassa]
  misc_feature (13)..(273): NCBI GI: 85117951 Blast Desc: NCU02959 [Neurospora crassa OR74A] gi|28927154|gb|EAA36110.1| NCU02959 [Neurospora crassa OR74A]
  misc_feature (13)..(268): NCBI GI: 171684721 Blast Desc: protein product [Podospora anserina] gi|170942321|emb|CAP67973.1| protein product [Podospora anserina]
  misc_feature (13)..(269): NCBI GI: 116192351 Blast Desc: CHGG_05893 [Chaetomium globosum CBS 148.51] gi|88181806|gb|EAQ89274.1| CHGG_05893 [Chaetomium globosum CBS 148.51]
  misc_feature (13)..(274): NCBI GI: 154308771 Blast Desc: BC1G_07808 [Botryotinia fuckeliana B05.10] gi|150852759|gb|EDN27951.1| BC1G_07808 [Botryotinia fuckeliana B05.10]
  misc_feature (33)..(269): NCBI GI: 169626491 Blast Desc: SNOG_16535 [Phaeosphaeria nodorum SN15] gi|160706106|gb|EAT76075.2| SNOG_16535 [Phaeosphaeria nodorum SN15]
  misc_feature (99)..(270): NCBI GI: 189204223 Blast Desc: RNA binding domain containing protein [Pyrenophora tritici-repentis Pt-1C-BFP] gi|187985546|gb|EDU51034.1| RNA binding domain containing protein [Pyrenophora tritici-repentis
  misc_feature (89)..(268): NCBI GI: 156050581 Blast Desc: SS1G_07878 [Sclerotinia sclerotiorum 1980] gi|154692278|gb|EDN92016.1| SS1G_07878 [Sclerotinia sclerotiorum 1980]
  misc_feature (93)..(269): NCBI GI: 242820506 Blast Desc: nucleic acid-binding protein [Talaromyces stipitatus ATCC 10500] gi|218713988|gb|EED13412.1| nucleic acid-binding protein [Talaromyces stipitatus ATCC 10500]
  misc_feature: Useful for introducing or modulating the production of volatile compounds
MKYHEAQSGGGGHSVRRAALRAALSSSTRAVAVPRQQIALAARQLAKANTTPGAVLPLARYFSQTASARNEEGAPASEEAVNEVNSDTQQPGITDGTGIFVSNMTFDATDVHMREAFSKYGEIVSTSIGRDGRGLSRGFGFITFTTKEAAERAVNEANKSFWHGRRIVVQPRAQKDDSESQRRRNGSAEPSNSLYIGNIPYETSDADLNKLFRTLENVRDVRVAVDRNTGWPRGFAHADFSDVDSAVKAHEYLSKTQIGGRQLRVDFSKPKSAGNSFISSDRQ

SEQ ID NO: 33909 - DNA, 1620 bp, Muscodor strobelii
  misc_feature: SGI EST ID NO. CUFF.80290.0
  misc_feature: Variant of the nucleotide sequence at SEQ ID NO 33907
ggaaggagtaggagcaggggtaattgtccatttggggactagcggcttccgacgcgtgctccgaaaaagccaattgtcggccaattggcaatctaaatttttctcttatcgacatctaacgtttccatcctgcggttcttgtcctactacttttctcatcatcgcatcatctacagccaccctcgtctccttcgccatcgtccgggtttccttttaattgatttaatccaagatgcattccgttcgccgagcagcccttcgcgcagcgctgtcctcttccacgagggcggtcgccgtgccccgacagcagattgcccttgctgcaagacaactcgctaaggctaacaccacccccggtgccgttctccctctcgcccgctacttctcccagacagcttcggcgaggaatgaagagggggcgcccgcgtccgaggaggccgtgaatgaggtcaacagcgacacacagcagcccggcatcaccgacggcaccggcatctttgtcagcaacatgactttcgatgccaccgatgttcacatgcgtgaggccttcagcaagtatggcgagattgtctccactagcatcggacgagacgggcgcggcttgagcagaggttttgggttcatcacgttcacgaccaaggaagcagccgagagagcggtgaatgaagctaacaagtccttctggcacggccgtcgcatcgttgtgcagccccgcgcccaaaaggacgactctgagtctcaaaggcgtagaaacggctccgctgagccctcaaactcgctgtatatcggcaacatcccgtacgagacgtcggatgccgacctcaacaagctgttccgcaccctggagaatgtccgggatgtccgcgtcgccgtagaccgcaacacgggctggccccgtggctttgcccacgccgacttttccgatgtcgacagcgctgtgaaggcccatgagtatctcagcaagacccagattggcggccgacaactgcgtgtggatttctccaagcccaagagcgccgggaacagtttcatctcgagtgacaggcagtaaacttgacaaagagagtggatcagtccgataatctgacaggtacacaagatctgaagaggtggtgtgcggatgggatgatcttgttgtggggtcgagctattgtacgagatgtttccctttgaatacaagggctgtattcacaagatttaaaagacatggagattgcagaagacgtggagggtgaagcattcagcagcgggcgaccggggcgaccggcgcttcaggcaggcgatgacaagcatggaggcttcgccatgctgctctcatctgattgtataatataatgcagctacgtacggtgtgtcgtagccgcatcctgtgtataccagtcatgtttgagtttctgctttagcacgcggcgttattgagacacaaaaccggtagtctattagccatatagaactttagtggccaatctccattctctcgaatactggactgtccattatgtcggacaagcatgtttcagattctttgattagatcaagctctatgcgcttcgctactgtgctctgtcctcagctcgatgacaaagagttgaaacaatgtacagagttagaagaatgagg

SEQ ID NO: 33910 - DNA, 1464 bp, Muscodor strobelii
  misc_feature: SGI cDNA ID NO. 571707
  misc_feature: Reduced expression when VOC is produced
  misc_feature: Encodes the peptide sequence at SEQ ID NO 33911
atggcaaccgaccactcccagcgccctgcttctcagaagctccctgctgggcttgcgaccgtactcaatgcccccgaagagcatcgcgactcggcgtattactcgtatacagatgcctcgagcaagcataactcaacagtgtccggccatggaattaatgtctaccatgccgtcaacgacaagaccccgtcgccaacgacgacgacgacgatcacccagccactggtgtcaccttcgagcaatatgagcgttgcctccatggtatctcccacgtcaccggggagcatgcgcttcaccgatcgccaatcggtcgagtacgtgcctggtggtgcgatgagcgggcccgagtctcgacgtgaaagtgtggacagcaggatcaaccagccctttggagatctgaggctggggggttctttgggaggctcgccttacaccagcgcgaaccagtcgaccacatcgatacaaaacagcctgtcccagcagaggaacccgcgcaccgggctggatcacctagctccccaccgaatctccaatggataccagccaagtgtcgagaggacaccagagggacatccgaaggcagcgcgaaccgcccctgccatcaccggccctgccacgagtaacatcgctcgggctgcagagcctacaaagggacaggcttgggcctttccagaatcggacgaggtgcaaagggccccctccggcgcggctagtggcacgttcttggattctcggcggagcagcgtggcggaatccatcgcgagcagccaatttactgccgattctcggcttccacccggacagcgacgtttagacgagggactggcaacaccggattttcagcgcatgtcggccaactcgggagatttccagaccatacaccaccaccactcgttgcaacataggcagctgtccgatcttcaaagtgaagaatccagccctcacaatggcacacagccgtacagcaggaccccagagctgcgcgtgagccataaactggccgaacgaaagagacgtacagagatgaaagagctttttgaacagctgcgagacctgatgccacaagagcgggggtccaaagcctccaagtgggagattttatcgaaagccatcaacgaacaccagcgactgacggagagtatgagcaaaatgaacgtccactatcagagtgctttacaggaggcagatagctaccgtcgcgaggcggatcggctgcgtctggaagtcaaccagctaagaggcggcgccccggtgcccgcaggtcaggggccagcgaaccagcctgtacctcctccgcagcctgccgctgaacaatacgctcaagatccatttggacgatcagctcggcccgagttaccgccgctcagatcattgagcaacagtatgtccaatgcaccagaatccatgacaggcgttcaatacgatggccaacgcacgaacggcttccgatcggagagatactaa

SEQ ID NO: 33911 - protein, 487 aa, Muscodor strobelii
  misc_feature: SGI Peptide ID NO. 571707
  misc_feature (327)..(378): Pfam Id: PF00010 Pfam Desc: Helix-loop-helix DNA-binding domain
  misc_feature (327)..(372): Pfam Id: PF00010 Pfam Desc: Helix-loop-helix DNA-binding domain
  misc_feature (7)..(481): NCBI GI: 171684719 Blast Desc: protein product [Podospora anserina] gi|170942320|emb|CAP67972.1| protein product [Podospora anserina]
  misc_feature (6)..(483): NCBI GI: 164427599 Blast Desc: NCU02957 [Neurospora crassa OR74A] gi|157071810|gb|EAA36108.2| conserved [Neurospora crassa OR74A]
  misc_feature (6)..(483): NCBI GI: 38566949 Blast Desc: [Neurospora crassa]
  misc_feature (1)..(487): NCBI GI: 46108582 Blast Desc: FG01173.1 [Gibberella zeae PH-1]
  misc_feature (3)..(483): NCBI GI: 145614758 Blast Desc: MGG_10837 [Magnaporthe grisea 70-15] gi|145021647|gb|EDK05776.1| MGG_10837 [Magnaporthe grisea 70-15]
  misc_feature (14)..(487): NCBI GI: 154318622 Blast Desc: BC1G_02700 [Botryotinia fuckeliana B05.10] gi|150857830|gb|EDN33022.1| BC1G_02700 [Botryotinia fuckeliana B05.10]
  misc_feature (140)..(487): NCBI GI: 261357597 Blast Desc: conserved [Verticillium albo-atrum VaMs.102]
  misc_feature (7)..(483): NCBI GI: 116192347 Blast Desc: CHGG_05891 [Chaetomium globosum CBS 148.51] gi|88181804|gb|EAQ89272.1| CHGG_05891 [Chaetomium globosum CBS 148.51]
  misc_feature (14)..(487): NCBI GI: 156063754 Blast Desc: SS1G_01995 [Sclerotinia sclerotiorum 1980] gi|154697329|gb|EDN97067.1| SS1G_01995 [Sclerotinia sclerotiorum 1980]
  misc_feature (19)..(410): NCBI GI: 212539047 Blast Desc: HLH transcription factor (Hpa3), [Penicillium marneffei ATCC 18224] gi|210069421|gb|EEA23512.1| HLH transcription factor (Hpa3), [Penicillium marneffei ATCC 18224]
  misc_feature: Useful for introducing or modulating the production of volatile compounds
MATDHSQRPASQKLPAGLATVLNAPEEHRDSAYYSYTDASSKHNSTVSGHGINVYHAVNDKTPSPTTTTTITQPLVSPSSNMSVASMVSPTSPGSMRFTDRQSVEYVPGGAMSGPESRRESVDSRINQPFGDLRLGGSLGGSPYTSANQSTTSIQNSLSQQRNPRTGLDHLAPHRISNGYQPSVERTPEGHPKAARTAPAITGPATSNIARAAEPTKGQAWAFPESDEVQRAPSGAASGTFLDSRRSSVAESIASSQFTADSRLPPGQRRLDEGLATPDFQRMSANSGDFQTIHHHHSLQHRQLSDLQSEESSPHNGTQPYSRTPELRVSHKLAERKRRTEMKELFEQLRDLMPQERGSKASKWEILSKAINEHQRLTESMSKMNVHYQSALQEADSYRREADRLRLEVNQLRGGAPVPAGQGPANQPVPPPQPAAEQYAQDPFGRSARPELPPLRSLSNSMSNAPESMTGVQYDGQRTNGFRSERY

SEQ ID NO: 33912 - DNA, 3316 bp, Muscodor strobelii
  misc_feature: SGI EST ID NO. CUFF.80378.0
  misc_feature: Variant of the nucleotide sequence at SEQ ID NO 33910
cccgtcctcaatctcctgtctatccctcaattgcacgttgctcctagactccgctgcgcctttacttagttctcatagccaggcaatgcctgtctgaactactacaaacagtaaaccacgcctatcgacccgcgaactggaacctcgggttctggaccgctgtgcattactctggcctgtgcttgtacttagagatacctggctgtgggacatggttggcgttcagtagtacctgccgcaacgagttcttcacaaatcccccaactcgaactccagtctccagtctccaggtcccctaggcgggtgtgacttctactcgtaccgccccagcgaaacaaaccttcctccctctcgaatcccaacccatcattttattcccattattcttattattcccatccacacctctgctctgctcagtgacgcccacaagaagaggtgtcgacgacgacaacaccaccttctgcctgcgcgcatctcactcactcgtctctgcttgttctcttttccctgttgtcgtccaccactattcgcgggccgtgaaccaattgcgcccagttgcaattggacatctgccgccaatgtcctgctgagacccaccatctgccatcattcgccaatcttcacgcatactcacatatacacatacacatacatacatacatactcataccaacctattcagccatactcgacaatctcgatcgccgacacaagcctcgacgtactctcgcatgacaccagcttcctaatgatctcttagtcgtaataaagcccatatccaagctatagaagccacaatggcaaccgaccactcccagcgccctgcttctcagaagctccctgctgggcttgcgaccgtactcaatgcccccgaagagcatcgcgactcggcgtattactcgtatacagatgcctcgagcaagcataactcaacagtgtccggccatggaattaatgtctaccatgccgtcaacgacaagaccccgtcgccaacgacgacgacgacgatcacccagccactggtgtcaccttcgagcaatatgagcgttgcctccatggtatctcccacgtcaccggggagcatgcgcttcaccgatcgccaatcggtcgagtacgtgcctggtggtgcgatgagcgggcccgagtctcgacgtgaaagtgtggacagcaggatcaaccagccctttggagatctgaggctggggggttctttgggaggctcgccttacaccagcgcgaaccagtcgaccacatcgatacaaaacagcctgtcccagcagaggaacccgcgcaccgggctggatcacctagctccccaccgaatctccaatggataccagccaagtgtcgagaggacaccagagggacatccgaaggcagcgcgaaccgcccctgccatcaccggccctgccacgagtaacatcgctcgggctgcagagcctacaaagggacaggcttgggcctttccagaatcggacgaggtgcaaagggccccctccggcgcggctagtggcacgttcttggattctcggcggagcagcgtggcggaatccatcgcgagcagccaatttactgccgattctcggcttccacccggacagcgacgtttagacgagggactggcaacaccggattttcagcgcatgtcggccaactcgggagatttccagaccatacaccaccaccactcgttgcaacataggcagctgtccgatcttcaaagtgaagaatccagccctcacaatggcacacagccgtacagcaggaccccagagctgcgcgtgagccataaactggccgaacgaaagagacgtacagagatgaaagagctttttgaacagctgcgagacctgatgccacaagagcgggggtccaaagcctccaagtgggagattttatcgaaaggtaggttccacggttcgaattgtcggctgagaatttgctaacgatgcgccgaagccatcaacgaacaccagcgactgacggagagtatgagcaaaatgaacgtccactatcagagtgctttacaggaggcagatagctaccgtcgcgaggcggatcggctgcgtctggaagtcaaccagctaagaggcggcgccccggtgcccgcaggtcaggggccagcgaaccagcctgtacctcctccgcagcctgccgctgaacaatacgctcaagatccatttggacgatcagctcggcccgagttaccgccgctcagatcattgagcaacagtatgtccaatgcaccagaatccatgacaggcgttcaatacgatggccaacgcacgaacggcttccgatcggagagatactaagatggcagagcttgtgattgcacataagacatgctcgattgatcatctgagcatcggggtaccaacggcgttgtcatatctttggacccgaatatcactcacttccatttcacttccttttttcatttgtttccgaaccaccataatcaacaattcttttagatataacgaatgtgcaaacgatacccaacatgaaaggacgagtcacattcattcgcggatcttcggtcagccactttacagagggcaacatacatatttggcgaagcgcgggtgcagttgctgcatgtgacaacaagtgttggattagggattagggttatcctggcgtttgtgtgcaatgaaggcaaggcagcgtcacatttgacaaacagtcagtgacttgggcctctcttctccaccgggtcgtcggcgtgggttatcaggttgggacacatgccacgcacatgcgggcagatcaaaaagcttgaacaggatgggaatgggaggtgcttggagcggctgcgggtcgggttgagcaagtcaggacgacattcctcacgcggattcttaatctgcgaagagatgattggtggtggtgttcagggtgcatacgcctctctgtcaaatcttcacttctgttacattttcttcttctctctgagcagtgtgcatataccctattaggccgttgcttcactcgtcgctgctatagttttctgggcggtgtcaaaatgctggctgtcgaggagtttggggatgtcaaacacaagacgaggtgtcgtgagttgcggacggcttgtagatgaggagcatttgaatgagaagcaagagatactccatatgacgggctagtccgttctccaatacagaaacggccttgaagtggccatttgtgttgaatgcaaagattcttatttccacttggtgcccgggtttaatgtttgactacagctcaagggtgggaggatatcaatctatgcaagatgtgtatcaacaggttggcacttatgcaggct

SEQ ID NO: 33913 - DNA, 627 bp, Muscodor strobelii
  misc_feature: SGI cDNA ID NO. 571708
  misc_feature: Encodes the peptide sequence at SEQ ID NO 33914
atgcatgagaacgttcaagaccttaagaacactgcaggcagcccatcttcaactccgcagcagaaacttgcgcgagtacatgctctcatattctatcaactcatacgcatgttcgatggggacgttacattaggccaacaagcggacgatgatctctcgttgctcgagtcgtggaatggcgatctttataaccttcgggataacctggacgacttgattaaattggatcgtaagtctcttcgagagcataaagtagagtcttgggagcgatggatttttgcggaaagtctgagaagaaccatcatcatggttttttccatcagaaaattctgggacctacagaaaacccgtaagaaacaagatgacatgggagagtgggtcgacgcccctcgctggatactatccagccacctatggaatgccaataattcattcgatttcttccgtgcttggaaagaacagccattttacctgatagatactttcaaatttgacgagttcttggaaacaggcaacggggatgacctggatgattttgccctctacttcttgacagtatattttggtgtaaatgaaatcaagactttctgttacgagacaagtggccgtttcttaaagatggtgtga

SEQ ID NO: 33914 - protein, 208 aa, Muscodor strobelii
  misc_feature: SGI Peptide ID NO. 571708
  misc_feature (4)..(208): NCBI GI: 261357598 Blast Desc: C6 zinc finger domain-containing protein [Verticillium albo-atrum VaMs.102]
  misc_feature (2)..(194): NCBI GI: 261358052 Blast Desc: C6 zinc finger domain-containing protein [Verticillium albo-atrum VaMs.102]
  misc_feature (1)..(186): NCBI GI: 119473987 Blast Desc: C6 zinc finger domain protein [Neosartorya fischeri NRRL 181] gi|119407022|gb|EAW16972.1| C6 zinc finger domain protein [Neosartorya fischeri NRRL 181]
  misc_feature (13)..(198): NCBI GI: 256734381 Blast Desc: NECHADRAFT_89979 [Nectria haematococca mpVI 77-13-4]
  misc_feature (13)..(196): NCBI GI: 46108580 Blast Desc: FG01172.1 [Gibberella zeae PH-1]
  misc_feature (12)..(198): NCBI GI: 145242082 Blast Desc: An09g03710 [Aspergillus niger] gi|134078232|emb|CAK96813.1| protein product [Aspergillus niger]
  misc_feature (11)..(205): NCBI GI: 189205228 Blast Desc: conserved [Pyrenophora tritici-repentis Pt-1C-BFP] gi|187986048|gb|EDU51536.1| conserved [Pyrenophora tritici-repentis Pt-1C-BFP]
  misc_feature (16)..(202): NCBI GI: 169609855 Blast Desc: SNOG_08019 [Phaeosphaeria nodorum SN15] gi|111063175|gb|EAT84295.1| SNOG_08019 [Phaeosphaeria nodorum SN15]
  misc_feature (23)..(205): NCBI GI: 212536969 Blast Desc: C6 finger domain protein, [Penicillium marneffei ATCC 18224] gi|210068382|gb|EEA22473.1| C6 finger domain protein, [Penicillium marneffei ATCC 18224]
  misc_feature (1)..(194): NCBI GI: 169763852 Blast Desc: [Aspergillus oryzae RIB40] gi|238489827|ref|XP_002376151.1| conserved [Aspergillus flavus NRRL3357] gi|83770854|dbj|BAE60987.1| protein product oryzae]
MHENVQDLKNTAGSPSSTPQQKLARVHALIFYQLIRMFDGDVTLGQQADDDLSLLESWNGDLYNLRDNLDDLIKLDRKSLREHKVESWERWIFAESLRRTIIMVFSIRKFWDLQKTRKKQDDMGEWVDAPRWILSSHLWNANNSFDFFRAWKEQPFYLIDTFKFDEFLETGNGDDLDDFALYFLTVYFGVNEIKTFCYETSGRFLKMV

SEQ ID NO: 33915 - DNA, 531 bp, Muscodor strobelii
  misc_feature: SGI EST ID NO. CUFF.80250.0
  misc_feature: Variant of the nucleotide sequence at SEQ ID NO 33913
aagccttctccttatgctcattgtacgcaaatcaaaaccagtcaaatcgaggcgttatcctacggctcatgcatgagaacgttcaagaccttaagaacactgcaggcagcccatcttcaactccgcagcagaaacttgcgcgagtacatgctctcatattctatcaactcatacgcatgttcgatggggacgttacattaggccaacaagcggacgatgatctctcgttgctcgagtcgtggaatggcgatctttataaccttcgggataacctggacgacttgattaaattggatcgtaagtctcttcgagagcataaagtagagtcttgggagcgatggatttttgcggaaagtctgagaagaaccatcatcatggttttttccatcagaaaattctgggacctacagaaaacccgtaagaaacaagatgacatgggagagtgggtcgacgcccctcgctggatactatccagccacctatggaatgccaataattcattcgatttcttccgtgcttggaaagaacagc

SEQ ID NO: 33916 - DNA, 1782 bp, Muscodor strobelii
  misc_feature: SGI cDNA ID NO. 571709
  misc_feature: Encodes the peptide sequence at SEQ ID NO 33917
atggattgcgccagccgagctctcagtttctgggcctaccaggtcacacaagagattatctaccagcagcacatgtcgaaaacactaacacagaaatactctcgtttgaatgtcgaccttgacaaggtagtgaacgatgccaacgccgagatcgccaactgccataacaagctcaagagtgcagaacttgagcgagacgagactcgtaagagatacgacgaacttcttcaaacatataaagagaagaacaagaggctgcttcagactcaagagctgtatgacaaactcaagcgaagagcaatgctggatcaagtccaagacgctgctgaggatgctgtagagtctactttgcatataccgcccatcaccagcaacacagagatacttgcttcgcaaaatcagccgtactttcaatctcatgaaggcttctacggaccttctgacacaatgcgacacgagcagcacacaggtcctggtctctacgataaacagcctcgagcgatgcatcatttatctcaagaatttaccaattccacagatttcacattcttcttcaagattttaacaagtgacttcgaggctgctcagacgatggcatataactctcatagaactagccactccaaatcggcagttagtacgagcacccagtcctgcctcggggtgtcgaagcagccggcctgcatcgacacccgggagcagccctcgcagtcatttttcaaatctctctttcgaggagatggccaagcgacgaagcccaagcctgcgctgagagaccagctcgtcatcagcgcaccgctgccggtagtaggcccagcgccacagcatcctaatgggcatccattgcatccaggtgcaaatgcagcagctttgtcgaaatataacaccccaatcttccctcacccatctcctaaggctcaggcagtacatatcaatcgagctaacctcgcttcctcccctcgcgaggcgctcaactcgcactcgactgctcaatggctcgatgatttgtctcgtgaaagcgcaaaaaagctcagctcgcccgagaagtctgtcgccgaacgtgagcgtgcgattaaagcacggaatcgcaaggtcaaggtctaccaaccagttgaagatggaccaattggtttccgcgctgttgatgagccggccaatcatgtaatacatgagccggtcaacgatgtgatacgtgagcgtcggtccgggagggttttcacggcccgcacggagaatgaccgacagcccccaatcgtaaacctatgtcccccaccggagggcgatgtactgcaagctaatccccagggtctcacggtcgaccatgcatataagagactatacaatgactcgtcgagggacgtgcgtcgcctcgatggacgcgtaaaggagctggagaagttcaaacctctcgcatggcttgtagcagaggcgcaaaacattcatcccggagacatcgaaggtctcaccaccgctctaaggagcattatactagacagagagcagctagcagagttgttgccgctcgcagaaaccttagcggacgaaaccgggctggcttctttcgatcgtctgcaaccagcccttttagaaattctcgaagaaagagatagagcgaaagctgcccttgctcaccaaaggcgtaggaggagagacgctgagttgcgagtccagagtctcgaaaatcaactgagagataatcaagttcaaggaccgcatagccgtcacgaggagcagtatgtgcgttggaactctggtaggatggccgtcagtcctctacgctaa

SEQ ID NO: 33917 - protein, 593 aa, Muscodor strobelii
  misc_feature: SGI Peptide ID NO. 571709
  misc_feature (1)..(119): NCBI GI: 46116854 Blast Desc: FG04269.1 [Gibberella zeae PH-1]
  misc_feature (1)..(117): NCBI GI: 156049409 Blast Desc: SS1G_08411 [Sclerotinia sclerotiorum 1980] gi|154692810|gb|EDN92548.1| SS1G_08411 [Sclerotinia sclerotiorum 1980]
  misc_feature (1)..(137): NCBI GI: 256725956 Blast Desc: NECHADRAFT_43613 [Nectria haematococca mpVI 77-13-4]
  misc_feature (1)..(143): NCBI GI: 261352241 Blast Desc: E3 ubiquitin-protein ligase CCNB1IP1 [Verticillium albo-atrum VaMs.102]
  misc_feature (1)..(128): NCBI GI: 212530250 Blast Desc: conserved [Penicillium marneffei ATCC 18224] gi|210074680|gb|EEA28767.1| conserved [Penicillium marneffei ATCC 18224]
  misc_feature (1)..(117): NCBI GI: 261190588 Blast Desc: cyclin B1 interacting protein 1 [Ajellomyces dermatitidis SLH14081] gi|239591126|gb|EEQ73707.1| cyclin B1 interacting protein 1 [Ajellomyces dermatitidis SLH14081]
  misc_feature (1)..(117): NCBI GI: 239614813 Blast Desc: cyclin B1 interacting protein 1 [Ajellomyces dermatitidis ER-3]
  misc_feature (1)..(116): NCBI GI: 242819203 Blast Desc: conserved [Talaromyces stipitatus ATCC 10500] gi|218713734|gb|EED13158.1| conserved [Talaromyces stipitatus ATCC 10500]
  misc_feature (1)..(124): NCBI GI: 255956575 Blast Desc: Pc21g20530 [Penicillium chrysogenum Wisconsin 54-1255] gi|211590751|emb|CAP96950.1| Pc21g20530 [Penicillium chrysogenum Wisconsin 54-1255]
  misc_feature (1)..(135): NCBI GI: 145243030 Blast Desc: An11g00580 [Aspergillus niger] gi|134078729|emb|CAK48291.1| protein product [Aspergillus niger]
MDCASRALSFWAYQVTQEIIYQQHMSKTLTQKYSRLNVDLDKVVNDANAEIANCHNKLKSAELERDETRKRYDELLQTYKEKNKRLLQTQELYDKLKRRAMLDQVQDAAEDAVESTLHIPPITSNTEILASQNQPYFQSHEGFYGPSDTMRHEQHTGPGLYDKQPRAMHHLSQEFTNSTDFTFFFKILTSDFEAAQTMAYNSHRTSHSKSAVSTSTQSCLGVSKQPACIDTREQPSQSFFKSLFRGDGQATKPKPALRDQLVISAPLPVVGPAPQHPNGHPLHPGANAAALSKYNTPIFPHPSPKAQAVHINRANLASSPREALNSHSTAQWLDDLSRESAKKLSSPEKSVAERERAIKARNRKVKVYQPVEDGPIGFRAVDEPANHVIHEPVNDVIRERRSGRVFTARTENDRQPPIVNLCPPPEGDVLQANPQGLTVDHAYKRLYNDSSRDVRRLDGRVKELEKFKPLAWLVAEAQNIHPGDIEGLTTALRSIILDREQLAELLPLAETLADETGLASFDRLQPALLEILEERDRAKAALAHQRRRRRDAELRVQSLENQLRDNQVQGPHSRHEEQYVRWNSGRMAVSPLR

SEQ ID NO: 33918 - DNA, 2373 bp, Muscodor strobelii
  misc_feature: SGI cDNA ID NO. 571710
  misc_feature: Encodes the peptide sequence at SEQ ID NO 33919
atggcaccgagtatccccattcccacccagggtggcatgtttcatacgttccaaggagtgacaccccgaaagcaatcatcagagtccggcgacagcgccaagaccagcggcaatggcacagccaagaggattactacgccgcatgcatgtgctgagtgcaagcgtagaaagatacgttgtgatggccaacagccttgtggtcaatgcctttcgagtcgagctcctaaacggtgtttttatgacaagcatcgacaaagagtgatcccgtcaagaaaaacactcgaagctctgtcacagtcattagaagaatgccgttctatcctcaaacgattatttccaaaccatgagatccagtctcttctaccgttacctcggcaagaactactcggtcttcttgaccgtcccgtcaacgactgcatcactgctcttccgtcgccaccattacatccctcgtcaatctccgctgatggggcttctcccacactttgcggctctgaagaaggactttctgccttggaacagataccgtctcgggattcagaatgggacgaggaacgtcgcgcacgtgcaaatctccccgcggaggctgacgatgtgaatgcattatcgctttccgtcgatcgccaggcatcttacttgggtgcctcttctatcaaagcggcactgatggtcatgctcaaagtccagccaggccttagaaactctcttacacctccactcaacagtgtcgagatggcacacaatttacctatcctacggcaaaaagctaccaacgcaaaagagccacaacgagtgccttggtcatggaagggccaaaccctcatcgatgcctatttcaaacgagtacatgtcctcacgccgatgctcgacgaagcttccttccgagcagactatctagaaggtcagcggttcgatgcgccttggctcgctctgttgaatatggtttttgccatgggcagcatcgtggcgatgaaatcagatgattacaatcatctcaactactacagtcgagctatggaatatctccctatggattcgttcggcagcagccacatcgaaacagttcaggcattggcgctgataggaggcttctatctccactacatcaatcgaccaaacatggccaacgctgtgattggagctgccatccgaatggcgagtgcattgggacttcatcgcgagagcatggctcagggttctgttggttccagcagtgatattgccattgctgaaacgcggagacgcacgtggtggagcttattctatgtggacacttgcgcgactacaacactcggtcgtccctcatttggacgatggggaccggcaatcaatgtgagaccccctgagagcggcctcagctcaggtcgggactctgcccaacatgcaggcattctgcctctagttgagaacataaaattctgcaagatcgcaacggctgtacaagatatgctggctatttcaccgctgttacgcacggaggaccgctgtagcctggacgggcagcttgtaaactggtacagcagtctcccctggctccttcggacgagtgatccctgcgccgaacccttgtatatcgcacgctgtgtcatgaagtggcgatatcagaatctgcggatgttgctgcaccggcccgtactattgaacctcgcctcgagcggggcatcacacgcacctgagcacgacatcgccgccattgaagcctgccgcgatctcgcgaagcagaccatcgaagacatagcccgcgagtggacacgcaatcagatgtctggctggaacgctgtctggttcctgtatcaagccgccatgatcccgctcgtctctatcttctggcaatgggacagcccgcgcgtacccgactggcagaagcagatagagacaatactcgagctcatggaggctatggaggactggtcacttgccgcgcggcgctctcgtgaggtcatttggcgtatgtacgaagcctcacggcagcttgagccgagcctgcgagcggccacagccgcacagcagcagtccctgtcgcctcacctacaaattgttactggccacgacgccatgctcggggccctagggtcggattcagacctccacatgtcacccatcggccttgaaacagagggtttcgaaggtatgatgggcatgctagatcaacatggtctctgggacctcgatggcatgctctggggcggcttccccgatgaattggactggacgcagcagcactttggcagcaccggcaccagccatctgcaccaagatagcctacttagtggcggtggcgcttcaacgggaagctatgccatgcagctgagccccacgacgcccgtctctgcaggcatggacggggcgacatcattccccttcgtgcattaa

SEQ ID NO: 33919 - protein, 790 aa, Muscodor strobelii
  misc_feature: SGI Peptide ID NO. 571710
  misc_feature (48)..(87): Pfam Id: PF00172 Pfam Desc: Fungal Zn(2)-Cys(6) binuclear cluster domain
  misc_feature (351)..(450): Pfam Id: PF04082 Pfam Desc: Fungal specific transcription factor domain
  misc_feature (351)..(435): Pfam Id: PF04082 Pfam Desc: Fungal specific transcription factor domain
  misc_feature (1)..(730): NCBI GI: 171690758 Blast Desc: protein product [Podospora anserina] gi|170945327|emb|CAP71439.1| protein product [Podospora anserina]
  misc_feature (1)..(732): NCBI GI: 39979168 Blast Desc: related to lactose regulatory protein [Neurospora crassa]
  misc_feature (1)..(732): NCBI GI: 85109027 Blast Desc: NCU08042 [Neurospora crassa OR74A] gi|28924323|gb|EAA33476.1| conserved [Neurospora crassa OR74A]
  misc_feature (1)..(729): NCBI GI: 116195994 Blast Desc: conserved [Chaetomium globosum CBS 148.51] gi|88180508|gb|EAQ87976.1| conserved [Chaetomium globosum CBS 148.51]
  misc_feature (1)..(736): NCBI GI: 39952417 Blast Desc: MGG_01833 [Magnaporthe grisea 70-15] gi|145020303|gb|EDK04432.1| MGG_01833 [Magnaporthe grisea 70-15]
  misc_feature (13)..(732): NCBI GI: 261354207 Blast Desc: conserved [Verticillium albo-atrum VaMs.102]
  misc_feature (48)..(723): NCBI GI: 256720358 Blast Desc: NECHADRAFT_56032 [Nectria haematococca mpVI 77-13-4]
  misc_feature (93)..(736): NCBI GI: 154317483 Blast Desc: BC1G_03093 [Botryotinia fuckeliana B05.10] gi|150844267|gb|EDN19460.1| BC1G_03093 [Botryotinia fuckeliana B05.10]
  misc_feature (1)..(426): NCBI GI: 261352243 Blast Desc: conserved [Verticillium albo-atrum VaMs.102]
  misc_feature (86)..(654): NCBI GI: 46118051 Blast Desc: FG04680.1 [Gibberella zeae PH-1]
MAPSIPIPTQGGMFHTFQGVTPRKQSSESGDSAKTSGNGTAKRITTPHACAECKRRKIRCDGQQPCGQCLSSRAPKRCFYDKHRQRVIPSRKTLEALSQSLEECRSILKRLFPNHEIQSLLPLPRQELLGLLDRPVNDCITALPSPPLHPSSISADGASPTLCGSEEGLSALEQIPSRDSEWDEERRARANLPAEADDVNALSLSVDRQASYLGASSIKAALMVMLKVQPGLRNSLTPPLNSVEMAHNLPILRQKATNAKEPQRVPWSWKGQTLIDAYFKRVHVLTPMLDEASFRADYLEGQRFDAPWLALLNMVFAMGSIVAMKSDDYNHLNYYSRAMEYLPMDSFGSSHIETVQALALIGGFYLHYINRPNMANAVIGAAIRMASALGLHRESMAQGSVGSSSDIAIAETRRRTWWSLFYVDTCATTTLGRPSFGRWGPAINVRPPESGLSSGRDSAQHAGILPLVENIKFCKIATAVQDMLAISPLLRTEDRCSLDGQLVNWYSSLPWLLRTSDPCAEPLYIARCVMKWRYQNLRMLLHRPVLLNLASSGASHAPEHDIAAIEACRDLAKQTIEDIAREWTRNQMSGWNAVWFLYQAAMIPLVSIFWQWDSPRVPDWQKQIETILELMEAMEDWSLAARRSREVIWRMYEASRQLEPSLRAATAAQQQSLSPHLQIVTGHDAMLGALGSDSDLHMSPIGLETEGFEGMMGMLDQHGLWDLDGMLWGGFPDELDWTQQHFGSTGTSHLHQDSLLSGGGASTGSYAMQLSPTTPVSAGMDGATSFPFVH

SEQ ID NO: 33920 - DNA, 3289 bp, Muscodor strobelii
  misc_feature: SGI EST ID NO. CUFF.80281.0
  misc_feature: Variant of the nucleotide sequence at SEQ ID NO 33918
gacaggggtcctttcttgactccacagtttattctaactcctttctcatttccgtggggaaaagtctccacatcgcgaaggctgcatgccactgttgtggatgtgggaatagacggtatttaagtcttcatcgtcgcccgctctaccgggagtgaattgggtagatgctacgagaccctcaagtgtttttgatgcctcactcctaggccaaagcaaaccagactcggcttcccaaggttatactatatagtagactcataagcacatctgatttttgtgtcggcaaacttccaacatggcaccgagtatccccattcccacccagggtggcatgtttcatacgttccaaggagtgacaccccgaaagcaatcatcagagtccggcgacagcgccaagaccagcggcaatggcacagccaagaggattactacgccgcatgcatgtgctgagtgcaagcgtagaaagatgtaaggctcgagttgtgcaacctcaactataaacaattcagggctaagcgaaatgcagacgttgtgatggccaacagccttgtggtcaatgcctttcgagtcgagctcctaaacggtgtttttatgacaagcatcgacaaagagtgatcccgtcaagaaaaacactcgaagctctgtcacagtcattagaagaatgccgttctatcctcaaacgattatttccaaaccatgagatccagtctcttctaccgttacctcggcaagaactactcggtcttcttgaccgtcccgtcaacgactgcatcactgctcttccgtcgccaccattacatccctcgtcaatctccgctgatggggcttctcccacactttgcggctctgaagaaggactttctgccttggaacagataccgtctcgggattcagaatgggacgaggaacgtcgcgcacgtgcaaatctccccgcggaggctgacgatgtgaatgcattatcgctttccgtcgatcgccaggcatcttacttgggtgcctcttctatcaaagcggcactgatggtcatgctcaaagtccagccaggccttagaaactctcttacacctccactcaacagtgtcgagatggcacacaatttacctatcctacggcaaaaagctaccaacgcaaaagagccacaacgagtgccttggtcatggaagggccaaaccctcatcgatgcctatttcaaacgagtacatgtcctcacgccgatgctcgacgaagcttccttccgagcagactatctagaaggtcagcggttcgatgcgccttggctcgctctgttgaatatggtttttgccatgggcagcatcgtggcgatgaaatcagatgattacaatcatctcaactactacagtcgagctatggaatatctccctatggattcgttcggcagcagccacatcgaaacagttcaggcattggcgctgataggaggcttctatctccactacatcaatcgaccaaacatggccaacgctgtgattggagctgccatccgaatggcgagtgcattgggacttcatcgcgagagcatggctcagggttctgttggttccagcagtgatattgccattgctgaaacgcggagacgcacgtggtggagcttattctatgtggacacttgcgcgactacaacactcggtcgtccctcatttggacgatggggaccggcaatcaatgtgagaccccctgagagcggcctcagctcaggtcgggactctgcccaacatgcaggcattctgcctctagttgagaacataaaattctgcaagatcgcaacggctgtacaagatatgctggctatttcaccgctgttacgcacggaggaccgctgtagcctggacgggcagcttgtaaactggtacagcagtctcccctggctccttcggacgagtgatccctgcgccgaacccttgtatatcgcacgctgtgtcatgaagtggcgatatcagaatctgcggatgttgctgcaccggcccgtactattgaacctcgcctcgagcggggcatcacacgcacctgagcacgacatcgccgccattgaagcctgccgcgatctcgcgaagcagaccatcgaagacatagcccgcgagtggacacgcaatcagatgtctggctggaacgctgtctggttcctgtatcaagccgccatgatcccgctcgtctctatcttctggcaatgggacagcccgcgcgtacccgactggcagaagcagatagagacaatactcgagctcatggaggctatggaggactggtcacttgccgcgcggcgctctcgtgaggtcatttggcgtatgtacgaagcctcacggcagcttgagccgagcctgcgagcggccacagccgcacagcagcagtccctgtcgcctcacctacaaattgttactggccacgacgccatgctcggggccctagggtcggattcagacctccacatgtcacccatcggccttgaaacagagggtttcgaaggtatgatgggcatgctagatcaacatggtctctgggacctcgatggcatgctctggggcggcttccccgatgaattggactggacgcagcagcactttggcagcaccggcaccagccatctgcaccaagatagcctacttagtggcggtggcgcttcaacgggaagctatgccatgcagctgagccccacgacgcccgtctctgcaggcatggacggggcgacatcattccccttcgtgcattaagcgcactttacgttatctttctccttccaaattccccaattcatccttttttccatccttcgcctttgtttaggcgagtggggacggcatgctcgatgctaccgtgacgccaccttggtgggtgataggccaatttgatatcgtcgtcttgatgattacgatgacgacaatgacgatgatgaagcaaatgaatatgcaagaagacgaggcggtggcgccacaacaacacacttgtacaatttgggtcatgcatgtattactatatggtgcctgctgatttctaggtatctggaagaatctgggtacatacatgtattggagtttgtatacatggaacatagcgtcagacgctcaaaaaattatggctcacgagacctttatgcttgactacgaatgaaatcaaaagctattcgatcttcgttcacttctttatctttgcacaatttatgactagaagcaggttcaatctactagtaaaggggccagtggtaggaccccgactatgttgacaatattctcaagtcgacaggcccctcttgctttacaattactcctcacataga

SEQ ID NO: 33921 - DNA, 1617 bp, Muscodor strobelii
  misc_feature: SGI cDNA ID NO. 571711
  misc_feature: Encodes the peptide sequence at SEQ ID NO 33922
atgactgagattgtggcgacacaaacgccgccgcttctccacggcccaacagagaaggagaagaaatatgacagacagctaaggctctgggccgcgagtggtcaagcagctctggagtctgcaaatattcttgtcgtcaattccggtgctggcactgtaggcgtggaaacactcaagaatctagttctcccaggtattggcaagtttaccattgctgacgacgccattgtaagcgaggctgatcttggtgtcaatttcttcctcgataagagctgtctaggcaagttacggtcagaatgttgcacaaaacttctgctggagttgaacccagaggtccagggagactggtatcccaagaatgattgcaaactagaccttcatgcgatattaaatgattcagaccactttaccttgatcgtgtatacgaatcccatccgagaagaggatctcgccaccatcaaggcctacgccagcgagaggcagacgccgatcatatccatccactccgcggggctctactcttacttcagaatggagctaccaggaactttcccaatcgtagacactcatcctgaggtcgagaagacaacagaccttaggctcctgcaaccttggccggagctttctgcgctagcgaatgagatgaccaaggatttggatgctcttgacgatcatgagcatgggcatctaccttacgttgtgatcctactccgcttcctcgaaatgtggaggcaatcacacgatgggcgcaatcccaccaccttcaaggagaagacagagttcggcaaatttgttctggccggctcaagaaccaataatcctgagggtggcgaagagaatttccaggaggccgttgtcgccattaacaagaacatcaagctacccgagttagaaagtgggttggaggaggtactcaatcatcaactgcttagcgagaccgaacgccactcgtcattctggctcattgcaagcgcgatcagcattttctaccaaaagcacgcttgtctcccattgcctggatctttacccgatatgaaggcgcaatcaagtgtctacgtcaagctgcagagtttatacaaagagaaggctcgaagggatgcccaagaggtactggaaatagtcaggaaaagcccaggtggcaaacaaattggttccgccgaggtggacctgttttgcaagaacgctcggttcgtcaagctagtcaacgcaaagccaagagacatagatctctgtcagatatacgagattgaaaagacgaatgacgacgcagcgacggagatgagaatagcaaccgagggagcctttggtctgcccatgtcaaatcttccgatttacttggcgctaaaggctaccgctcacaactcaagagcctctgccgatgagatcatgaacaccatagtcagtgaaattcccccagccgccggagatgagaggattaagcaaacggcccaagaagtcgcaagagccgcaggaggcgagctgcataacatttctgcgctcacaggcggtatggtagctcaagagatgataaaaatcatcacaaagcagtatatccctattgacgacacttgcatattcgacggcataagcagccgatgccaggtacttcgtttatag

SEQ ID NO: 33922 - protein, 538 aa, Muscodor strobelii
  misc_feature: SGI Peptide ID NO. 571711
  misc_feature (39)..(180): Pfam Id: PF00899 Pfam Desc: ThiF family
  misc_feature (39)..(113): Pfam Id: PF00899 Pfam Desc: ThiF family
  misc_feature (1)..(538): NCBI GI: 171690752 Blast Desc: protein product [Podospora anserina] gi|170945324|emb|CAP71436.1| protein product [Podospora anserina]
  misc_feature (5)..(538): NCBI GI: 46116852 Blast Desc: FG04268.1 [Gibberella zeae PH-1]
  misc_feature (5)..(538): NCBI GI: 256725958 Blast Desc: [Nectria haematococca mpVI 77-13-4]
  misc_feature (7)..(538): NCBI GI: 145613167 Blast Desc: MGG_01832 [Magnaporthe grisea 70-15] gi|145020305|gb|EDK04434.1| MGG_01832 [Magnaporthe grisea 70-15]
  misc_feature (1)..(538): NCBI GI: 156049401 Blast Desc: SS1G_08407 [Sclerotinia sclerotiorum 1980] gi|154692806|gb|EDN92544.1| SS1G_08407 [Sclerotinia sclerotiorum 1980]
  misc_feature (1)..(538): NCBI GI: 85109023 Blast Desc: NCU08040 [Neurospora crassa OR74A] gi|28924321|gb|EAA33474.1| conserved [Neurospora crassa OR74A] gi|39979167|emb|CAE85540.1| related to auxin-resistance protein
  misc_feature (8)..(538): NCBI GI: 154317485 Blast Desc: BC1G_03094 [Botryotinia fuckeliana B05.10] gi|150844268|gb|EDN19461.1| BC1G_03094 [Botryotinia fuckeliana B05.10]
  misc_feature (1)..(538): NCBI GI: 261352245 Blast Desc: NEDD8-activating enzyme E1 regulatory subunit [Verticillium albo-atrum VaMs.102]
  misc_feature (5)..(538): NCBI GI: 145243002 Blast Desc: An11g00460 [Aspergillus niger] gi|134078717|emb|CAK48279.1| protein product [Aspergillus niger]
  misc_feature (10)..(538): NCBI GI: 70992199 Blast Desc: ubiquitin-like activating enzyme (UlaA) [Aspergillus fumigatus Af293] gi|66848581|gb|EAL88910.1| ubiquitin-like activating enzyme (UlaA), [Aspergillus fumigatus Af293] enzyme
MTEIVATQTPPLLHGPTEKEKKYDRQLRLWAASGQAALESANILVVNSGAGTVGVETLKNLVLPGIGKFTIADDAIVSEADLGVNFFLDKSCLGKLRSECCTKLLLELNPEVQGDWYPKNDCKLDLHAILNDSDHFTLIVYTNPIREEDLATIKAYASERQTPIISIHSAGLYSYFRMELPGTFPIVDTHPEVEKTTDLRLLQPWPELSALANEMTKDLDALDDHEHGHLPYVVILLRFLEMWRQSHDGRNPTTFKEKTEFGKFVLAGSRTNNPEGGEENFQEAVVAINKNIKLPELESGLEEVLNHQLLSETERHSSFWLIASAISIFYQKHACLPLPGSLPDMKAQSSVYVKLQSLYKEKARRDAQEVLEIVRKSPGGKQIGSAEVDLFCKNARFVKLVNAKPRDIDLCQIYEIEKTNDDAATEMRIATEGAFGLPMSNLPIYLALKATAHNSRASADEIMNTIVSEIPPAAGDERIKQTAQEVARAAGGELHNISALTGGMVAQEMIKIITKQYIPIDDTCIFDGISSRCQVLRL

SEQ ID NO: 33923 - DNA, 2416 bp, Muscodor strobelii
  misc_feature: SGI EST ID NO. CUFF.80324.0
  misc_feature: Variant of the nucleotide sequence at SEQ ID NO 33921
tgcgtccgtaatgtttcaaacgcgaaactcatcttaggattacatgcgacaaatctttctttcatcacatgttgcggtcgcgttcaccaagtagcctcgtctataatctgtcgatcgtcgccatattctcttgagggtctacgatgactgagattgtggcgacacaaacgccgccgcttctccacggcccaacagagaaggagaagaaatatgacagacagctaaggctctgggccgcgagtggtcaagcagctctggagtctgcaaatattcttgtcgtcaattccggtgctggcactgtaggcgtggaaacactcaagaatctagttctcccaggtattggcaagtttaccattgctgacgacgccattgtaagcgaggctgatcttggtgtcaatttcttcctcgataagagctgtctaggcaagttacggtcagaatgttgcacaaaacttctgctggagttgaacccagaggtccagggagactggtatcccaagaatgattgcaaactagaccttcatgcgatattaaatgattcagaccactttaccttgatcgtgtatacgaatcccatccgagaagaggatctcgccaccatcaaggcctacgccagcgagaggcagacgccgatcatatccatccactccgcggggctctactcttacttcagaatggagctaccaggaactttcccaatcgtagacactcatcctgaggtcgagaagacaacagaccttaggctcctgcaaccttggccggagctttctgcgctagcgaatgagatgaccaaggatttggatgctcttgacgatcatgagcatgggcatctaccttacgttgtgatcctactccgcttcctcgaaatgtggaggcaatcacacgatgggcgcaatcccaccaccttcaaggagaagacagagttcggcaaatttgttctggccggctcaagaaccaataatcctgagggtggcgaagagaatttccaggaggccgttgtcgccattaacaagaacatcaagctacccgagttagaaagtgggttggaggaggtactcaatcatcaactgcttagcgagaccgaacgccactcgtcattctggctcattgcaagcgcgatcagcattttctaccaaaagcacgcttgtctcccattgcctggatctttacccgatatgaaggcgcaatcaagtgtctacgtcaagctgcagagtttatacaaagagaaggctcgaagggatgcccaagaggtactggaaatagtcaggaaaagcccaggtggcaaacaaattggttccgccgaggtggacctgttttgcaagaacgctcggttcgtcaagctagtcaacgcaaagccaagagacatagatctctgtcagatatacgagattgaaaagacgaatgacgacgcagcgacggagatgagaatagcaaccgagggagcctttggtctgcccatgtcaaatcttccgatttacttggcgctaaaggctaccgctcacaactcaagagcctctgccgatgagatcatgaacaccatagtcagtgaaattcccccagccgccggagatgagaggattaagcaaacggcccaagaagtcgcaagagccgcaggaggcgagctgcataacatttctgcgctcacaggcggtatggtagctcaagagatgataaaaatcatcacaaagcagtatatccctattgacgacacttgcatattcgacggcataagcagccgatgccaggtacttcgtttatagaagagcatctgcatatcaagtgatggaggcttcccataggccgaaatttcggaactcgccctggagatccggacttgactatggggaaagtggttagagttacgggaccctggcttggcaagtaattgaatgtgacctcctcgcaccctttcttcaggaacttgagggttagtggctgttatcggaccgcaaggccttgcagtaacatcattctctgcacttgcccgctttttcgagcctcaagcgccgacgggttccagctttcagacagtgagtatttcttgagaagacaccatccagtcggttgaatggaactgcgtcaccttgcgatctgggatgcattgtctgagtctgaccatcgccatcattaattgaagatagaaaaatgtagatagcatagaccagctttcgctatagcaagcggctcttgtccagacaagaggactggagaaaatcaatagacaagaaaaatatgggttgtgggcctaaattccactaagggtcctttctgcgaagtattgctcctgattttgttggaataggattgggcactcaactgtcccgtctcagaaagcggcactccagttggctgacgatgaaacgatgcaatatccatgatcctgcaggcatggtgcccaagtactgccaccctttac

SEQ ID NO: 33924 - DNA, 1614 bp, Muscodor strobelii
  misc_feature: SGI cDNA ID NO. 571712
  misc_feature: Encodes the peptide sequence at SEQ ID NO 33925
atgactgagattgtggcgacacaaacgccgccgcttctccacggcccaacagagaaggagaagaaatatgacagacagctaaggctctgggccgcgagtggtcaagcagctctggagtctgcaaatattcttgtcgtcaattccggtgctggcactgtaggcgtggaaacactcaagaatctagttctcccaggtattggcaagtttaccattgctgacgacgccattgtaagcgaggctgatcttggtgtcaatttcttcctcgataagagctgtctaggcaagttacggtcagaatgttgcacaaaacttctgctggagttgaacccagaggtccagggagactggtatcccaagaatgatgttcgtcaccttcatgcgatattaaatgattcagaccactttaccttgatcgtgtatacgaatcccatccgagaagaggatctcgccaccatcaaggcctacgccagcgagaggcagacgccgatcatatccatccactccgcggggctctactcttacttcagaatggagctaccaggaactttcccaatcgtagacactcatcctgaggtcgagaagacaacagaccttaggctcctgcaaccttggccggagctttctgcgctagcgaatgagatgaccaaggatttggatgctcttgacgatcatgagcatgggcatctaccttacgttgtgatcctactccgcttcctcgaaatgtggaggcaatcacacgatgggcgcaatcccaccaccttcaaggagaagacagagttcggcaaatttgttctggccggctcaagaaccaataatcctgagggtggcgaagagaatttccaggaggccgttgtcgccattaacaagaacatcaagctacccgagttagaaagtgggttggaggaggtactcaatcatcaactgcttagcgagaccgaacgccactcgtcattctggctcattgcaagcgcgatcagcattttctaccaaaagcacgcttgtctcccattgcctggatctttacccgatatgaaggcgcaatcaagtgtctacgtcaagctgcagagtttatacaaagagaaggctcgaagggatgcccaagaggtactggaaatagtcaggaaaagcccaggtggcaaacaaattggttccgccgaggtggacctgttttgcaagaacgctcggttcgtcaagctagtcaacgcaaagccaagagacatagatctctgtcagatatacgagattgaaaagacgaatgacgacgcagcgacggagatgagaatagcaaccgagggagcctttggtctgcccatgtcaaatcttccgatttacttggcgctaaaggctaccgctcacaactcaagagcctctgccgatgagatcatgaacaccatagtcagtgaaattcccccagccgccggagatgagaggattaagcaaacggcccaagaagtcgcaagagccgcaggaggcgagctgcataacatttctgcgctcacaggcggtatggtagctcaagagatgataaaaatcatcacaaagcagtatatccctattgacgacacttgcatattcgacggcataagcagccgatgccaggtacttcgtttatag

SEQ ID NO: 33925 - protein, 537 aa, Muscodor strobelii
  misc_feature: SGI Peptide ID NO. 571712
  misc_feature (39)..(179): Pfam Id: PF00899 Pfam Desc: ThiF family
  misc_feature (39)..(113): Pfam Id: PF00899 Pfam Desc: ThiF family
  misc_feature (1)..(537): NCBI GI: 171690752 Blast Desc: protein product [Podospora anserina] gi|170945324|emb|CAP71436.1| protein product [Podospora anserina]
  misc_feature (5)..(537): NCBI GI: 46116852 Blast Desc: FG04268.1 [Gibberella zeae PH-1]
  misc_feature (5)..(537): NCBI GI: 256725958 Blast Desc: [Nectria haematococca mpVI 77-13-4]
  misc_feature (7)..(537): NCBI GI: 145613167 Blast Desc: MGG_01832 [Magnaporthe grisea 70-15] gi|145020305|gb|EDK04434.1| MGG_01832 [Magnaporthe grisea 70-15]
  misc_feature (1)..(537): NCBI GI: 85109023 Blast Desc: NCU08040 [Neurospora crassa OR74A] gi|28924321|gb|EAA33474.1| conserved [Neurospora crassa OR74A] gi|39979167|emb|CAE85540.1| related to auxin-resistance protein
  misc_feature (1)..(537): NCBI GI: 156049401 Blast Desc: SS1G_08407 [Sclerotinia sclerotiorum 1980] gi|154692806|gb|EDN92544.1| SS1G_08407 [Sclerotinia sclerotiorum 1980]
  misc_feature (8)..(537): NCBI GI: 154317485 Blast Desc: BC1G_03094 [Botryotinia fuckeliana B05.10] gi|150844268|gb|EDN19461.1| BC1G_03094 [Botryotinia fuckeliana B05.10]
  misc_feature (1)..(537): NCBI GI: 261352245 Blast Desc: NEDD8-activating enzyme E1 regulatory subunit [Verticillium albo-atrum VaMs.102]
  misc_feature (5)..(537): NCBI GI: 145243002 Blast Desc: An11g00460 [Aspergillus niger] gi|134078717|emb|CAK48279.1| protein product [Aspergillus niger]
  misc_feature (10)..(537): NCBI GI: 70992199 Blast Desc: ubiquitin-like activating enzyme (UlaA) [Aspergillus fumigatus Af293] gi|66848581|gb|EAL88910.1| ubiquitin-like activating enzyme (UlaA), [Aspergillus fumigatus Af293] enzyme
MTEIVATQTPPLLHGPTEKEKKYDRQLRLWAASGQAALESANILVVNSGAGTVGVETLKNLVLPGIGKFTIADDAIVSEADLGVNFFLDKSCLGKLRSECCTKLLLELNPEVQGDWYPKNDVRHLHAILNDSDHFTLIVYTNPIREEDLATIKAYASERQTPIISIHSAGLYSYFRMELPGTFPIVDTHPEVEKTTDLRLLQPWPELSALANEMTKDLDALDDHEHGHLPYVVILLRFLEMWRQSHDGRNPTTFKEKTEFGKFVLAGSRTNNPEGGEENFQEAVVAINKNIKLPELESGLEEVLNHQLLSETERHSSFWLIASAISIFYQKHACLPLPGSLPDMKAQSSVYVKLQSLYKEKARRDAQEVLEIVRKSPGGKQIGSAEVDLFCKNARFVKLVNAKPRDIDLCQIYEIEKTNDDAATEMRIATEGAFGLPMSNLPIYLALKATAHNSRASADEIMNTIVSEIPPAAGDERIKQTAQEVARAAGGELHNISALTGGMVAQEMIKIITKQYIPIDDTCIFDGISSRCQVLRL

SEQ ID NO: 33926 - DNA, 2416 bp, Muscodor strobelii; identical to SEQ ID NO: 33923
  misc_feature: SGI EST ID NO. CUFF.80324.0
  misc_feature: Variant of the nucleotide sequence at SEQ ID NO 33924

SEQ ID NO: 33927 - DNA, 1665 bp, Muscodor strobelii
  misc_feature: SGI cDNA ID NO. 571713
  misc_feature: Encodes the peptide sequence at SEQ ID NO 33928
atggacatctcatttgatcaggatgagaccaacctcgacgacattgaggacatctcaagtgataaagagggtagcgattccgacgaatatgaagagtttgactggtttgaagcaatcaacggccgcattcgctcggagcagggtacggagggtacagaatatgacgctgccgggttctgtacaagcgctctcatacgacgcgatgatatacgaaacgtattctaccatgaaattgaacagccatccgaggagagctctgcaatgggctttgaactcttcgatcgatacgggcgactgaagcctgccctcaaaaagaacgcaatcaaatcaggatccggaatttggggtgatgagttagatgtcggcgacatccacctgattgaccaagttcatgtcgacaaacagcacaggcgaaagggactcggcactaagcttgtgaaggctgttctagaaaggggctatgctaagtctaaccctagcacatatatcgccatcgcacgtaccgctacactgagctctgaaatggaacgcgagtgcgaaggaaaaacgaaggaggaggagctagaaatttccgacagacaacagcatatatcgaagtgcttcctgcgttctctcggcttccgacgtattgggtcgactcagtggttcgctcgtgcgggagacaagcatcaccgatgccattctttgcccgctgaccaggacttcgacccgccttcaccgccaccgtctgctccaaatggcatttgggatacaatgcttaaaattctagagccgcttaaggaagatgaggctcgactcaacgcaatgcagtgggttctcgaaacctataaaccagaagacagcgcctgggcatcaaccgatagcgcgggaaataccctgcttcaccatgttgcagaactagggagcccccaatgcgtcaaatggactctatcgaggtgcccaagcctggcatatgctcgaaattcccatggggacactccactggagtttttcgaagaaaagcttgaagtcatccgtactcaacaagcatggatgatggcgatcagcccagcatcagatcagttctctggatactcagaagcccttgtggagactctagtagttctgaaagggttgaataatccagatccacaagatttgctccgtctcaaatacggctgtacctgcggacaatgtcagtctggcttctttagcccgcgaatgcgttttgtgctgctcgcctgtgctgaaattgaacacgattcgatcttcgaggatgatttcgcatcgtacgggaacgacttcgtggatgacaatgataacttggtcgaatacctccctagacatgttcgtgacaatttacgcacgaacaaatcgatctttggctgttttgctcaatgtcttaggaatcacgaaatacccctcccagaaacgatcctcagaatcgcgcagtcagcatccgaatggcctccagcgaccagaaacaaccccagccgtcgtgatatcgtctgcgacgtcggatcaatcctcttttacagtgcaatgcagcaatcgcgatgcgctggcgatggaagtacggaggaagtctttgatgaagacatcaatgagttgccggcttgtcgcaatgatgacgagtttggctttgccagtggcatatgtgggtacaaacgcgtctgtccggtctga

SEQ ID NO: 33928 - protein, 554 aa, Muscodor strobelii
  misc_feature: SGI Peptide ID NO. 571713
  misc_feature (127)..(153): Pfam Id: PF00583 Pfam Desc: Acetyltransferase (GNAT) family
  misc_feature (87)..(554): NCBI GI: 159123451 Blast Desc: AFUB_080050 [Aspergillus fumigatus A1163]
  misc_feature (65)..(548): NCBI GI: 145256092 Blast Desc: An10g00280 [Aspergillus niger CBS 513.88] gi|134078590|emb|CAK49118.1| protein product [Aspergillus niger]
  misc_feature (70)..(548): NCBI GI: 159122795 Blast Desc: conserved [Aspergillus fumigatus A1163] gi|159122831|gb|EDP47952.1| conserved [Aspergillus fumigatus A1163]
  misc_feature (70)..(548): NCBI GI: 70986542 Blast Desc: conserved [Aspergillus fumigatus Af293] gi|66846392|gb|EAL86724.1| conserved [Aspergillus fumigatus Af293]
  misc_feature (65)..(492): NCBI GI: 115386428 Blast Desc: conserved [Aspergillus terreus NIH2624] gi|114190753|gb|EAU32453.1| conserved [Aspergillus terreus NIH2624]
  misc_feature (28)..(373): NCBI GI: 256728945 Blast Desc: [Nectria haematococca mpVI 77-13-4]
  misc_feature (250)..(547): NCBI GI: 156064707 Blast Desc: SS1G_00361 [Sclerotinia sclerotiorum 1980] gi|154691223|gb|EDN90961.1| SS1G_00361 [Sclerotinia sclerotiorum 1980]
  misc_feature (58)..(332): NCBI GI: 154322857 Blast Desc: BC1G_00771 [Botryotinia fuckeliana B05.10] gi|150848105|gb|EDN23298.1| BC1G_00771 [Botryotinia fuckeliana B05.10]
  misc_feature (42)..(547): NCBI GI: 170107699 Blast Desc: ankyrin repeat family protein [Laccaria bicolor S238N-H82] gi|164639900|gb|EDR04168.1| ankyrin repeat family protein [Laccaria bicolor S238N-H82]
  misc_feature (111)..(413): NCBI GI: 171682668 Blast Desc: protein product [Podospora anserina] gi|170941293|emb|CAP66943.1| protein product [Podospora anserina]
MDISFDQDETNLDDIEDISSDKEGSDSDEYEEFDWFEAINGRIRSEQGTEGTEYDAAGFCTSALIRRDDIRNVFYHEIEQPSEESSAMGFELFDRYGRLKPALKKNAIKSGSGIWGDELDVGDIHLIDQVHVDKQHRRKGLGTKLVKAVLERGYAKSNPSTYIAIARTATLSSEMERECEGKTKEEELEISDRQQHISKCFLRSLGFRRIGSTQWFARAGDKHHRCHSLPADQDFDPPSPPPSAPNGIWDTMLKILEPLKEDEARLNAMQWVLETYKPEDSAWASTDSAGNTLLHHVAELGSPQCVKWTLSRCPSLAYARNSHGDTPLEFFEEKLEVIRTQQAWMMAISPASDQFSGYSEALVETLVVLKGLNNPDPQDLLRLKYGCTCGQCQSGFFSPRMRFVLLACAEIEHDSIFEDDFASYGNDFVDDNDNLVEYLPRHVRDNLRTNKSIFGCFAQCLRNHEIPLPETILRIAQSASEWPPATRNNPSRRDIVCDVGSILFYSAMQQSRCAGDGSTEEVFDEDINELPACRNDDEFGFASGICGYKRVCPV

SEQ ID NO: 33929 - DNA, 1938 bp, Muscodor strobelii
  misc_feature: SGI EST ID NO. CUFF.80330.0
  misc_feature: Variant of the nucleotide sequence at SEQ ID NO 33927
ggacatctcaagtgataaagagggtagcgattccgacgaatatgaagagtttgactggtttgaagcaatcaacggccgcattcgctcggagcagggtacggagggtacagaatatgacgctgccgggttctgtacaagcgctctcatacgacgcgatgatatacgaaacgtattctaccatgaaattgaacagccatccgaggagagctctgcaatgggctttgaactcttcgatcgatacgggcgactgaagcctgccctcaaaaagaacgcaatcaaatcaggatccggaatttggggtgatgagttagatgtcggcgacatccacctgattgaccaagttcatgtcgacaaacagcacaggcgaaagggactcggcactaagcttgtgaaggctgttctagaaaggggctatgctaagtctaaccctagcacatatatcgccatcgcacgtaccgctacactgagctctgaaatggaacgcgagtgcgaaggaaaaacgaaggaggaggagctagaaatttccgacagacaacagcatatatcgaagtgcttcctgcgttctctcggcttccgacgtattgggtcgactcagtggttcgctcgtgcgggagacaagcatcaccgatgccattctttgcccgctgaccaggacttcgacccgccttcaccgccaccgtctgctccaaatggcatttgggatacaatgcttaaaattctagagccgcttaaggaagatgaggctcgactcaacgcaatgcagtgggttctcgaaacctataaaccagaagacagcgcctgggcatcaaccgatagcgcgggaaataccctgcttcaccatgttgcagaactagggagcccccaatgcgtcaaatggactctatcgaggtgcccaagcctggcatatgctcgaaattcccatggggacactccactggagtttttcgaagaaaagcttgaagtcatccgtactcaacaagcatggatgatggcgatcagcccagcatcagatcagttctctggatactcagaagcccttgtggagactctagtagttctgaaagggttgaataatccagatccacaagatttgctccgtctcaaatacggctgtacctgcggacaatgtcagtctggcttctttagcccgcgaatgcgttttgtgctgctcgcctgtgctgaaattgaacacgattcgatcttcgaggatgatttcgcatcgtacgggaacgacttcgtggatgacaatgataacttggtcgaatacctccctagacatgttcgtgacaatttacgcacgaacaaatcgatctttggctgttttgctcaatgtcttaggaatcacgaaatacccctcccagaaacgatcctcagaatcgcgcagtcagcatccgaatggcctccagcgaccagaaacaaccccagccgtcgtgatatcgtctgcgacgtcggatcaatcctcttttacagtgcaatgcagcaatcgcgatgcgctggcgatggaagtacggaggaagtctttgatgaagacatcaatgagttgccggcttgtcgcaatgatgacgagtttggctttgccagtggcatatgtgggtacaaacgcgtctgtccggtctgatacgtgtccgccctgactggagaatcaattgatgactgattgtgaactggtggaggataagtcgatggcataagtcatgggctgggctcgcagcggaagcactgaaaggtggacgagaaaaatactgtggctatgtgtttgtcgaaactgtcgctgtactgtgcgctactcacaagtaccgcaattactccttcgtagtctatctcatcataggcatggctgtgtcctaaattaactgttgcccttttttgaggccgttatttctattcctcatactgtttgacacttcggctgccaggtgttcagacgctgaatctcgg

SEQ ID NO: 33930 - DNA, 1713 bp, Muscodor strobelii
  misc_feature: SGI cDNA ID NO. 571714
  misc_feature: Encodes the peptide sequence at SEQ ID NO 33931
atgagcgaggaaaatattgtcgagaaaggcaataatagttcgatccacgacacgagcaacgacgtaaatattcccgctgtacgagaacgtttgaacgaagattctcaaaatctagacgaacagcaccctttgccaacatggcgcttggttctccttggtctcggtgtgtcgatagggctattcctcagtttcctagacacatcgatagtagcaacaagtctcgtcgccataggtactgaatttaggaacgtggaggaggtaaactgggtggcgctagcatatactttatcgtatttggcattcacaaccgtgatcgctcgaatatcggacgtcgtcgggcgcagaaatgcatttttggggtcgtatacgatcttcatagccatttctattggctgtggtttcgcgcagaatttgagccagcttattgcgctgcgagctatccagggttttggtgcctcaggtctttattccctttcgatgatcatactccctgaggtcttacccccaagctggcgaaatgtcctaggaagtgtgatagggattatcattacccttgccagcgttcttggacctgtgttagggggtgtttttacacgttatacgagctggcgctggatattttggatcaatgggcctatcggagctgtctcagtcatatttttcgctctggcttggccaaagccgcaatacctgccgcgtgccgaacggcggtcgtggagagaactcgactacttcggttcagtattggtcattgcagcggccatactagtcgtttatccatttcaaagtgccagcagcggtaccgatcagtggtccaaagtgatattctttgtcccccttattttcgggctgcttgcctggattgcgacctttgcatggtccctattcatagagaagcgatggggtgatggcatcgccgcagcggtccccatgcgacttctccgcgatcgtgtctatgcatcggcagtcgtgaacacgatgcttctcgggtttccctacatctcgcttatttatgtttttgcacagaggctgcaagtcgtaaatggtaaagacgctctcatcgctggaataatgcttctaccggctctagcggccagcgccataggctctgctatctcaggtaagatcaacggacagaaagatcgagcgtttgagacactagtggtggccgctagttctatgttgctgggttgcgggttgttgtcgacggtatccgattccaaagctgttgagcccaaagccctcggatttttagttttcgttgggtttgggtttggtctctcagtatcaacatctacgatgatcgcttcattccgttcatccgccaaggatcacgcaacggctcagggcatagtagcgcaggttcgcgttttgggcggcagtctcggcattgccgcctcctcggcgaccctaggggtgacattacaatcacaaatcggagcttcagtgaatgcggacgagatatctgcgctcgtggctggcggtgggattgatgtggacccaaatttgctgaacgccatcagaaaggcttactccgatgctttccgcgaggacatgaaagtttgtgctatagtttccggggttgccattctctcagcgattggaacctatactcgcaatcgggccaattgggtgaaaaagcgagatgggcaaacagtgaccggtgatgagcatagaagcaagtcaacaagctcccgacgtggggatagttag

SEQ ID NO: 33931 - protein, 570 aa, Muscodor strobelii
  misc_feature: SGI Peptide ID NO. 571714
  misc_feature (56)..(464): Pfam Id: PF07690 Pfam Desc: Major Facilitator Superfamily
  misc_feature (56)..(263): Pfam Id: PF07690 Pfam Desc: Major Facilitator Superfamily
  misc_feature (264)..(464): Pfam Id: PF07690 Pfam Desc: Major Facilitator Superfamily
  misc_feature (56)..(561): NCBI GI: 154315844 Blast Desc: BC1G_04494 [Botryotinia fuckeliana B05.10] gi|150846890|gb|EDN22083.1| BC1G_04494 [Botryotinia fuckeliana B05.10]
  misc_feature (2)..(566): NCBI GI: 212531315 Blast Desc: conserved [Penicillium marneffei ATCC 18224] gi|210071178|gb|EEA25267.1| conserved [Penicillium marneffei ATCC 18224]
  misc_feature (51)..(539): NCBI GI: 171690760 Blast Desc: protein product [Podospora anserina] gi|170945328|emb|CAP71440.1| protein product [Podospora anserina]
  misc_feature (32)..(565): NCBI GI: 212536432 Blast Desc: conserved [Penicillium marneffei ATCC 18224] gi|210070771|gb|EEA24861.1| conserved [Penicillium marneffei ATCC 18224]
  misc_feature (25)..(548): NCBI GI: 116207616 Blast Desc: CHGG_03101 [Chaetomium globosum CBS 148.51] gi|88183698|gb|EAQ91166.1| CHGG_03101 [Chaetomium globosum CBS 148.51]
  misc_feature (56)..(548): NCBI GI: 145236922 Blast Desc: An07g00150 [Aspergillus niger] gi|134075573|emb|CAK39239.1| protein product [Aspergillus niger]
  misc_feature (34)..(565): NCBI GI: 242816096 Blast Desc: MFS multidrug transporter, [Talaromyces stipitatus ATCC 10500] gi|218715041|gb|EED14464.1| MFS multidrug transporter, [Talaromyces stipitatus ATCC 10500]
  misc_feature (65)..(540): NCBI GI: 256733504 Blast Desc: [Nectria haematococca mpVI 77-13-4]
  misc_feature (65)..(563): NCBI GI: 46128985 Blast Desc: FG08794.1 [Gibberella zeae PH-1]
  misc_feature (20)..(539): NCBI GI: 212545512 Blast Desc: MFS multidrug transporter, [Penicillium marneffei ATCC 18224] gi|210065879|gb|EEA19973.1| MFS multidrug transporter, [Penicillium marneffei ATCC 18224]
MSEENIVEKGNNSSIHDTSNDVNIPAVRERLNEDSQNLDEQHPLPTWRLVLLGLGVSIGLFLSFLDTSIVATSLVAIGTEFRNVEEVNWVALAYTLSYLAFTTVIARISDVVGRRNAFLGSYTIFIAISIGCGFAQNLSQLIALRAIQGFGASGLYSLSMIILPEVLPPSWRNVLGSVIGIIITLASVLGPVLGGVFTRYTSWRWIFWINGPIGAVSVIFFALAWPKPQYLPRAERRSWRELDYFGSVLVIAAAILVVYPFQSASSGTDQWSKVIFFVPLIFGLLAWIATFAWSLFIEKRWGDGIAAAVPMRLLRDRVYASAVVNTMLLGFPYISLIYVFAQRLQVVNGKDALIAGIMLLPALAASAIGSAISGKINGQKDRAFETLVVAASSMLLGCGLLSTVSDSKAVEPKALGFLVFVGFGFGLSVSTSTMIASFRSSAKDHATAQGIVAQVRVLGGSLGIAASSATLGVTLQSQIGASVNADEISALVAGGGIDVDPNLLNAIRKAYSDAFREDMKVCAIVSGVAILSAIGTYTRNRANWVKKRDGQTVTGDEHRSKSTSSRRGDS

SEQ ID NO: 33932 - DNA, 2194 bp, Muscodor strobelii
  misc_feature: SGI EST ID NO. CUFF.80347.0
  misc_feature: Variant of the nucleotide sequence at SEQ ID NO 33930
ccagggggtcgggaagtggatagtctgacgccaaagaagcgagtgcgagaaatatggagccagccacatggcttcgttgttggtttggggacggtgatccatgcagggaatgacattcgtccgttggtagtgacaactgatatgtgataccactgtgcctttcgtaaaatgcagaatcacaaaatccctcgtcagcccgggagatgaatcccttcggattcgcattgtctactgtggtactcacctccaacaacatgcatcgtgaccagccactcatgtatatacctgtgctacatttcgttcgcgagaagcagacatgatttgtacaacctcgttagaattcttgtggtcatcttggaaatcaaattgtaggaagacaatcgcgatcttgacatccataattttggaaacatgagcgaggaaaatattgtcgagaaaggcaataatagttcgatccacgacacgagcaacgacgtaaatattcccgctgtacgagaacgtttgaacgaagattctcaaaatctagacgaacagcaccctttgccaacatggcgcttggttctccttggtctcggtgtgtcgatagggctattcctcagtttcctagacacatcgatagtagcaacaagtctcgtcgccataggtactgaatttaggaacgtggaggaggtaaactgggtggcgctagcatatactttatcgtatttggcattcacaaccgtgatcgctcgaatatcggacgtcgtcgggcgcagaaatgcatttttggggtcgtatacgatcttcatagccatttctattggctgtggtttcgcgcagaatttgagccagcttattgcgctgcgagctatccagggttttggtgcctcaggtctttattccctttcgatgatcatactccctgaggtcttacccccaagctggcgaaatgtcctaggaagtgtgatagggattatcattacccttgccagcgttcttggacctgtgttagggggtgtttttacacgttatacgagctggcgctggatattttggatcaatgggcctatcggagctgtctcagtcatatttttcgctctggcttggccaaagccgcaatacctgccgcgtgccgaacggcggtcgtggagagaactcgactacttcggttcagtattggtcattgcagcggccatactagtcgtttatccatttcaaagtgccagcagcggtaccgatcagtggtccaaagtgatattctttgtcccccttattttcgggctgcttgcctggattgcgacctttgcatggtccctattcatagagaagcgatggggtgatggcatcgccgcagcggtccccatgcgacttctccgcgatcgtgtctatgcatcggcagtcgtgaacacgatgcttctcgggtttccctacatctcgcttatttatgtttttgcacagaggctgcaagtcgtaaatggtaaagacgctctcatcgctggaataatgcttctaccggctctagcggccagcgccataggctctgctatctcaggtaagatcaacggacagaaagatcgagcgtttgagacactagtggtggccgctagttctatgttgctgggttgcgggttgttgtcgacggtatccgattccaaagctgttgagcccaaagccctcggatttttagttttcgttgggtttgggtttggtctctcagtatcaacatctacgatgatcgcttcattccgttcatccgccaaggatcacgcaacggctcagggcatagtagcgcaggttcgcgttttgggcggcagtctcggcattgccgcctcctcggcgaccctaggggtgacattacaatcacaaatcggagcttcagtgaatgcggacgagatatctgcgctcgtggctggcggtgggattgatgtggacccaaatttgctgaacgccatcagaaaggcttactccgatgctttccgcgaggacatgaaagtttgtgctatagtttccggggttgccattctctcagcgattggaacctatactcgcaatcgggccaattgggtgaaaaagcgagatgggcaaacagtgaccggtgatgagcatagaagcaagtcaacaagctcccgacgtggggatagttagatgttgtaacaaagagcacactgaaccttaggtgaatataatgattctatcaattgcaggttacctactt

SEQ ID NO: 33933 - DNA, 1536 bp, Muscodor strobelii
  misc_feature: SGI cDNA ID NO. 571715
  misc_feature: Reduced expression when VOC is produced
  misc_feature: Encodes the peptide sequence at SEQ ID NO 33934
atgctgccctcgtatgcctcggacaactccaagatgatgtcgcggcatcatcctggagtgtctaacggctatcctcgaccaaacagcaacactttcgacatatctcctcacagctttaaacctcgttcatcgaatccctccttgcggagacgaagaaacctcatgaccaagctcgccatctctgccggtgtcatatttctcttcggcctcttcgtctggccaggcagcttttccctggcatcccttttctccgcgggcttgataagcacggcgggcgacgtcctcatggacaccgtccgctactacgatctctccaatgtccaggggacagctcgcggctgggagcgcgaagagcgcatcctcatctgcgtccccttgcgagacgccgagccgcatatccccatgatgttttctcatcttcgaaacctcacctatccacaccacttgatggacctcgcctttctggtctctgactcgaaggatagaacactggaactgctcgtcgagatgttggaagatctacaagcccacgaggatccgaagcagccctacggtgaaatctccatcatcgagaaggattttggccagaaggtcaaccaagatgtcgagagccgccacggttttgcggctcaggctagtcgccggaagctcatggcccaggcgcgcaattggctgctgagcgccacccttcgcccgtatcactcatgggtgtattggagagacgtggatgttgagacggcaccattcaccatcgtcgaagatctaatgcgccataacaaggatgtcattgttcccaatgtttggcgaccgcttcccgattggctgggcggtgagcaaccctacgatctgaattcgtggcaggaatccgatactgctctggcgcttgccgacacactagacgaggacgctgtcatcgtagaaggatacgccgagtatgctacttggcgtcctcaccttgcgtatctccgtgatccatacggtgaccccgacatggagatggagattgacggtgtgggaggagtgagcatcctcgccaaggcgcgagttttccggtccggtgtacatttcccggctttcagctttgagaaacacgcggagacggaaggatttggcaagatggccaaacggatggatttctccgttgttggactgcctcactatacgatatggcatctatacgaacccagtgttgatgatattcaccacatggaggaaatggaacaggagcggcttgccagagaagctgaggagaaagaaaaagaagacagaaaaaagaagttggaagacaactttgacgacccgaacagccagtgggagaaggacaagtcggcactgcaggacaagctggacaaacaggggtcatccaaggggaaatcggcgccaaaaaagagcagcaagaaagaggatgacgaggcggaagaggagccggcgtcgaatgcgaagaaagacgccaagaaggcaaagcccgtggacagcgacaaggtggcagactcgcagaagaagaagaagagcaaaccaggcaaggccgagagctaa

SEQ ID NO: 33934 - protein, 511 aa, Muscodor strobelii
  misc_feature: SGI Peptide ID NO. 571715
  misc_feature (59)..(394): Pfam Id: PF03452 Pfam Desc: Anp1
  misc_feature (98)..(394): Pfam Id: PF03452 Pfam Desc: Anp1
  misc_feature (12)..(447): NCBI GI: 46116872 Blast Desc: FG04278.1 [Gibberella zeae PH-1]
  misc_feature (1)..(488): NCBI GI: 156049547 Blast Desc: SS1G_08480 [Sclerotinia sclerotiorum 1980] gi|154692879|gb|EDN92617.1| SS1G_08480 [Sclerotinia sclerotiorum 1980]
  misc_feature (12)..(500): NCBI GI: 256725951 Blast Desc: NECHADRAFT_106189 [Nectria haematococca mpVI 77-13-4]
  misc_feature (75)..(501): NCBI GI: 145612367 Blast Desc: MGG_12335 [Magnaporthe grisea 70-15] gi|145019549|gb|EDK03777.1| MGG_12335 [Magnaporthe grisea 70-15]
  misc_feature (13)..(511): NCBI GI: 238488557 Blast Desc: mannan polymerase II complex ANP1 subunit Anp1, [Aspergillus flavus NRRL3357] gi|220697904|gb|EED54244.1| mannan polymerase II complex ANP1 subunit Anp1, [Aspergillus flavus
  misc_feature (22)..(446): NCBI GI: 225680110 Blast Desc: mannan polymerase II complex ANP1 subunit [Paracoccidioides brasiliensis Pb03] gi|226291904|gb|EEH47332.1| vanadate resistance protein [Paracoccidioides brasiliensis Pb18]
  misc_feature (13)..(483): NCBI GI: 240106318 Blast Desc: Mannan polymerase II complex ANP1 subunit, [Coccidioides posadasii C735 delta SOWgp]
  misc_feature (13)..(484): NCBI GI: 258573371 Blast Desc: mannan polymerase II complex ANP1 subunit [Uncinocarpus reesii 1704] gi|237901133|gb|EEP75534.1| mannan polymerase II complex ANP1 subunit [Uncinocarpus reesii 1704]
  misc_feature (13)..(483): NCBI GI: 119191864 Blast Desc: CIMG_00309 [Coccidioides immitis RS]
  misc_feature (1)..(459): NCBI GI: 171690732 Blast Desc: protein product [Podospora anserina] gi|170945314|emb|CAP71426.1| protein product [Podospora anserina]
  misc_feature: Useful for introducing or modulating the production of volatile compounds
MLPSYASDNSKMMSRHHPGVSNGYPRPNSNTFDISPHSFKPRSSNPSLRRRRNLMTKLAISAGVIFLFGLFVWPGSFSLASLFSAGLISTAGDVLMDTVRYYDLSNVQGTARGWEREERILICVPLRDAEPHIPMMFSHLRNLTYPHHLMDLAFLVSDSKDRTLELLVEMLEDLQAHEDPKQPYGEISIIEKDFGQKVNQDVESRHGFAAQASRRKLMAQARNWLLSATLRPYHSWVYWRDVDVETAPFTIVEDLMRHNKDVIVPNVWRPLPDWLGGEQPYDLNSWQESDTALALADTLDEDAVIVEGYAEYATWRPHLAYLRDPYGDPDMEMEIDGVGGVSILAKARVFRSGVHFPAFSFEKHAETEGFGKMAKRMDFSVVGLPHYTIWHLYEPSVDDIHHMEEMEQERLAREAEEKEKEDRKKKLEDNFDDPNSQWEKDKSALQDKLDKQGSSKGKSAPKKSSKKEDDEAEEEPASNAKKDAKKAKPVDSDKVADSQKKKKSKPGKAES

SEQ ID NO: 33935 - DNA, 2574 bp, Muscodor strobelii
  misc_feature: SGI EST ID NO. CUFF.80356.0
  misc_feature: Variant of the nucleotide sequence at SEQ ID NO 33933
tgtcaaagaagggtcctctccccattccaatgagagcgggagatgttgaatctgaaacgtgggctaacctcgtactaggggatttcctggctgtttgacaatggcttgcagcagcagcagcgccgagcagagtcgtcatttagcggggcgcaggggatctcgtagcgggcgaagagtgggttccattagacttgaggtctgccaagaggccctaaccggaaattcccatagcggacaacgggcgacgccaagtcttctgtgttcaattggcagatgcgaatcgtacctgtaattatcctgatcttcatgaacacgacacatcttcattgcctctctctatccctatctctatctctgtgcgacggtgctctcgccctcccgtctgcgcccgggcgctattcgacttcttatttcgacgtccatggtctcatccgaacgattctctacgtgccgctgtcccctttcgatccctctcccggtctcgatcccatgacgaactgctaaatcgcaaaggggcaccctgctcacccgagcgtgacgctcccattctccgtcacctcaatccgcaacccagctacctcatcctcgacccatccctcaaggcgctcagctctcccgctgagatgctgccctcgtatgcctcggacaactccaagatgatgtcgcggcatcatcctggagtgtctaacggctatcctcgaccaaacagcaacactttcgacatatctcctcacagctttaaacctcgttcatcgaatccctccttgcggagacgaagaaacctcatgaccaagctcgccatctctgccggtgtcatatttctcttcggcctcttcgtctggccaggcagcttttccctggcatcccttttctccgcgggcttgataagcacggcgggcgacgtcctcatggacaccgtccgctactacgatctctccaatgtccaggggacagctcgcggctgggagcgcgaagagcgcatcctcatctgcgtccccttgcgagacgccgagccgcatatccccatgatgttttctcatcttcgaaacctcacctatccacaccacttgatggacctcgcctttctggtctctgactcgaaggatagaacactggaactgctcgtcgagatgttggaagatctacaagcccacgaggatccgaagcagccctacggtgaaatctccatcatcgagaaggattttggccagaaggtcaaccaagatgtcgagagccgccacggttttgcggctcaggctagtcgccggaagctcatggcccaggcgcgcaattggctgctgagcgccacccttcgcccgtatcactcatgggtgtattggagagacgtggatgttgagacggcaccattcaccatcgtcgaagatctaatgcgccataacaaggatgtcattgttcccaatgtttggcgaccgcttcccgattggctgggcggtgagcaaccctacgatctgaattcgtggcaggaatccgatactgctctggcgcttgccgacacactagacgaggacgctgtcatcgtagaaggatacgccgagtatgctacttggcgtcctcaccttgcgtatctccgtgatccatacggtgaccccgacatggagatggagattgacggtgtgggaggagtgagcatcctcgccaaggcgcgagttttccggtccggtgtacatttcccggctttcagctttgagaaacacgcggagacggaaggatttggcaagatggccaaacggatggatttctccgttgttggactgcctcactatacgatatggcatctatacgaacccagtgttgatgatattcaccacatggaggaaatggaacaggagcggcttgccagagaagctgaggagaaagaaaaagaagacagaaaaaagaagttggaagacaactttgacgacccgaacagccagtgggagaaggacaagtcggcactgcaggacaagctggacaaacaggggtcatccaaggggaaatcggcgccaaaaaagagcagcaagaaagaggatgacgaggcggaagaggagccggcgtcgaatgcgaagaaagacgccaagaaggcaaagcccgtggacagcgacaaggtggcagactcgcagaagaagaagaagagcaaaccaggcaaggccgagagctaaggcggcaggacgacagcaggcgatagactcgaaaccatggtcgacatgactcgaaatcctcatcattttactttgacatgacgggtggcatggggagcgaaagagaaaaacggcgacagatggtctgtatactaaaagggccagggtcatgacagtggcgttcggtgcagtttgcttattttgtactagacagggttaacgaagcattcaacggacagccaggtcagtattcaataggcagtgtgcagtactgatatagtggacacgctgccattgtcataaatattgattgtatacctatttcccactacgatttgaagtagcggacagaaaccatacttgggtgatatgaggttagtcagtatctgaccatatcgttatacaaatgccagatgtccttcgaatggtactgcca

SEQ ID NO: 33936 - DNA, 4794 bp, Muscodor strobelii
  misc_feature: SGI cDNA ID NO. 571716
  misc_feature: Reduced expression when VOC is produced
  misc_feature: Encodes the peptide sequence at SEQ ID NO 33937
atggattcaaccgtcgcccatgctcgacagagcaccgagctccagcatcgtactacgctcccgctcccgctcccgctcgtgaacgccctccgctcttcgcccgacacccagtaccgcagccggcccgtgtctgtcgccgtcgatcccgtctcgctcgtcatatcagaatgcatcaccgtcacgtcggctatgcgcaagcatgcccgctgggccggctcctctgtctcctccatcctcggcggcaacccgaaccccgtccagctcggccgtcccaaccctctgctacgccccggtagtaaaggcggcgccattgtgcttgccgacggcgtgcaagacctcggcgctgccaatagatggggcttgagaggcaccagagggaagagcatgcaggacaaccccctcatggccggctttggacgactgcgccatgagctgtcgacttgcaaagatatccacgagttcgactctcccacgctcctcaaccccttcctccaggtcatccaggcctcctccacctcggccccgatcaccatcctcgccctcaaagcgatccgcaagttcctatcctacggctttatcagccccgactctccgcgatttcctctggccatgcagtcgctgtccaccgccatcacccattgcttgtttgaggcaagcgactcggcccaagatgaggtcgtcctgctcatgatattacacctcatggaggacatgctctctagcccgggaggcgcattgctcagcgacgagagtgtgtgcgaaatgatggagactggcttgagcatgtgctgccagtccaggctctcggagctactccggaggacggcagaggcagctatggtccgcatgtgccagatcatcttcgagcacctcaagtacctcgaggtagaggcccaagacgacctcgaggcctttgacagtcagcccaatggcggcaccgaggccctgaagatggccccgtccaccaatggcaccgacgtcgtagcctcgtcggatgcgccacccgccgacgagcgagcatcttcgagcaccgagattgccgcaaccgaggcagaaaccagctccgtcgccgaccctccggaagccccagaaattgcagaaataaagccatactccttaccttcaatcaaggagctattcagggccttggtggatttgttggatcctcatgacaagcaggtgggagacaccatgagggtcatggcgctgcgcatcatccatgttgcactagaggtggctggtccctccatcggtcgccatccggccctcgccgccgtagctgaggatcgactttgccggcatctgttccagcttgtccggtcagacaacatggccattctgcaggattcccttattgtcgccggaacgttgctggaaacgtgccgaggcgtgctgaaactacagcaggagctattcctctcctatttggtggcatgtctgcatcctccggttgagatcccgcgagagatcggcatagatcccctgctctatgaaggtataccgcagcgccctagcggagtcaaacctccaccatcacaggccggcagtggtagggccacgcccgtacctgttcaggaccgacagaagctgggactagagggtggtgctaggaagcccgatgctcgacaggctatggtcgagagcgtcggtgctcttgctcgcatgcccagctttctagtcgaactctttgtcaactacgactgcgatgccaaccggctcaacctgtgtgaggatatggtcggcttgctctcccgaagcgctttgccagactcagctacgtggagtaccacgagtgttccaccgctctgtctcgatgctttgttaggctatgtgcagttcatctctgaccgcctggataatgagcctgtttccgaagggcttccggatgaggcttttcttcgggagcagagacgacgcaagaagatcatcgtgaagggcgcatccaagtttaacgaaaaaccaaaagagggccttggatatttgatggagcaaaaaatcatcgagaacaaccccgcctcggtggccaagttcctcaggcagacgtctcgtatctccaaggcagttttgggtgattttctctctaagaagggcaacgacgactaccttgaagccttcatggacttgtttgatttctcaggcaaacgtactgacgaagcccttcgacaactattggagagtttccgtcttcccggagagtcaccgcttatcgagcgtattgtgaccgctttcgcgaagaaatatcatgtcgtgtctgatgaggttgcgaatgaggacgccgtcttcgtcttgacctacgctatcatcatgttgaatgtcgatcagcacagccctaaactgaagtcgcaaaagcgcatggagattatcgacttcaaccgtcaactccgaggcgtcaacgacggaaaggactttgcgcccgagttcgtagaggcgacatttgaagccatcaaagcaaacgaaatcatccttcctgatgagcacgacaatcaacatgcatttgattacgcatggcgagagctgctgctcaagaccgagtccgcaggaccactgatacactgcgacacgaacatttatgatgccgacatgtttgccgcaacatggaaaccgattgtgtctacactgtcgtatgtgttcatgcaggctacggatgataccgtcttctcacgtgtggtcactgggtttgatcaatgcgctcgaattgcgtccaagtatggaaatacagccgccctggatcgcattattcaaaaccttagctacatgactactctcgctagcgaagacctttctaatacgtctttgaacaccgaagtcaaggtgtcagatgacagtgacagcgttatggtcagcgaactcgccgttaagctcggtcgggatttcaaggctcagcttgccactctcgttctcttccgtgttgtaaagggaagcgaatccattattcgcgatggttgggagcatatcgttcggatatggctgaaattattcgtcaactctctgataccccctttccacaacaagagctactcttctctgaagctccccaaaattcccatccatacgccatcacaagtaattgatcgagcagcgaaggctgttgacactggcttattctcggctttatcctcttacatctccagctacgcggctgatgacccgccggaaccttcagccgaggagatagaaggttctctcagtactgctgattgtatcaaagcatgccaccttgaagatgtttttgtcaacgtctcgagcctccctgccgatgccttggaaccattgattggggcactgctcgaccagcttccggatgatgagcactcgtcggttccggttatcacagtgaaagccgagagtatgccttcgtcacccgctagcgccggtgcaaagaccccccaacggaaaccaatatatgatcccgccattgtgtacattttagaattttgcgtggtacttgcactcaaaacccccagctcaatcgagcttctcggcaagcgtgtctctgaggcgctgcaaatggtactccgtgactctggtcgctttcacccggtcattgtgtcacgtgctgcatactaccagttcaacgtgctcaaggctagctacgaacatgatttcgtccgggcacctgttttattgcataccatatctagtttccccaaggacatcgtaataaagacagcgcaattagtcttgcaaggcttgaagctttgcattgaacagcccggtccacttcgtagcgagatcatgacctcgcctgacttttgggtcatacttcgcaccttggcgggtaatgcgcacgcatcgccgacggtcttcgatattctagaaggaggcgtatctggaacaccgtcagctataattgcagacaattacgaagcagccatcactcttctcaatgagtatgcaaccgccgctcatgttggctcagttgaggagcaaaaaggcgaaaggaagcatagaaatgcgcgacccacaaagaaagaagcggctagtgaaaatgcagttgtttcgagaggtgtgaaagccgtcaatctcatatcgagcatgacagggcgaattccacatctcatgaagcagtcgcatcttgagagcagcgaagcctggtctgcatactggctccccatcttccaggccctcactacgcaatgcaccaatccttgtcgtgaagttcgccatttggccttctcatcattacagagatcgctgcttgcaccagaactcacatgcactgaccataaggaatggacggcgatttttggcgaggtgctattccctctgatcctcaagctcctcaagccagaagtgtactcctcggaccgagacggtatgagtgagacgagggtacaagctgcatcgctattatgcaagacattcttgcaatacctcgttctcctctcgaaatgggatggcatgctcgatctctggttgcagatcatcgatatcatggacagacttatgaatagtgggcagggtgacagcttggaagaggctgtgccagagaacctgaagaatgtattgctatttatggcgagcagcggatacctcgtgccgcctagcaagaatcccgaacaagagctcctgtggaccgagacgtggaaacggatcgatcggttcttgccggagctgaggaaggaacttgcgttcgaagaagaggagaaaccagtcacttctgagcaagagaaagagaaagagtcggagtctatagtgaatgaaaaggtggagaagacggaggaagttgcagctccggagacggagaatgagaagaaacaagctggtgatgatggggagtcggatgaagagtag

SEQ ID NO: 33937 - protein, 1597 aa, Muscodor strobelii
  misc_feature: SGI Peptide ID NO. 571716
  misc_feature (636)..(820): Pfam Id: PF01369 Pfam Desc: Sec7 domain
  misc_feature (37)..(1547): NCBI GI: 145612369 Blast Desc: MGG_12336 [Magnaporthe grisea 70-15] gi|145019550|gb|EDK03778.1| MGG_12336 [Magnaporthe grisea 70-15]
  misc_feature (19)..(1543): NCBI GI: 116195958 Blast Desc: CHGG_04577 [Chaetomium globosum CBS 148.51] gi|88180490|gb|EAQ87958.1| CHGG_04577 [Chaetomium globosum CBS 148.51]
  misc_feature (32)..(1546): NCBI GI: 39979136 Blast Desc: conserved [Neurospora crassa]
  misc_feature (32)..(1546): NCBI GI: 164423665 Blast Desc: NCU08023 [Neurospora crassa OR74A] gi|157070188|gb|EAA33457.2| NCU08023 [Neurospora crassa OR74A]
  misc_feature (43)..(1586): NCBI GI: 156049549 Blast Desc: SS1G_08481 [Sclerotinia sclerotiorum 1980] gi|154692880|gb|EDN92618.1| SS1G_08481 [Sclerotinia sclerotiorum 1980]
  misc_feature (37)..(1560): NCBI GI: 171690734 Blast Desc: protein product [Podospora anserina] gi|170945315|emb|CAP71427.1| protein product [Podospora anserina]
  misc_feature (34)..(1578): NCBI GI: 256725950 Blast Desc: [Nectria haematococca mpVI 77-13-4]
  misc_feature (37)..(1582): NCBI GI: 46116874 Blast Desc: FG04279.1 [Gibberella zeae PH-1]
  misc_feature (37)..(1547): NCBI GI: 261359692 Blast Desc: ARF guanine-nucleotide exchange factor 2 [Verticillium albo-atrum VaMs.102]
  misc_feature (39)..(1580): NCBI GI: 169610816 Blast Desc: SNOG_08515 [Phaeosphaeria nodorum SN15] gi|160702160|gb|EAT83683.2| SNOG_08515 [Phaeosphaeria nodorum SN15]
  misc_feature: Useful for introducing or modulating the production of volatile compounds
MDSTVAHARQSTELQHRTTLPLPLPLVNALRSSPDTQYRSRPVSVAVDPVSLVISECITVTSAMRKHARWAGSSVSSILGGNPNPVQLGRPNPLLRPGSKGGAIVLADGVQDLGAANRWGLRGTRGKSMQDNPLMAGFGRLRHELSTCKDIHEFDSPTLLNPFLQVIQASSTSAPITILALKAIRKFLSYGFISPDSPRFPLAMQSLSTAITHCLFEASDSAQDEVVLLMILHLMEDMLSSPGGALLSDESVCEMMETGLSMCCQSRLSELLRRTAEAAMVRMCQIIFEHLKYLEVEAQDDLEAFDSQPNGGTEALKMAPSTNGTDVVASSDAPPADERASSSTEIAATEAETSSVADPPEAPEIAEIKPYSLPSIKELFRALVDLLDPHDKQVGDTMRVMALRIIHVALEVAGPSIGRHPALAAVAEDRLCRHLFQLVRSDNMAILQDSLIVAGTLLETCRGVLKLQQELFLSYLVACLHPPVEIPREIGIDPLLYEGIPQRPSGVKPPPSQAGSGRATPVPVQDRQKLGLEGGARKPDARQAMVESVGALARMPSFLVELFVNYDCDANRLNLCEDMVGLLSRSALPDSATWSTTSVPPLCLDALLGYVQFISDRLDNEPVSEGLPDEAFLREQRRRKKIIVKGASKFNEKPKEGLGYLMEQKIIENNPASVAKFLRQTSRISKAVLGDFLSKKGNDDYLEAFMDLFDFSGKRTDEALRQLLESFRLPGESPLIERIVTAFAKKYHVVSDEVANEDAVFVLTYAIIMLNVDQHSPKLKSQKRMEIIDFNRQLRGVNDGKDFAPEFVEATFEAIKANEIILPDEHDNQHAFDYAWRELLLKTESAGPLIHCDTNIYDADMFAATWKPIVSTLSYVFMQATDDTVFSRVVTGFDQCARIASKYGNTAALDRIIQNLSYMTTLASEDLSNTSLNTEVKVSDDSDSVMVSELAVKLGRDFKAQLATLVLFRVVKGSESIIRDGWEHIVRIWLKLFVNSLIPPFHNKSYSSLKLPKIPIHTPSQVIDRAAKAVDTGLFSALSSYISSYAADDPPEPSAEEIEGSLSTADCIKACHLEDVFVNVSSLPADALEPLIGALLDQLPDDEHSSVPVITVKAESMPSSPASAGAKTPQRKPIYDPAIVYILEFCVVLALKTPSSIELLGKRVSEALQMVLRDSGRFHPVIVSRAAYYQFNVLKASYEHDFVRAPVLLHTISSFPKDIVIKTAQLVLQGLKLCIEQPGPLRSEIMTSPDFWVILRTLAGNAHASPTVFDILEGGVSGTPSAIIADNYEAAITLLNEYATAAHVGSVEEQKGERKHRNARPTKKEAASENAVVSRGVKAVNLISSMTGRIPHLMKQSHLESSEAWSAYWLPIFQALTTQCTNPCREVRHLAFSSLQRSLLAPELTCTDHKEWTAIFGEVLFPLILKLLKPEVYSSDRDGMSETRVQAASLLCKTFLQYLVLLSKWDGMLDLWLQIIDIMDRLMNSGQGDSLEEAVPENLKNVLLFMASSGYLVPPSKNPEQELLWTETWKRIDRFLPELRKELAFEEEEKPVTSEQEKEKESESIVNEKVEKTEEVAAPETENEKKQAGDDGESDEE

SEQ ID NO: 33938 - DNA, 5469 bp, Muscodor strobelii
  misc_feature: SGI EST ID NO. CUFF.80374.0
  misc_feature: Variant of the nucleotide sequence at SEQ ID NO 33936
cgggaagcttggtgtacaccaacaaaggcatgaaacattacatggcaagacttcaatatctggaaccgaggtcttcgaagtagctattcgaaccacctcagccacggatagctcctctttcgggtgtggaagctcagacagctgttgttctgttcgggaacaaaactcccgacatcagactcagaccagaccccgatcccctgcctcgactttcctcgactttgcgccgccatcctcgagagctatccccgagacaggacccgatcctctctcgagaccagagcgtcgccgtgtgggcgaggatgagtcaagatgcgcatagctatgccacaatggattcaaccgtcgcccatgctcgacagagcaccgagctccagcatcgtactacgctcccgctcccgctcccgctcgtgaacgccctccgctcttcgcccgacacccagtaccgcagccggcccgtgtctgtcgccgtcgatcccgtctcgctcgtcatatcagaatgcatcaccgtcacgtcggctatgcgcaagcatgcccgctgggccggctcctctgtctcctccatcctcggcggcaacccgaaccccgtccagctcggccgtcccaaccctctgctacgccccggtagtaaaggcggcgccattgtgcttgccgacggcgtgcaagacctcggcgctgccaatagatggggcttgagaggcaccagagggaagagcatgcaggacaaccccctcatggccggctttggacgactgcgccatgagctgtcgacttgcaaaggtgtgctcatgtttaaactcgacgagatatccaagatatagcaattgcaagacatagtacagtggctgacctgatcaattgccagatatccacgagttcgactctcccacgctcctcaaccccttcctccaggtcatccaggcctcctccacctcggccccgatcaccatcctcgccctcaaagcgatccgcaagttcctatcctacggctttatcagccccgactctccgcgatttcctctggccatgcagtcgctgtccaccgccatcacccattgcttgtttgaggcaagcgactcggcccaagatgaggtcgtcctgctcatgatattacacctcatggaggacatgctctctagcccgggaggcgcattgctcagcgacgagagtgtgtgcgaaatgatggagactggcttgagcatgtgctgccagtccaggctctcggagctactccggaggacggcagaggcagctatggtccgcatgtgccagatcatcttcgagcacctcaagtacctcgaggtagaggcccaagacgacctcgaggcctttgacagtcagcccaatggcggcaccgaggccctgaagatggccccgtccaccaatggcaccgacgtcgtagcctcgtcggatgcgccacccgccgacgagcgagcatcttcgagcaccgagattgccgcaaccgaggcagaaaccagctccgtcgccgaccctccggaagccccagaaattgcagaaataaagccatactccttaccttcaatcaaggagctattcagggccttggtggatttgttggatcctcatgacaagcaggtgggagacaccatgagggtcatggcgctgcgcatcatccatgttgcactagaggtggctggtccctccatcggtcgccatccggccctcgccgccgtagctgaggatcgactttgccggcatctgttccagcttgtccggtcagacaacatggccattctgcaggattcccttattgtcgccggaacgttgctggaaacgtgccgaggcgtgctgaaactacagcaggagctattcctctcctatttggtggcatgtctgcatcctccggttgagatcccgcgagagatcggcatagatcccctgctctatgaaggtataccgcagcgccctagcggagtcaaacctccaccatcacaggccggcagtggtagggccacgcccgtacctgttcaggaccgacagaagctgggactagagggtggtgctaggaagcccgatgctcgacaggctatggtcgagagcgtcggtgctcttgctcgcatgcccagctttctagtcgaactctttgtcaactacgactgcgatgccaaccggctcaacctgtgtgaggatatggtcggcttgctctcccgaagcgctttgccagactcagctacgtggagtaccacgagtgttccaccgctctgtctcgatgctttgttaggctatgtgcagttcatctctgaccgcctggataatgagcctgtttccgaagggcttccggatgaggcttttcttcgggagcagagacgacgcaagaagatcatcgtgaagggcgcatccaagtttaacgaaaaaccaaaagagggccttggatatttgatggagcaaaaaatcatcgagaacaaccccgcctcggtggccaagttcctcaggcagacgtctcgtatctccaaggcagttttgggtgattttctctctaagaagggcaacgacgactaccttgaagccttcatggacttgtttgatttctcaggcaaacgtactgacgaagcccttcgacaactattggagagtttccgtcttcccggagagtcaccgcttatcgagcgtattgtgaccgctttcgcgaagaaatatcatgtcgtgtctgatgaggttgcgaatgaggacgccgtcttcgtcttgacctacgctatcatcatgttgaatgtcgatcagcacagccctaaactgaagtcgcaaaagcgcatggagattatcgacttcaaccgtcaactccgaggcgtcaacgacggaaaggactttgcgcccgagttcgtagaggcgacatttgaagccatcaaagcaaacgaaatcatccttcctgatgagcacgacaatcaacatgcatttgattacgcatggcgagagctgctgctcaagaccgagtccgcaggaccactgatacactgcgacacgaacatttatgatgccgacatgtttgccgcaacatggaaaccgattgtgtctacactgtcgtatgtgttcatgcaggctacggatgataccgtcttctcacgtgtggtcactgggtttgatcaatgcgctcgaattgcgtccaagtatggaaatacagccgccctggatcgcattattcaaaaccttagctacatgactactctcgctagcgaagacctttctaatacgtctttgaacaccgaagtcaaggtgtcagatgacagtgacagcgttatggtcagcgaactcgccgttaagctcggtcgggatttcaaggctcagcttgccactctcgttctcttccgtgttgtaaagggaagcgaatccattattcgcgatggttgggagcatatcgttcggatatggctgaaattattcgtcaactctctgataccccctttccacaacaagagctactcttctctgaagctccccaaaattcccatccatacgccatcacaagtaattgatcgagcagcgaaggctgttgacactggcttattctcggctttatcctcttacatctccagctacgcggctgatgacccgccggaaccttcagccgaggagatagaaggttctctcagtactgctgattgtatcaaagcatgccaccttgaagatgtttttgtcaacgtctcgagcctccctgccgatgccttggaaccattgattggggcactgctcgaccagcttccggatgatgagcactcgtcggttccggttatcacagtgaaagccgagagtatgccttcgtcacccgctagcgccggtgcaaagaccccccaacggaaaccaatatatgatcccgccattgtgtacattttagaattttgcgtggtacttgcactcaaaacccccagctcaatcgagcttctcggcaagcgtgtctctgaggcgctgcaaatggtactccgtgactctggtcgctttcacccggtcattgtgtcacgtgctgcatactaccagttcaacgtgctcaaggctagctacgaacatgatttcgtccgggcacctgttttattgcataccatatctagtttccccaaggacatcgtaataaagacagcgcaattagtcttgcaaggcttgaagctttgcattgaacagcccggtccacttcgtagcgagatcatgacctcgcctgacttttgggtcatacttcgcaccttggcgggtaatgcgcacgcatcgccgacggtcttcgatattctagaaggaggcgtatctggaacaccgtcagctataattgcagacaattacgaagcagccatcactcttctcaatgagtatgcaaccgccgctcatgttggctcagttgaggagcaaaaaggcgaaaggaagcatagaaatgcgcgacccacaaagaaagaagcggctagtgaaaatgcagttgtttcgagaggtgtgaaagccgtcaatctcatatcgagcatgacagggcgaattccacatctcatgaagcagtcgcatcttgagagcagcgaagcctggtctgcatactggctccccatcttccaggccctcactacgcaatgcaccaatccttgtcgtgaagttcgccatttggccttctcatcattacagagatcgctgcttgcaccagaactcacatgcactgaccataaggaatggacggcgatttttggcgaggtgctattccctctgatcctcaagctcctcaagccagaagtgtactcctcggaccgagacggtatgagtgagacgagggtacaagctgcatcgctattatgcaagacattcttgcaatacctcgttctcctctcgaaatgggatggcatgctcgatctctggttgcagatcatcgatatcatggacagacttatgaatagtgggcagggtgacagcttggaagaggctgtgccagagaacctgaagaatgtattgctatttatggcgagcagcggatacctcgtgccgcctagcaagaatcccgaacaagagctcctgtggaccgagacgtggaaacggatcgatcggttcttgccggagctgaggaaggaacttgcgttcgaagaagaggagaaaccagtcacttctgagcaagagaaagagaaagagtcggagtctatagtgaatgaaaaggtggagaagacggaggaagttgcagctccggagacggagaatgagaagaaacaagctggtgatgatggggagtcggatgaagagtagatgctatagacgcaaggcgggtcgagtcatgatagaggtaaacatagtgaaacggaatgacagtaaagagaggttataatcggccattgtatattagccaaggactcgacgacgagatggcacgagatggaatgatacatacataacatgcctcttatcctcttatcttcgtcgagagttatgaagacattccacgctgaagtcggtggacacgaatacaaactcgcacgagtgctttgagtggtgagggacttatgg

SEQ ID NO: 33939 - DNA, 333 bp, Muscodor strobelii
  misc_feature: SGI cDNA ID NO. 571717
  misc_feature: Elevated expression when VOC is produced
  misc_feature: Encodes the peptide sequence at SEQ ID NO 33940
atggcgaccaacttcgaacatcctcaactcaacacagccgtcgaggccggcgagcgccagcgatcaggctcacgagattactccaacactgatgaatgggacgcatcaaaaaccgtcccatcccgcttccaaaagcgcaaaggcagcatcttctccacgccctcgtcgcgggacggccacgtagagcgaaaccgcgacgccgtcgaggagttccacaaggcacactcgaagcgctggtccgtatcctccaaggcgagctccacgggagatgccacctcccccgtccaggagaaggagagacgcaagtccagcgcaggcactgccaatgcgtag

SEQ ID NO: 33940 - protein, 110 aa, Muscodor strobelii
  misc_feature: SGI Peptide ID NO. 571717
  misc_feature (28)..(78): NCBI GI: 261359688 Blast Desc: conserved [Verticillium albo-atrum VaMs.102]
  misc_feature (30)..(84): NCBI GI: 46116882 Blast Desc: FG04283.1 [Gibberella zeae PH-1]
  misc_feature (25)..(78): NCBI GI: 171690708 Blast Desc: protein product [Podospora anserina] gi|170945302|emb|CAP71414.1| protein product [Podospora anserina]
  misc_feature (6)..(79): NCBI GI: 256725948 Blast Desc: NECHADRAFT_43505 [Nectria haematococca mpVI 77-13-4]
  misc_feature (34)..(81): NCBI GI: 154309063 Blast Desc: [Botryotinia fuckeliana B05.10] gi|150852469|gb|EDN27661.1| [Botryotinia fuckeliana B05.10]
  misc_feature (32)..(78): NCBI GI: 85109017 Blast Desc: NCU08037 [Neurospora crassa OR74A] gi|28924318|gb|EAA33471.1| [Neurospora crassa OR74A] gi|39979164|emb|CAE85537.1| [Neurospora crassa]
  misc_feature (25)..(79): NCBI GI: 258567618 Blast Desc: [Uncinocarpus reesii 1704] gi|237905999|gb|EEP80400.1| [Uncinocarpus reesii 1704]
  misc_feature (30)..(67): NCBI GI: 116195984 Blast Desc: [Chaetomium globosum CBS 148.51] gi|88180503|gb|EAQ87971.1| [Chaetomium globosum CBS 148.51]
  misc_feature (21)..(79): NCBI GI: 119174430 Blast Desc: [Coccidioides immitis RS]
  misc_feature (32)..(79): NCBI GI: 226294085 Blast Desc: PADG_05584 [Paracoccidioides brasiliensis Pb18]
  misc_feature: Useful for introducing or modulating the production of volatile compounds
MATNFEHPQLNTAVEAGERQRSGSRDYSNTDEWDASKTVPSRFQKRKGSIFSTPSSRDGHVERNRDAVEEFHKAHSKRWSVSSKASSTGDATSPVQEKERRKSSAGTANA

SEQ ID NO: 33941 - DNA, 1207 bp, Muscodor strobelii
  misc_feature: SGI EST ID NO. CUFF.80409.1
  misc_feature: Variant of the nucleotide sequence at SEQ ID NO 33939
caggcgatatgcaccattacgcatgcacctatggggaactctccaaagcagtagattcaggcgagagagaaagacaagacgaagcgacgtaccacgtgtaatttgcgatttctaccccaagggtactttccccatctctggtatgtgatcgacgtaggtcatcactgcccatgactcaattatacggcatgatgggtacttgcttgcctgaatcctcacatatataaagtgcataccaaggaagtcaccatacttgtgactctctatccatccctagtctttgtctctttgtacttccattgaagaaaaggagctactgatctatcttcacccctacttgaatcaaaggaaatcctatcaacctataaacaatctatcttcgactaccacctattgtaataccatcattgacctcaccaagttgatactcggacctacaattacatccacattatatcacagaaattgcccacacggacactagcaaagtcataaccttgataactcaacatagcacgacgaaacatcaaaatggcgaccaacttcgaacatcctcaactcaacacagccgtcgaggccggcgagcgccagcgatcaggctcacgagattactccaacactgatgaatgggacgcatcaaaaaccgtcccatcccgcttccaaaagcgcaaaggcagcatcttctccacgccctcgtcgcgggacggccacgtagagcgaaaccgcgacgccgtcgaggagttccacaaggcacactcgaagcgctggtccgtatcctccaaggcgagctccacgggagatgccacctcccccgtccaggagaaggagagacgcaagtccagcgcaggcactgccaatgcgtaggtcgctggtgacgaggcatatatctgtggttgttagggtgggctttgtgagaagagagtaaaattgattgggcggaaatgaataggggcaggggagagaatgggcaagcgagcgacaaactagctgaggaaggattgttttgataagtctcttcacgtactgttgcctttctgagagtctgaggtaggcggaggcggcgttgttcccttcgtgtagttttcacggtgcacatgatgctggacggattgctgcagggatgagagggcagacgtaacaacacattgtatgtatacttaacacgctatgcaacgaataagaatgtaaaaaatctgctacaccaagg

SEQ ID NO: 33942 - DNA, 2493 bp, Muscodor strobelii
  misc_feature: SGI cDNA ID NO. 571718
  misc_feature: Reduced expression when VOC is produced
  misc_feature: Encodes the peptide sequence at SEQ ID NO 33943
atgccccccaatggtgtcgccaacggcaccggcacccacggcatcgctcgtcagccagatcttcatctagtcaccgatgaagacgccgtctacgagcaagacatcctgcgagaccccggaagcacgagaccatggctcgcctacatccagttcaagctgcagcatggcagtccccaagaacagtccttcgttctcgagagagcctgcatacagctgcccagatcatacaagctctggaagatgtacctgcgattcaggacgaaacatgtctcgaaactcaatgctgccgtctttgccgccgagttccgcaaggtgaacgccctgtttgagaaggcactcatcctcctcaacaagatgccccgcatatgggagatgtacctcaggttcctgctccagcagcccctcgtcaccctcacgcggcgcaccttcgaccgcgccttgcgcgccctccccatcacccagcacaacaggatatgggccatctaccggcccttcgccaactcggccggtggcgacaccgccgtcaagatctggaggcgctacatgcagattcacccggaagatgctgaggacttcatcgagctcttgacccaggtcggtctatataccgaagctgtcaaggcatacatcgagattctcaacaatccacgcttcaacagcaagcagagcaaggggcactacgagatatggagcgagatggtcgacctgctcgtcgagcatgccaacgatgttgaaaccggccacgagaccggtatcgatgtcgagtgcataatccggagtggcattgaccggttcgccgatcagagagggaagctgtggtgtgggctcgccacatactgggcgaggagaggaagcttcgagcgtgccagagatgtgttcgaggagggtataaccacggtcatgaccgtccgcgacttcactctcattttcgacacatatgcagaattcgaagagtctattatcggcgcgttgatggagcacgcatcgacgcgcgccgaagaaggggccctagatgaggacgccgacttcgatctggacatccgaatgatgcgctttgaacagctcatggaccgccggccgttccttctgaatgacgtcttgctacggcagaaccccaataacgtcatcgagtgggagaagcgggttgctttgtggggcgacaacaagatcgaggtcgtccagacgtacacgaacgcaattgctgctattcagcccaagaaggctgtcggcgctttccaccagctctgggcgaactatgccaagttctacgaaaaagggggcgacatacggaacgccagggtcatcatggagaaggccgtcaaggtcccattcaagtctgttgccgaacttgccgacatgtggatagaatgggctgaaatggagcttcgaaatgacaactttgatgatgcagttaagatcatggccaaggctgtccaggcacccaagagatcgacagtcgactatttcgacgagaccctttcaccgcaacaaagagtacacaagagttggaaactgtggagtttctatgttgatttggtagagagtgtcagttccttagacgagacaaagaaggtctacgaaagaatatttgaactgcggattgccacgccccagacagtcgtcaactacgccaacctcatggaggaacacaaatacttcgaagaatgtttcaagattttcgagagaggactagatctcttcagctatccggttgctttcgagttatggaatctttatcttaccaaggccgtcgatcgtaagattggcattgaacggctgcgagacttgtttgaacaagcagtagaggatgttccacccaagtttgccaaggtgctttacctgatgtacggcaacttagaagaagaaagagggttggcgagacatgccatgcggatctacgaaagagccacaagagctgtctccgatgaagaccgtgcagacatgttcaacttttatatcaccaagtccgcctcgaatttcgggctaccctctacaagacctatttacgaacgagctattgccgccttacccgacgaagaagcccgggacatgtgtctcaagtttgccgacatggagaagcgtctcggtgaaatagatcgtgcccgtgctatctacggtcacgcatcacagttttgcgaccctcggacaaatccagcattctggaccaagtgggaacaattcgaagtgcagcacggcaacgagaacacctacaaagagatgctccgtatcaagcgcagtgtccaggcgcaatacaatacagatgtcaatttcatcgcatcacaagctcttgcccgcagccaacaaacccgtgcggcagaagcaaacggagattcagaggtcgcagatgccatggagcaactggaacgacaggcaagggcccccgccggcttcgttgcctcgagtacgggcatcgcggggacggttgccaaggagcaaccggttgtggcatcaaatcccgatgccattgatatcgacgacatggatgacgactga

SEQ ID NO: 33943 - protein, 830 aa, Muscodor strobelii
  misc_feature: SGI Peptide ID NO. 571718
  misc_feature (17)..(829): NCBI GI: 85109015 Blast Desc: pre-mRNA splicing factor SYF1 [Neurospora crassa OR74A] gi|74617180|sp|Q7SAK5.1|SYF1_NEUCR RecName: Full=Pre-mRNA-splicing factor syf-1 gi|28924317|gb|EAA33470.1|
  misc_feature (16)..(828): NCBI GI: 171690710 Blast Desc: protein product [Podospora anserina] gi|170945303|emb|CAP71415.1| protein product [Podospora anserina]
  misc_feature (12)..(829): NCBI GI: 145612371 Blast Desc: conserved [Magnaporthe grisea 70-15] gi|148887440|sp|Q52DF3.2|SYF1_MAGGR RecName: Full=Pre-mRNA-splicing factor SYF1 gi|145019553|gb|EDK03781.1|
  misc_feature (14)..(829): NCBI GI: 256725550 Blast Desc: [Nectria haematococca mpVI 77-13-4]
  misc_feature (16)..(829): NCBI GI: 46116884 Blast Desc: FG04284.1 [Gibberella zeae PH-1]
  misc_feature (12)..(830): NCBI GI: 154309065 Blast Desc: conserved [Botryotinia fuckeliana B05.10] gi|150852470|gb|EDN27662.1| conserved [Botryotinia fuckeliana B05.10]
  misc_feature (12)..(830): NCBI GI: 156049749 Blast Desc: conserved [Sclerotinia sclerotiorum 1980] gi|154692980|gb|EDN92718.1| conserved [Sclerotinia sclerotiorum 1980]
  misc_feature (16)..(828): NCBI GI: 169779145 Blast Desc: [Aspergillus oryzae RIB40] gi|83772776|dbj|BAE62904.1| protein product [Aspergillus oryzae]
  misc_feature (16)..(826): NCBI GI: 67515659 Blast Desc: AN0111.2 [Aspergillus nidulans FGSC A4] gi|74599212|sp|Q5BH69.1|SYF1_EMENI RecName: Full=Pre-mRNA-splicing factor syf1 gi|40746133|gb|EAA65289.1| A4]
  misc_feature (16)..(819): NCBI GI: 115387509 Blast Desc: pre-mRNA splicing factor syf-1 [Aspergillus terreus NIH2624] gi|114195344|gb|EAU37044.1| pre-mRNA splicing factor syf-1 [Aspergillus terreus NIH2624]
  misc_feature: Useful for introducing or modulating the production of volatile compounds
MPPNGVANGTGTHGIARQPDLHLVTDEDAVYEQDILRDPGSTRPWLAYIQFKLQHGSPQEQSFVLERACIQLPRSYKLWKMYLRFRTKHVSKLNAAVFAAEFRKVNALFEKALILLNKMPRIWEMYLRFLLQQPLVTLTRRTFDRALRALPITQHNRIWAIYRPFANSAGGDTAVKIWRRYMQIHPEDAEDFIELLTQVGLYTEAVKAYIEILNNPRFNSKQSKGHYEIWSEMVDLLVEHANDVETGHETGIDVECIIRSGIDRFADQRGKLWCGLATYWARRGSFERARDVFEEGITTVMTVRDFTLIFDTYAEFEESIIGALMEHASTRAEEGALDEDADFDLDIRMMRFEQLMDRRPFLLNDVLLRQNPNNVIEWEKRVALWGDNKIEVVQTYTNAIAAIQPKKAVGAFHQLWANYAKFYEKGGDIRNARVIMEKAVKVPFKSVAELADMWIEWAEMELRNDNFDDAVKIMAKAVQAPKRSTVDYFDETLSPQQRVHKSWKLWSFYVDLVESVSSLDETKKVYERIFELRIATPQTVVNYANLMEEHKYFEECFKIFERGLDLFSYPVAFELWNLYLTKAVDRKIGIERLRDLFEQAVEDVPPKFAKVLYLMYGNLEEERGLARHAMRIYERATRAVSDEDRADMFNFYITKSASNFGLPSTRPIYERAIAALPDEEARDMCLKFADMEKRLGEIDRARAIYGHASQFCDPRTNPAFWTKWEQFEVQHGNENTYKEMLRIKRSVQAQYNTDVNFIASQALARSQQTRAAEANGDSEVADAMEQLERQARAPAGFVASSTGIAGTVAKEQPVVASNPDAIDIDDMDDD

SEQ ID NO: 33944 - DNA, 4670 bp, Muscodor strobelii
  misc_feature: SGI EST ID NO. CUFF.80922.0
  misc_feature: Variant of the nucleotide sequence at SEQ ID NO 33942
tcggtcgagcgtgggcagagcgcagagaggaatatggttcggactgccagaattcagatgacaggcagatgatcctcgcaccacacgccgctaatcaacaccactcggtctgcaccaccaccactgctctcactgccgctgctactgcacgtcggggtgcgtgcatgcccccttcctcctctgcatgctctccgtcgtcctctctccttcctcccaccatgcgctgctgatgttgtccacgccctgactctcccattcgcgtctgctcgcccgacggcctcgtcgacgaggtctcgataccctgcacaatgccccccaatggtgtcgccaacggcaccggcacccacggcatcgctcgtcagccagatcttcatctagtcgtacgtcggcccggtctcctcctctcctcttcttctaccggcgcattgcacactgcgcatcgtgtatgctaacctcgcaaatgcagaccgatgaagacgccgtctacgagcaagacatcctgcgagaccccggaagcacgagaccatggctcgcctacatccagttcaagctgcagcatggcagtccccaagaacagtccttcgttctcgagagagcctgcatacagctgcccagatcatacaagctctggaagatgtacctgcgattcaggacgaaacatgtctcgaaactcaatgctgccgtctttgccgccgagttccgcaaggtgaacgccctgtttgagaaggcactcatcctcctcaacaagatgccccgcatatgggagatgtacctcaggttcctgctccagcagcccctcgtcaccctcacgcggcgcaccttcgaccgcgccttgcgcgccctccccatcacccagcacaacaggatatgggccatctaccggcccttcgccaactcggccggtggcgacaccgccgtcaagatctggaggcgctacatgcagattcacccggaagatgctgaggacttcatcgagctcttgacccaggtcggtctatataccgaagctgtcaaggcatacatcgagattctcaacaatccacgcttcaacagcaagcagagcaaggggcactacgagatatggagcgagatggtcgacctgctcgtcgagcatgccaacgatgttgaaaccggccacgagaccggtatcgatgtcgagtgcataatccggagtggcattgaccggttcgccgatcagagagggaagctgtggtgtgggctcgccacatactgggcgaggagaggaagcttcgagcgtgccagagatgtgttcgaggagggtataaccacggtcatgaccgtccgcgacttcactctcattttcgacacatatgcagaattcgaagagtctattatcggcgcgttgatggagcacgcatcgacgcgcgccgaagaaggggccctagatgaggacgccgacttcgatctggacatccgaatgatgcgctttgaacagctcatggaccgccggccgttccttctgaatgacgtcttgctacggcagaaccccaataacgtcatcgagtgggagaagcgggttgctttgtggggcgacaacaagatcgaggtcgtccagacgtacacgaacgcaattgctgctattcagcccaagaaggctgtcggcgctttccaccagctctgggcgaactatgccaagttctacgaaaaagggggcgacatacggaacgccagggtcatcatggagaaggccgtcaaggtcccattcaagtctgttgccgaacttgccgacatgtggatagaatgggctgaaatggagcttcgaaatgacaactttgatgatgcagttaagatcatggccaaggctgtccaggcacccaagagatcgacagtcgactatttcgacgagaccctttcaccgcaacaaagagtacacaagagttggaaactgtggagtttctatgttgatttggtagagagtgtcagttccttagacgagacaaagaaggtctacgaaagaatatttgaactgcggattgccacgccccagacagtcgtcaactacgccaacctcatggaggaacacaaatacttcgaagaatgtttcaagattttcgagagaggactagatctcttcagctatccggttgctttcgagttatggaatctttatcttaccaaggccgtcgatcgtaagattggcattgaacggctgcgagacttgtttgaacaagcagtagaggatgttccacccaagtttgccaaggtgctttacctgatgtacggcaacttagaagaagaaagagggttggcgagacatgccatgcggatctacgaaagagccacaagagctgtctccgatgaagaccgtgcagacatgttcaacttttatatcaccaagtccgcctcgaatttcgggctaccctctacaagacctatttacgaacgagctattgccgccttacccgacgaagaagcccgggacatgtgtctcaagtttgccgacatggagaagcgtctcggtgaaatagatcgtgcccgtgctatctacggtcacgcatcacagttttgcgaccctcggacaaatccagcattctggaccaagtgggaacaattcgaagtgcagcacggcaacgagaacacctacaaagagatgctccgtatcaagcgcagtgtccaggcgcaatacaatacagatgtcaatttcatcgcatcacaagctcttgcccgcagccaacaaacccgtgcggcagaagcaaacggagattcagaggtcgcagatgccatggagcaactggaacgacaggcaagggcccccgccggcttcgttgcctcgagtacgggcatcgcggggacggttgccaaggagcaaccggttgtggcatcaaatcccgatgccattgatatcgacgacatggatgacgactgaaacgattgacaattattcacatactcttttcctttgttactcgcttcgatctgtacatttggcatattttgtgacaacctaggggaacggctgggatgggatggttgtgactctttcaactggcttcgccaaggtcacctagctaagatagtcgtattgcctgcgcgaggaccatatcatcttcgacgcgaaataagaaagacggaataaagcatggtttgctccaatctgctgctcttcgctatcacgacttgcttgtgaatccggctgaatcaacgatttgaacgaccagtctgctatcgaggtcgtgttttagtcgagctttcctagtcgaatatgtattcaaattattggagttaatctaagttggggtcgtcacaagttgattgcgtgggcgagtggatggtgcgagagattatgcgacgccatctcattcctcgcccgtttcgcctactcacatccgcgaaacaaactgagagacgagtattcaacccatcctcctcttgctatatcacatcatgggcatcgacataacctaatcaagtaaacataacgaccccgctcatagccggaagaactaccaccatcagtaccggcgtctgttgcggattatttgcgccgtattattgcgtcagttcggaatctggcgaaaaggatgcaactctacaaaacagatctcacagcatctagacgagatatgtcgatcaatttggaggaagcatagccgatgattacaccagatgcatcttcagggtagcgatgccccataacggcaaatattcccgttgcaatgcttgacattgacctcaacctctctgcagtctataataaaaacgggtgaagccgagatggagataaattgctaatacatatgatcatcatccaattcgcaaatcctctgcatcctactcgatgctatcacgaatatgcaaaagaaccccagactcggctccgtacgatcgacgaagagaaatcaatatgtgtttgatcgatgcaaccatcaggtatgctgctgacgtcacaaactcagtcccggcacttatatggctagactggccactgccattggctaagcttctgattggagatacagggagatactcccacagaggaattcaaacgcccggcctctacacggtggaaagccacgcggggcatgagtcgctgagactgagcgtcgagaaaagttaaatgccaagaccgaagtcattgtgatgcttcatagtccagttggcgcagcttcaacacatcggcgcgaaccgcgaacgaggtagcaacactaggcaattagactgcctatatgtatacgtaataacagtcgagacctctgcacgtcaatcggcttacaacgagaaacatctctcataggcggggcattccatgcgagcaactcgggaaggtctcatgatgggtccttctcgcccactctcgacacttaaaggcgggggaggggcgatgctagacgctaattggtgctagcttgaggctttgacattgacctctagaaagtggcggcgcgcgacatcgagacaacgacaggattatttcttaatccctcgcccttgactggctgtgctttgttgctagcgctcgcggatggagtctttgtaagagccaagatcagtctatagatcttggctctgtatgcagttcgatacgcccgcatatctcgtcactcctaccatgggtgatataaacatatcttcgttccacgatgcggtgatacgattggtgttaagacagcaacatatgcatcttcttctacttggaatagctatctcgc

SEQ ID NO: 33945 - DNA, 552 bp, Muscodor strobelii
  misc_feature: SGI cDNA ID NO. 571719
  misc_feature: Reduced expression when VOC is produced
  misc_feature: Encodes the peptide sequence at SEQ ID NO 33946
atgttcaacttttatatcaccaagtccgcctcgaatttcgggctaccctctacaagacctatttacgaacgagctattgccgccttacccgacgaagaagcccgggacatgtgtctcaagtttgccgacatggagaagcgtctcggtgaaatagatcgtgcccgtgctatctacggtcacgcatcacagttttgcgaccctcggacaaatccagcattctggaccaagtgggaacaattcgaagtgcagcacggcaacgagaacacctacaaagagatgctccgtatcaagcgcagtgtccaggcgcaatacaatacagatgtcaatttcatcgcatcacaagctcttgcccgcagccaacaaacccgtgcggcagaagcaaacggagattcagaggtcgcagatgccatggagcaactggaacgacaggcaagggcccccgccggcttcgttgcctcgagtacgggcatcgcggggacggttgccaaggagcaaccggttgtggcatcaaatcccgatgccattgatatcgacgacatggatgacgactga

SEQ ID NO: 33946 - protein, 183 aa, Muscodor strobelii
  misc_feature: SGI Peptide ID NO. 571719
  misc_feature (1)..(182): NCBI GI: 85109015 Blast Desc: pre-mRNA splicing factor SYF1 [Neurospora crassa OR74A] gi|74617180|sp|Q7SAK5.1|SYF1_NEUCR RecName: Full=Pre-mRNA-splicing factor syf-1 gi|28924317|gb|EAA33470.1|
  misc_feature (1)..(182): NCBI GI: 116195982 Blast Desc: conserved [Chaetomium globosum CBS 148.51] gi|88180502|gb|EAQ87970.1| conserved [Chaetomium globosum CBS 148.51]
  misc_feature (1)..(181): NCBI GI: 171690710 Blast Desc: protein product [Podospora anserina] gi|170945303|emb|CAP71415.1| protein product [Podospora anserina]
  misc_feature (1)..(182): NCBI GI: 145612371 Blast Desc: conserved [Magnaporthe grisea 70-15] gi|148887440|sp|Q52DF3.2|SYF1_MAGGR RecName: Full=Pre-mRNA-splicing factor SYF1 gi|145019553|gb|EDK03781.1|
  misc_feature (1)..(182): NCBI GI: 256725550 Blast Desc: [Nectria haematococca mpVI 77-13-4]
  misc_feature (1)..(182): NCBI GI: 46116884 Blast Desc: FG04284.1 [Gibberella zeae PH-1]
  misc_feature (1)..(183): NCBI GI: 154309065 Blast Desc: conserved [Botryotinia fuckeliana B05.10] gi|150852470|gb|EDN27662.1| conserved [Botryotinia fuckeliana B05.10]
  misc_feature (1)..(183): NCBI GI: 156049749 Blast Desc: conserved [Sclerotinia sclerotiorum 1980] gi|154692980|gb|EDN92718.1| conserved [Sclerotinia sclerotiorum 1980]
  misc_feature (1)..(181): NCBI GI: 238499759 Blast Desc: DNA repair and transcription protein (Xab2), [Aspergillus flavus NRRL3357] gi|220692867|gb|EED49213.1| DNA repair and transcription protein (Xab2), [Aspergillus flavus
  misc_feature (1)..(181): NCBI GI: 169779145 Blast Desc: [Aspergillus oryzae RIB40] gi|83772776|dbj|BAE62904.1| protein product [Aspergillus oryzae]
  misc_feature: Useful for introducing or modulating the production of volatile compounds
MFNFYITKSASNFGLPSTRPIYERAIAALPDEEARDMCLKFADMEKRLGEIDRARAIYGHASQFCDPRTNPAFWTKWEQFEVQHGNENTYKEMLRIKRSVQAQYNTDVNFIASQALARSQQTRAAEANGDSEVADAMEQLERQARAPAGFVASSTGIAGTVAKEQPVVASNPDAIDIDDMDDD

SEQ ID NO: 33947 - DNA, 4670 bp, Muscodor strobelii; identical to SEQ ID NO: 33944
  misc_feature: SGI EST ID NO. CUFF.80922.0
  misc_feature: Variant of the nucleotide sequence at SEQ ID NO 33945

SEQ ID NO: 33948 - DNA, 783 bp, Muscodor strobelii
  misc_feature: SGI cDNA ID NO. 571720
  misc_feature: Reduced expression when VOC is produced
  misc_feature: Encodes the peptide sequence at SEQ ID NO 33949
atgtcgggcgccggggatcgggaagctgtcttccccacgcgccagtcgctgggtatcatgaaggccaagctcaagggcgccgagacgggacacagtctgctgaagcgcaagagcgaagctctcaccaaacgtttccgagaaatcacccgccgaatcgacgaagccaagcgaaagatgggccgtgtcatgcagatcgctgcattttcccttgccgaagtcacatatgcagtcggcggtgacatcggctaccaggtccaagagtctgccaaatcagcgcggttccgcctacgcacgaaacaagagaatgtgtccggtgtcttcctgcctgccttcgagagctatcagacagaggggaacaacgacttcggtctaacgggtcttggaaagggtggacagcaggtccagaggtgtagagagacatatgccagggccgtcgagacccttgttgagctcgccagtctgcagacggcttttgtaatattggacgaggtcatcaaggtcgtcaatcggagagtcaacgccatcgagcacgtcatcatacccaggacagaaaacaccatcaaatacatcaactccgaactcgacgagttagacagagaagagttctaccgcctcaagaaagtcgccggcaagaaacagcgagacgtggccgcagccgacgcagagatgaaagccaagaggcaagccgaggagaaagcaggccaggagaacatcgagcccggggacgactcggcgcccgccgatatgctggccacgggtgaggacgatgacgtgatattctag

SEQ ID NO: 33949 - protein, 260 aa, Muscodor strobelii
  misc_feature: SGI Peptide ID NO. 571720
  misc_feature (15)..(213): Pfam Id: PF01813 Pfam Desc: ATP synthase subunit D
  misc_feature (1)..(260): NCBI GI: 225561808 Blast Desc: vacuolar ATP synthase subunit D [Ajellomyces capsulatus G186AR]
  misc_feature (1)..(260): NCBI GI: 154283347 Blast Desc: vacuolar ATP synthase subunit D [Ajellomyces capsulatus NAm1] gi|150410649|gb|EDN06037.1| vacuolar ATP synthase subunit D [Ajellomyces capsulatus NAm1]
  misc_feature (1)..(260): NCBI GI: 256725947 Blast Desc: [Nectria haematococca mpVI 77-13-4]
  misc_feature (1)..(260): NCBI GI: 67477353 Blast Desc: VATD_NEUCR RecName: Full=V-type proton ATPase subunit D; Short=V-ATPase subunit D; AltName: Full=Vacuolar proton pump subunit D gi|39979162|emb|CAE85535.1| vacuolar ATP synthase D
  misc_feature (1)..(260): NCBI GI: 238842682 Blast Desc: vacuolar ATP synthase subunit D [Microsporum canis CBS 113480]
  misc_feature (1)..(260): NCBI GI: 226294087 Blast Desc: ATPase [Paracoccidioides brasiliensis Pb18]
  misc_feature (1)..(260): NCBI GI: 261191119 Blast Desc: V-type ATPase D subunit [Ajellomyces dermatitidis SLH14081] gi|239591012|gb|EEQ73593.1| V-type ATPase D subunit [Ajellomyces dermatitidis SLH14081] gi|239613075|gb|EEQ90062.1| D
  misc_feature (1)..(260): NCBI GI: 240106829 Blast Desc: vacuolar ATP synthase subunit D, [Coccidioides posadasii C735 delta SOWgp]
  misc_feature (1)..(260): NCBI GI: 39971541 Blast Desc: MGG_07086 [Magnaporthe grisea 70-15] gi|145019552|gb|EDK03780.1| MGG_07086 [Magnaporthe grisea 70-15]
  misc_feature (1)..(260): NCBI GI: 242763806 Blast Desc: vacuolar ATP synthase subunit D, [Talaromyces stipitatus ATCC 10500] gi|218723844|gb|EED23261.1| vacuolar ATP synthase subunit D, [Talaromyces stipitatus ATCC 10500]
  misc_feature: Useful for introducing or modulating the production of volatile compounds
MSGAGDREAVFPTRQSLGIMKAKLKGAETGHSLLKRKSEALTKRFREITRRIDEAKRKMGRVMQIAAFSLAEVTYAVGGDIGYQVQESAKSARFRLRTKQENVSGVFLPAFESYQTEGNNDFGLTGLGKGGQQVQRCRETYARAVETLVELASLQTAFVILDEVIKVVNRRVNAIEHVIIPRTENTIKYINSELDELDREEFYRLKKVAGKKQRDVAAADAEMKAKRQAEEKAGQENIEPGDDSAPADMLATGEDDDVIF

SEQ ID NO: 33950 - DNA, 2461 bp, Muscodor strobelii
  misc_feature: SGI EST ID NO. CUFF.80638.0
  misc_feature: Variant of the nucleotide sequence at SEQ ID NO 33948
gaaagagggaagttgccgaacactaggagtgctacatacaacaaatcactgtatttccacactgtacgagggtcgtcattccctggcgggcagcttgacccctgccatcagaggccgacgataggtctgtctggagcggcatcccacacgactcgacctagtttgaatatcttcgtttcttgtcaagctgtatctcatttcgggccactccatagtctctcctccgaaaaacttcacatcacggcaacagctgcaccgatctcaccatgtcgggcgccggggatcgggaagctgtcttccccacgcgccagtcgctgggtatcatgaaggccaagctcaagggcgccgagacgggacacagtctgctgaagcgcaagagcgaagctctcaccaaacgtttccgagaaatcacccgccgaatcgacgaagccaagcgaaagatgggccgtgtcatgcagatcgctgcattttcccttgccgaagtcacatatgcagtcggcggtgacatcggctaccaggtccaagagtctgccaaatcagcgcggttccgcctacgcacgaaacaagagaatgtgtccggtgtcttcctgcctgccttcgagagctatcagacagaggggaacaacgacttcggtctaacgggtcttggaaagggtggacagcaggtccagaggtgtagagagacatatgccagggccgtcgagacccttgttgagctcgccagtctgcagacggcttttgtaatattggacgaggtcatcaaggtcgtcaatcggagagtcaacgccatcgagcacgtcatcatacccaggacagaaaacaccatcaaatacatcaactccgaactcgacgagttagacagagaagagttctaccgcctcaagaaagtcgccggcaagaaacagcgagacgtggccgcagccgacgcagagatgaaagccaagaggcaagccgaggagaaagcaggccaggagaacatcgagcccggggacgactcggcgcccgccgatatgctggccacgggtgaggacgatgacgtgatattctaggagtgtcaatcatagtaccgtttcgaaagacccctggaacagatagagagcagaatcaggctgggaggcttgagatgattgtgtattgttagggctaagcggcgcatcatggttaattaatgcatttatatatatgacgagattcaaatcattccctataccattattaatgtcttaagatgcgagatatgtcacactgtgagactcaatagctgtacaaatgctagcaatagtatactagttaccctctaactactgcgcattaccgagaggatcatattacgatctcggtagtctacacctctcaaatggcgttgcctctgctcgcgtttacgttgcaactttgcaacaagggactagggtatggagttacttctctaaatgctcccatccttctacttccatccctgatacaagccacccttggcttctgtatctatctactgcctctgataggtaaccttgataaaagcattattctcgcccacactcatgcccgccgtgttctccttggcagtaatagcgccggcctcggcctcgtattcaataaacgcgatgccctttctgcccggcacaagacgaacttctctgaagccctcgaagcgtccgaataatcccgtcaagtcgtcgataccaaagtcgtcgggcaggttctggacgaagagaatcttgttgggcggtaggtattcgtcggggaccacggcgttggcggatgcgccgcccgtgggcttgagaccggtgcgtgcgcctggtttgccggctgcgggggctttggtgtcggcggctgggcgggcacgtttggattctgttgcggcttctagagctttgcgtttatctagttgtaggatgtcagtatgtcattcatgaattgcgtacgttgttgagatatggcagcgtacctttctcagccaagcgtctgcgctgatggagttcaaactcctccttattgccactctctttaactgtggcatcggatcgcgtccttgcgacagcaacttgcataggctttccgaagatctcgaagccttggagttcctctacggccggggcgacgctgtctgggctctcgaaaacgatgaaagcttggcccttcgctttgagattggtcttggcgacgatgtcgatgacgttgccgtactcggagaagattgtctcgagggttgacttgaggacctcgggctttacgcgctcttcgaggttccgcacgtagactctgggatggttacgcgggttagcaagctacttctacgtttacctggtattgagagtggcagattgtgggttcgggtatgtgtcggagtgcaatgacacatacgtggcgacgggcgcgttggcagccatcttgctctctgctttgggttgatgactttgggtggtgtcgcaggttggatgttatgagttgaagttgcgag

SEQ ID NO: 33951 - DNA, 735 bp, Muscodor strobelii
  misc_feature: SGI cDNA ID NO. 571721
  misc_feature: Encodes the peptide sequence at SEQ ID NO 33952
atggctgccaacgcgcccgtcgccacagtctacgtgcggaacctcgaagagcgcgtaaagcccgaggtcctcaagtcaaccctcgagacaatcttctccgagtacggcaacgtcatcgacatcgtcgccaagaccaatctcaaagcgaagggccaagctttcatcgttttcgagagcccagacagcgtcgccccggccgtagaggaactccaaggcttcgagatcttcggaaagcctatgcaagttgctgtcgcaaggacgcgatccgatgccacagttaaagagagtggcaataaggaggagtttgaactccatcagcgcagacgcttggctgagaaagataaacgcaaagctctagaagccgcaacagaatccaaacgtgcccgcccagccgccgacaccaaagcccccgcagccggcaaaccaggcgcacgcaccggtctcaagcccacgggcggcgcatccgccaacgccgtggtccccgacgaatacctaccgcccaacaagattctcttcgtccagaacctgcccgacgactttggtatcgacgacttgacgggattattcggacgcttcgagggcttcagagaagttcgtcttgtgccgggcagaaagggcatcgcgtttattgaatacgaggccgaggccggcgctattactgccaaggagaacacggcgggcatgagtgtgggcgagaataatgcttttatcaaggttacctatcagaggcagtag

SEQ ID NO: 33952 - protein, 244 aa, Muscodor strobelii
  misc_feature: SGI Peptide ID NO. 571721
  misc_feature (10)..(82): Pfam Id: PF00076 Pfam Desc: RNA recognition motif. (a.k.a. RRM, RBD, or RNP domain)
  misc_feature (171)..(237): Pfam Id: PF00076 Pfam Desc: RNA recognition motif. (a.k.a. RRM, RBD, or RNP domain)
  misc_feature (2)..(244): NCBI GI: 171690714 Blast Desc: protein product [Podospora anserina] gi|170945305|emb|CAP71417.1| protein product [Podospora anserina]
  misc_feature (1)..(244): NCBI GI: 116195978 Blast Desc: conserved [Chaetomium globosum CBS 148.51] gi|88180500|gb|EAQ87968.1| conserved [Chaetomium globosum CBS 148.51]
  misc_feature (2)..(244): NCBI GI: 85109011 Blast Desc: NCU08034 [Neurospora crassa OR74A] gi|28924315|gb|EAA33468.1| NCU08034 [Neurospora crassa OR74A] gi|39979161|emb|CAE85534.1| related to small nuclear snRNP U1A
  misc_feature (3)..(244): NCBI GI: 39971539 Blast Desc: MGG_07085 [Magnaporthe grisea 70-15] gi|145019551|gb|EDK03779.1| MGG_07085 [Magnaporthe grisea 70-15]
  misc_feature (1)..(244): NCBI GI: 256725549 Blast Desc: NECHADRAFT_100804 [Nectria haematococca mpVI 77-13-4]
  misc_feature (1)..(244): NCBI GI: 46116888 Blast Desc: FG04286.1 [Gibberella zeae PH-1]
  misc_feature (6)..(244): NCBI GI: 156049745 Blast Desc: SS1G_08579 [Sclerotinia sclerotiorum 1980] gi|154692978|gb|EDN92716.1| SS1G_08579 [Sclerotinia sclerotiorum 1980]
  misc_feature (6)..(244): NCBI GI: 119478950 Blast Desc: small nuclear ribonucleoprotein U)1a,U)2b [Neosartorya fischeri NRRL 181] gi|119407658|gb|EAW17607.1| small nuclear ribonucleoprotein U)1a,U)2b [Neosartorya fischeri NRRL 181]
  misc_feature (1)..(244): NCBI GI: 169779149 Blast Desc: [Aspergillus oryzae RIB40] gi|83772778|dbj|BAE62906.1| protein product [Aspergillus oryzae]
  misc_feature (2)..(244): NCBI GI: 212529314 Blast Desc: U1 small nuclear ribonucleoprotein, [Penicillium marneffei ATCC 18224] gi|210074212|gb|EEA28299.1| U1 small nuclear ribonucleoprotein, [Penicillium marneffei ATCC 18224]
MAANAPVATVYVRNLEERVKPEVLKSTLETIFSEYGNVIDIVAKTNLKAKGQAFIVFESPDSVAPAVEELQGFEIFGKPMQVAVARTRSDATVKESGNKEEFELHQRRRLAEKDKRKALEAATESKRARPAADTKAPAAGKPGARTGLKPTGGASANAVVPDEYLPPNKILFVQNLPDDFGIDDLTGLFGRFEGFREVRLVPGRKGIAFIEYEAEAGAITAKENTAGMSVGENNAFIKVTYQRQ

SEQ ID NO: 33953 - DNA, 2523 bp, Muscodor strobelii
  misc_feature: SGI EST ID NO. CUFF.80639.1
  misc_feature: Variant of the nucleotide sequence at SEQ ID NO 33951
aattctcgcaacttcaactcataacatccaacctgcgacaccacccaaagtcatcaacccaaagcagagagcaagatggctgccaacgcgcccgtcgccacagtctacgtgcggaacctcgaagagcgcgtaaagcccgaggtcctcaagtcaaccctcgagacaatcttctccgagtacggcaacgtcatcgacatcgtcgccaagaccaatctcaaagcgaagggccaagctttcatcgttttcgagagcccagacagcgtcgccccggccgtagaggaactccaaggcttcgagatcttcggaaagcctatgcaagttgctgtcgcaaggacgcgatccgatgccacagttaaagagagtggcaataaggaggagtttgaactccatcagcgcagacgcttggctgagaaagataaacgcaaagctctagaagccgcaacagaatccaaacgtgcccgcccagccgccgacaccaaagcccccgcagccggcaaaccaggcgcacgcaccggtctcaagcccacgggcggcgcatccgccaacgccgtggtccccgacgaatacctaccgcccaacaagattctcttcgtccagaacctgcccgacgactttggtatcgacgacttgacgggattattcggacgcttcgagggcttcagagaagttcgtcttgtgccgggcagaaagggcatcgcgtttattgaatacgaggccgaggccggcgctattactgccaaggagaacacggcgggcatgagtgtgggcgagaataatgcttttatcaaggttacctatcagaggcagtagatagatacagaagccaagggtggcttgtatcagggatggaagtagaaggatgggagcatttagagaagtaactccataccctagtcccttgttgcaaagttgcaacgtaaacgcgagcagaggcaacgccatttgagaggtgtagactaccgagatcgtaatatgatcctctcggtaatgcgcagtagttagagggtaactagtatactattgctagcatttgtacagctattgagtctcacagtgtgacatatctcgcatcttaagacattaataatggtatagggaatgatttgaatctcgtcatatatataaatgcattaattaaccatgatgcgccgcttagccctaacaatacacaatcatctcaagcctcccagcctgattctgctctctatctgttccaggggtctttcgaaacggtactatgattgacactcctagaatatcacgtcatcgtcctcacccgtggccagcatatcggcgggcgccgagtcgtccccgggctcgatgttctcctggcctgctttctcctcggcttgcctcttggctttcatctctgcgtcggctgcggccacgtctcgctgtttcttgccggcgactttcttgaggcggtagaactcttctctgtctaactcgtcgagttcggagttgatgtctgaggtttcgtcagctctgcagagttggaaatcagtgggcaaaggggaaaattacatttgatggtgttttctgtcctgggtatgatgacgtgctcgctgatttgccgttagttatctcccgacaggtttgaggaaagctgtcaagcatacatggcgttgactctccgattgacgaccttgatgacctcgtccaatattacaaaagccgtctgcagactggcgagctcaacaagggtctcgacggccctggcatatgtctctctacacctctggacctgctgtccaccctttccaagacccgttagaccgaagtcgttgttcccctctgtctgatagctctcgaaggcaggcaggaagacaccggacacattctcttgtttcgtgcgtaggcggaaccgcgctgatttggcagactcttggacctggtagccgatgtcaccgccgactgcatatgtgacttcggcaagggaaaatgcagcgatctgcatgacacggcccatctttcgcttggcttcgtcgattcggcgggtgatttctcggaaacgtctatcggagccgttagcttagctcttgttctggcccgagagtgatggcccgtacttggtgagagcttcgctcttgcgcttcagcagactgtgtcccgtctcggcgcccttgagcttggccttcatgatacccagcgactggcgcgtggggaagacagcttcccgatcctatcgatggcattatttagcatccaaggcacctccgacagagctatggagtggacataccccggcgcccgacatggtgagatcggtgcagctgttgccgtgatgtgaagtttttcggaggagagactatggagtggcccgaaatgagatacagcttgacaagaaacgaagatattcaaactaggtcgagtcgtgtgggatgccgctccagacagacctatcgtcggcctctgatggcaggggtcaagctgcccgccagggaatgacgaccctcgtacagtgtggaaatacagtgatttgttgtatgtagcactcctagtgttcggcaacttccctctttc

SEQ ID NO: 33954 - DNA, 1584 bp, Muscodor strobelii
  misc_feature: SGI cDNA ID NO. 571722
  misc_feature: Encodes the peptide sequence at SEQ ID NO 33955
atggcaacacaaccagcgacaacaaccatcgagctcaccccaaaggaggtgcaactcaaaaacctgcttcttgatgctgccaaatatgtcgacagctcgagggatgcctcagaagagcctgtcatcttacgatgggcgggcggttgggttcgagatagactcctgggcatagagtctcatgatattgacacggcaatcaatgtcatgactggtgaggctttcgccatgaagatttgcgagctatgtgagacccccgaggctattgagaagcactccatatccgactcggatattggcaacctccacaagattgccaagaatccagataagtcaaaacatctcgagaccacgacaataaaattgtttggttatgatgtcgattttgtcaatctacgcaaggagacctacacagatgatagtcgcaatccaacgatggaattcggcactgccgaagaggatgcactacgacgagacgcaacggtcaatgcattgttctacaacctgaacaccgacaaggttgaagatttcactactggcctcgaggatatgaaggcaaagctcattcggaccccaatggagcctttccagaccttcaccgacgatcctcttcgcgttctacgtctggttcgattcgccagtcgacttggcttcaccatcgattcatcagttaaggaggttatgggcaatgctcaggtgttaaaggcccttaagctgaaaattagccgtgaaagagttggtgtagagcttgagaagatgctgaaagggaatgacccaagaaaatctctggaatacatcaacgacttcggtctctaccatactatcttcacagatccgaccaagaaggacatgcaatcaccagagctaacagattggtctaaggcatatgaatgcctggagttcatgtctcagaacaccactccaggatccatctactcgacactagttcgaactgacgaagctcgatattacgcttgggtgttggccgccgtatctccttgggcctatgttacagaaactgaacagaagagcaacaagaattctaaacctcccccatctctcccaacccttgctgtgcgtgagggtatcagggccccgacgaagctgtgtgatctagtttcggctgcatacaaaaataggaaagacatcatgtctttaaagaacgctgttgtctcaaaagagccttatgtcagtcaacgcgatcgttttggcatggctattcggcattgggactcgagagttgggcattggagattgcaaatcatgtttgcactgcttgttgaggcgatgcagcggtggtcattggaacccgccagctccacaagcaacgaggaattcctcggcgaatggcagctgttcctagaccatctgcaggagctcgatgttatggaagccccctcgttgaagaaaatcattgacggtaaccaacttgcgaaggcacttggacttaaaccaggaaagtggatgacgaaggcgctggatgtatgtgttgagtggcagttgagaaatccggatgaaaccgatccggagggcgcagttagggaggttgataagaggagggaggagctcaacttgcctgaaaagtaa

SEQ ID NO: 33955 - protein, 527 aa, Muscodor strobelii
  misc_feature: SGI Peptide ID NO. 571722
  misc_feature (43)..(189): Pfam Id: PF01743 Pfam Desc: Poly A polymerase head domain
  misc_feature (102)..(189): Pfam Id: PF01743 Pfam Desc: Poly A polymerase head domain
  misc_feature (43)..(75): Pfam Id: PF01743 Pfam Desc: Poly A polymerase head domain
  misc_feature (6)..(524): NCBI GI: 256725551 Blast Desc: NECHADRAFT_94217 [Nectria haematococca mpVI 77-13-4]
  misc_feature (9)..(524): NCBI GI: 39979137 Blast Desc: related to tRNA nucleotidyltransferase [Neurospora crassa]
  misc_feature (9)..(524): NCBI GI: 164423663 Blast Desc: NCU08022 [Neurospora crassa OR74A] gi|157070187|gb|EAA33456.2| NCU08022 [Neurospora crassa OR74A]
  misc_feature (6)..(527): NCBI GI: 156049161 Blast Desc: SS1G_08287 [Sclerotinia sclerotiorum 1980] gi|154692686|gb|EDN92424.1| SS1G_08287 [Sclerotinia sclerotiorum 1980]
  misc_feature (6)..(527): NCBI GI: 154299760 Blast Desc: BC1G_11506 [Botryotinia fuckeliana B05.10] gi|150857196|gb|EDN32388.1| BC1G_11506 [Botryotinia fuckeliana B05.10]
  misc_feature (6)..(525): NCBI GI: 46116880 Blast Desc: FG04282.1 [Gibberella zeae PH-1]
  misc_feature (9)..(525): NCBI GI: 116195956 Blast Desc: CHGG_04576 [Chaetomium globosum CBS 148.51] gi|88180489|gb|EAQ87957.1| CHGG_04576 [Chaetomium globosum CBS 148.51]
  misc_feature (5)..(524): NCBI GI: 145612375 Blast Desc: MGG_07089 [Magnaporthe grisea 70-15] gi|145019556|gb|EDK03784.1| MGG_07089 [Magnaporthe grisea 70-15]
  misc_feature (6)..(524): NCBI GI: 171690554 Blast Desc: protein product [Podospora anserina] gi|170945225|emb|CAP71336.1| protein product [Podospora anserina]
  misc_feature (1)..(524): NCBI GI: 261359687 Blast Desc: tRNA nucleotidyltransferase [Verticillium albo-atrum VaMs.102]
  misc_feature (10)..(509): SWISSPROT Homolog: EC 2.7.7.25 tRNA adenylyltransferase
MATQPATTTIELTPKEVQLKNLLLDAAKYVDSSRDASEEPVILRWAGGWVRDRLLGIESHDIDTAINVMTGEAFAMKICELCETPEAIEKHSISDSDIGNLHKIAKNPDKSKHLETTTIKLFGYDVDFVNLRKETYTDDSRNPTMEFGTAEEDALRRDATVNALFYNLNTDKVEDFTTGLEDMKAKLIRTPMEPFQTFTDDPLRVLRLVRFASRLGFTIDSSVKEVMGNAQVLKALKLKISRERVGVELEKMLKGNDPRKSLEYINDFGLYHTIFTDPTKKDMQSPELTDWSKAYECLEFMSQNTTPGSIYSTLVRTDEARYYAWVLAAVSPWAYVTETEQKSNKNSKPPPSLPTLAVREGIRAPTKLCDLVSAAYKNRKDIMSLKNAVVSKEPYVSQRDRFGMAIRHWDSRVGHWRLQIMFALLVEAMQRWSLEPASSTSNEEFLGEWQLFLDHLQELDVMEAPSLKKIIDGNQLAKALGLKPGKWMTKALDVCVEWQLRNPDETDPEGAVREVDKRREELNLPEK

SEQ ID NO: 33956 - DNA, 4167 bp, Muscodor strobelii
  misc_feature: SGI EST ID NO. CUFF.80721.0
  misc_feature: Variant of the nucleotide sequence at SEQ ID NO 33954
aaagagttgactcacttcacttcgtgcaaactctcagtcgcatttgcaaaatattgacggtactcccctctgaatctctcacatcgctgcgaatctacttgacatgagactcactattgccagtttgcgtttgagtttgaagtcattatgatcacatgtcccttcgcctccgaccactccacgctctcaagtttattacacctaccttaacacgatcgccgagcttcgcattggtgtctcgtcacatatgttgtgttccgctaatggcaaagaggcgattgagtgaagtggaaggtctatcaaacgaacagcgtccatctcaaataaggaagatggcaacacaaccagcgacaacaaccatcgagctcaccccaaaggaggtgcaactcaaaaacctgcttcttgatgctgccaaatatgtcgacagctcgagggatgcctcagaagagcctgtcatcttacgatgggcgggcggttgggttcgagatagactcctgggcatagagtctcatgatattgacacggcaatcaatgtcatgactggtgaggctttcgccatgaagatttgcgagctatgtgagacccccgaggctattgagaagcactccatatccgactcggatattggcaacctccacaagattgccaagaatccagataagtcaaaacatctcgagaccacgacaataaaattgtttggttatgatgtcgattttgtcaatctacgcaaggagacctacacagatgatagtcgcaatccaacgatggaattcggcactgccgaagaggatgcactacgacgagacgcaacggtcaatgcattgttctacaacctgaacaccgacaaggttgaagatttcactactggcctcgaggatatgaaggcaaagctcattcggaccccaatggagcctttccagaccttcaccgacgatcctcttcgcgttctacgtctggttcgattcgccagtcgacttggcttcaccatcgattcatcagttaaggaggttatgggcaatgctcaggtgttaaaggcccttaagctgaaaattagccgtgaaagagttggtgtagagcttgagaagatgctgaaagggaatgacccaagaaaatctctggaatacatcaacgacttcggtctctaccatactatcttcacagatccgaccaagaaggacatgcaatcaccagagctaacagattggtctaaggcatatgaatgcctggagttcatgtctcagaacaccactccaggatccatctactcgacactagttcgaactgacgaagctcgatattacgcttgggtgttggccgccgtatctccttgggcctatgttacagaaactgaacagaagagcaacaagaattctaaacctcccccatctctcccaacccttgctgtgcgtgagggtatcagggccccgacgaagctgtgtgatctagtttcggctgcatacaaaaataggaaagacatcatgtctttaaagaacgctgttgtctcaaaagagccttatgtcagtcaacgcgatcgttttggcatggctattcggcattgggactcgagagttgggcattggagattgcaaatcatgtttgcactgcttgttgaggcgatgcagcggtggtcattggaacccgccagctccacaagcaacgaggaattcctcggcgaatggcagctgttcctagaccatctgcaggagctcgatgttatggaagccccctcgttgaagaaaatcattgacggtaaccaacttgcgaaggcacttggacttaaaccaggaaagtggatgacgaaggcgctggatgtatgtgttgagtggcagttgagaaatccggatgaaaccgatccggagggcgcagttagggaggttgataagaggagggaggagctcaacttgcctgaaaagtaagagtccatgaaaaggtaaaattaagagacaagctgcatgtgcacaatggttagcatatgggtctgagttgtttcgtatcatgacattgtataagttcgaccccatgaacgcaacgcaagccttgcatggtcagaggctcgagaggcaaccaagcaccgacatgcgccactcgtgttttctcaaaggtggatacgtcagcggtgatagaaacaattcagagccagtcggagcacaaaaagcttggcgatcgtcgacggggatgatactcgcagtttcatcattgagaacaacaattcgaagatgactttgtctggggccgcactcaggcgcacaatagccagtccgcagccagaagtgcagtggccgtttcaaagattgcgacgtcttgtccaatcattgggtgcgacgcaaaactgtcagccaatcaggacgatcccccaacgacccctgtttccagaccgagccaccaaggacaaagggaactggcaactaacaaacctctatgtgcagacaaggaaaggggaaacaattcgttatgcatcataaagcttattctttctatggggcaaaatctgccaacccaatcaattagtcactttgactgtcctttgtataagctatgcgttagactgacaagatgtaagactaatataagagggcttggcctcacaggtcaagaacctcttctagtcctcatcatctacaacacaagctgtcgactaataaccatagaatttcttttctgagtctggtactcttttcatttatctttactacgaaaagttttagcaaaagataccctttcctatttccattaacaacttagatcccttctcgccaaaatgccttcccgatcacagaccgccgcagccgccgccttgatggcattcgcaacaggcgtgaacagccacatgataatggcttcacccgcgcccttcggcctcaataagggtctcactagctctcctcttaccagctcacaatttccttgccaagtgtcttccgaccaagcgagcttctacagcaaggacggcgttgatatgtccaagaacacgatggcggtcggcgaaacgcaacaactctcatttaccggctctgctgtccacggtggcggtagctgtcagcttgctatcacaaccgacaagcaaccatctgcatccacttcgtggcaggttatccagagtattgaaggtggttgcccgtcgaaagatggcagtggccccagtacatatgactaccaaattcccgatggtgttgcgccgggcgactacgtgtttgcatggacttggattagtaagctttcgggcgtacaagaatattacatgaactgcgcaccaattacagtcactggcggtagttcgaagcgcagcttcgaaacagttacatctgatgagttgctcggaagagcaaccttcagcggtcctgaactcatggttgcaaatcttgccgatatcaactcgtgcaagtcaacactgagctccgaccctacatacccgaaccctggcgacaacgtcgtcaagcctaattccaacgcttctttcaagccgatcagcggtaccgactgtgtacccaagggcttgaaggattccaccggttcgagctctggcggtgatcagagcacacccagttcaagcgctgccgcatctggctcgtcttctgcggctgctacatcatctactgctgcaagttcgactgcttctggattcatcaccaccaccactagtgcttcgtccatgtcctctgctgcacctacgtcctccgctgctgtttcatcctcctctgctcccgcgcaaacttccagcatgatgccatcttccgtctccagcgctcccgctagttcgtctagcggtcctgctaccggatctgggtctaacaccaccggtctcactggatcgtgcgacaacgagggtatgtttaactgcatcggtggaaccgagtaccagcagtgcgcttctgggtcttggagcacggtcatgcagatgcctgctactactaagtgccaagagggccagaccatgactctatgggcgaagaggaacttgaacttgcgcgagggtgcgatgcatgctcgtcgtgggttgtattagaagatagtagatgagattgtatatagaaaaggagtcgaagagaggtgaacgagattggctggtctggtcttgctgtatatagaacttaaaaatcgaaatgattttcttcatattgatttatagatagtgtgtctttccttgttcaaaatgcgtccgcatccgtc

SEQ ID NO: 33957 - DNA, 1245 bp, Muscodor strobelii
  misc_feature: SGI cDNA ID NO. 571723
  misc_feature: Elevated expression when VOC is produced
  misc_feature: Encodes the peptide sequence at SEQ ID NO 33958
atgccttcccgatcacagaccgccgcagccgccgccttgatggcattcgcaacaggcgtgaacagccacatgataatggcttcacccgcgcccttcggcctcaataagggtctcactagctctcctcttaccagctcacaatttccttgccaagtgtcttccgaccaagcgagcttctacagcaaggacggcgttgatatgtccaagaacacgatggcggtcggcgaaacgcaacaactctcatttaccggctctgctgtccacggtggcggtagctgtcagcttgctatcacaaccgacaagcaaccatctgcatccacttcgtggcaggttatccagagtattgaaggtggttgcccgtcgaaagatggcagtggccccagtacatatgactaccaaattcccgatggtgttgcgccgggcgactacgtgtttgcatggacttggattagtaagctttcgggcgtacaagaatattacatgaactgcgcaccaattacagtcactggcggtagttcgaagcgcagcttcgaaacagttacatctgatgagttgctcggaagagcaaccttcagcggtcctgaactcatggttgcaaatcttgccgatatcaactcgtgcaagtcaacactgagctccgaccctacatacccgaaccctggcgacaacgtcgtcaagcctaattccaacgcttctttcaagccgatcagcggtaccgactgtgtacccaagggcttgaaggattccaccggttcgagctctggcggtgatcagagcacacccagttcaagcgctgccgcatctggctcgtcttctgcggctgctacatcatctactgctgcaagttcgactgcttctggattcatcaccaccaccactagtgcttcgtccatgtcctctgctgcacctacgtcctccgctgctgtttcatcctcctctgctcccgcgcaaacttccagcatgatgccatcttccgtctccagcgctcccgctagttcgtctagcggtcctgctaccggatctgggtctaacaccaccggtctcactggatcgtgcgacaacgagggtatgtttaactgcatcggtggaaccgagtaccagcagtgcgcttctgggtcttggagcacggtcatgcagatgcctgctactactaagtgccaagagggccagaccatgactctatgggcgaagaggaacttgaacttgcgcgagggtgcgatgcatgctcgtcgtgggttgtattag

SEQ ID NO: 33958 - protein, 414 aa, Muscodor strobelii
  misc_feature: SGI Peptide ID NO. 571723
  misc_feature (20)..(412): NCBI GI: 225557038 Blast Desc: conserved [Ajellomyces capsulatus G186AR]
  misc_feature (17)..(411): NCBI GI: 212535048 Blast Desc: conserved [Penicillium marneffei ATCC 18224] gi|210070079|gb|EEA24169.1| conserved [Penicillium marneffei ATCC 18224]
  misc_feature (20)..(412): NCBI GI: 226294223 Blast Desc: conserved [Paracoccidioides brasiliensis Pb18]
  misc_feature (20)..(412): NCBI GI: 154285260 Blast Desc: [Ajellomyces capsulatus NAm1] gi|150407066|gb|EDN02607.1| [Ajellomyces capsulatus NAm1]
  misc_feature (24)..(412): NCBI GI: 225684916 Blast Desc: conserved [Paracoccidioides brasiliensis Pb03]
  misc_feature (6)..(413): NCBI GI: 242791913 Blast Desc: conserved [Talaromyces stipitatus ATCC 10500] gi|218718439|gb|EED17859.1| conserved [Talaromyces stipitatus ATCC 10500]
  misc_feature (9)..(413): NCBI GI: 154292873 Blast Desc: BC1G_14469 [Botryotinia fuckeliana B05.10] gi|150845746|gb|EDN20939.1| BC1G_14469 [Botryotinia fuckeliana B05.10]
  misc_feature (5)..(390): NCBI GI: 119498947 Blast Desc: NFIA_039100 [Neosartorya fischeri NRRL 181] gi|119414395|gb|EAW24334.1| conserved [Neosartorya fischeri NRRL 181]
  misc_feature (3)..(412): NCBI GI: 238839408 Blast Desc: conserved [Microsporum canis CBS 113480]
  misc_feature (20)..(411): NCBI GI: 238503077 Blast Desc: conserved [Aspergillus flavus NRRL3357] gi|220691582|gb|EED47930.1| conserved [Aspergillus flavus NRRL3357]
  misc_feature: Useful for introducing or modulating the production of volatile compounds
MPSRSQTAAAAALMAFATGVNSHMIMASPAPFGLNKGLTSSPLTSSQFPCQVSSDQASFYSKDGVDMSKNTMAVGETQQLSFTGSAVHGGGSCQLAITTDKQPSASTSWQVIQSIEGGCPSKDGSGPSTYDYQIPDGVAPGDYVFAWTWISKLSGVQEYYMNCAPITVTGGSSKRSFETVTSDELLGRATFSGPELMVANLADINSCKSTLSSDPTYPNPGDNVVKPNSNASFKPISGTDCVPKGLKDSTGSSSGGDQSTPSSSAAASGSSSAAATSSTAASSTASGFITTTTSASSMSSAAPTSSAAVSSSSAPAQTSSMMPSSVSSAPASSSSGPATGSGSNTTGLTGSCDNEGMFNCIGGTEYQQCASGSWSTVMQMPATTKCQEGQTMTLWAKRNLNLREGAMHARRGLY

SEQ ID NO: 33959 - DNA, 4167 bp, Muscodor strobelii; identical to SEQ ID NO: 33956
  misc_feature: SGI EST ID NO. CUFF.80721.0
  misc_feature: Variant of the nucleotide sequence at SEQ ID NO 33957

SEQ ID NO: 33960 - DNA, 354 bp, Muscodor strobelii
  misc_feature: SGI cDNA ID NO. 571724
  misc_feature: Elevated expression when VOC is produced
  misc_feature: Encodes the peptide sequence at SEQ ID NO 33961
atgtcctctgctgcacctacgtcctccgctgctgtttcatcctcctctgctcccgcgcaaacttccagcatgatgccatcttccgtctccagcgctcccgctagttcgtctagcggtcctgctaccggatctgggtctaacaccaccggtctcactggatcgtgcgacaacgagggtatgtttaactgcatcggtggaaccgagtaccagcagtgcgcttctgggtcttggagcacggtcatgcagatgcctgctactactaagtgccaagagggccagaccatgactctatgggcgaagaggaacttgaacttgcgcgagggtgcgatgcatgctcgtcgtgggttgtattag

SEQ ID NO: 33961 - protein, 117 aa, Muscodor strobelii
  misc_feature: SGI Peptide ID NO. 571724
  misc_feature (26)..(116): NCBI GI: 154292873 Blast Desc: BC1G_14469 [Botryotinia fuckeliana B05.10] gi|150845746|gb|EDN20939.1| BC1G_14469 [Botryotinia fuckeliana B05.10]
  misc_feature (51)..(116): NCBI GI: 156063792 Blast Desc: SS1G_02014 [Sclerotinia sclerotiorum 1980] gi|154697348|gb|EDN97086.1| SS1G_02014 [Sclerotinia sclerotiorum 1980]
  misc_feature (29)..(116): NCBI GI: 242791913 Blast Desc: conserved [Talaromyces stipitatus ATCC 10500] gi|218718439|gb|EED17859.1| conserved [Talaromyces stipitatus ATCC 10500]
  misc_feature (18)..(114): NCBI GI: 212535048 Blast Desc: conserved [Penicillium marneffei ATCC 18224] gi|210070079|gb|EEA24169.1| conserved [Penicillium marneffei ATCC 18224]
  misc_feature (49)..(115): NCBI GI: 225557038 Blast Desc: conserved [Ajellomyces capsulatus G186AR]
  misc_feature (7)..(111): NCBI GI: 85110504 Blast Desc: NCU05404 [Neurospora crassa OR74A] gi|9367560|emb|CAB97468.1| related to spore coat protein SP96 precursor [Neurospora crassa] gi|28925174|gb|EAA34256.1| crassa
  misc_feature (5)..(106): NCBI GI: 261355578 Blast Desc: conserved [Verticillium albo-atrum VaMs.102]
  misc_feature (51)..(114): NCBI GI: 169776393 Blast Desc: [Aspergillus oryzae RIB40] gi|83771398|dbj|BAE61530.1| protein product [Aspergillus oryzae]
  misc_feature (51)..(114): NCBI GI: 238503077 Blast Desc: conserved [Aspergillus flavus NRRL3357] gi|220691582|gb|EED47930.1| conserved [Aspergillus flavus NRRL3357]
  misc_feature (54)..(115): NCBI GI: 154285260 Blast Desc: [Ajellomyces capsulatus NAm1] gi|150407066|gb|EDN02607.1| [Ajellomyces capsulatus NAm1]
  misc_feature: Useful for introducing or modulating the production of volatile compounds
MSSAAPTSSAAVSSSSAPAQTSSMMPSSVSSAPASSSSGPATGSGSNTTGLTGSCDNEGMFNCIGGTEYQQCASGSWSTVMQMPATTKCQEGQTMTLWAKRNLNLREGAMHARRGLY

SEQ ID NO: 33962 - DNA, 4167 bp, Muscodor strobelii; identical to SEQ ID NO: 33956
  misc_feature: SGI EST ID NO. CUFF.80721.0
  misc_feature: Variant of the nucleotide sequence at SEQ ID NO 33960

SEQ ID NO: 33963 - DNA, 783 bp, Muscodor strobelii
  misc_feature: SGI cDNA ID NO. 571725
  misc_feature: Elevated expression when VOC is produced
  misc_feature: Encodes the peptide sequence at SEQ ID NO 33964
atgacttcgaacaaggttgtgttatgcactggtgcgaatcaggggcttggatactatgtgttgcaagttgctggtctacgataccccgagtacacatttattctcggaagtcgtaacctcgaaaaggggaaagaggcagcgaagactttgaaagaggttggcgtcaaagcagagatcgatgtcgttcagttggatgtgttgaacgatgaagacattagtgcggcggtcgcttatgtcaaggagaaatatggcaagttggatgttctggtgaacaatgccggtatcctcggtcgcaaaccgggcagggaaaacttagcagagatccgagcagcatacaacgagctcctctccacgaacttgacatcggtagcagttgtgacggaagccttcactgaactcttatacaaatcccaagacccaaaagtcatcagtgtatcttcaggactcggcagcatgcacaacgcgctcacgaagaagatgggtcgctacccgccttatggatgcagcaagatcggacttaatggcttgatggtgcatttccaggttgcggaaaatgaccggattaaagctggaggagaagacgctgaaaagccgaagattaggtattttgtttgtcagcctggagctctacatacgaatttctcgaattatcaccctggactgaggatgccggataggggcgcggaggttattgtgagattggtggctgatgatgagaagctgtatgagggaggctcgtattgggagtatgaggatggtgagatgaaacaggttccttggtag

SEQ ID NO: 33964 - protein, 260 aa, Muscodor strobelii
  misc_feature: SGI Peptide ID NO. 571725
  misc_feature (5)..(185): Pfam Id: PF00106 Pfam Desc: short chain dehydrogenase
  misc_feature (5)..(96): Pfam Id: PF00106 Pfam Desc: short chain dehydrogenase
  misc_feature (2)..(260): NCBI GI: 70990000 Blast Desc: short chain dehydrogenase/reductase family protein [Aspergillus fumigatus Af293] gi|66847481|gb|EAL87811.1| short chain dehydrogenase/reductase family protein [Aspergillus Af293]
  misc_feature (3)..(260): NCBI GI: 169619672 Blast Desc: SNOG_13034 [Phaeosphaeria nodorum SN15] gi|111058241|gb|EAT79361.1| SNOG_13034 [Phaeosphaeria nodorum SN15]
  misc_feature (7)..(260): NCBI GI: 256722740 Blast Desc: NECHADRAFT_87211 [Nectria haematococca mpVI 77-13-4]
  misc_feature (1)..(235): NCBI GI: 242784909 Blast Desc: short chain dehydrogenase/reductase, [Talaromyces stipitatus ATCC 10500] gi|218720633|gb|EED20052.1| short chain dehydrogenase/reductase, [Talaromyces stipitatus ATCC 10500]
  misc_feature (3)..(240): NCBI GI: 212527564 Blast Desc: short chain dehydrogenase family protein, [Penicillium marneffei ATCC 18224] gi|210073337|gb|EEA27424.1| short chain dehydrogenase family protein, [Penicillium marneffei ATCC 18224]
  misc_feature (6)..(260): NCBI GI: 171696136 Blast Desc: protein product [Podospora anserina] gi|170948310|emb|CAP60474.1| protein product [Podospora anserina]
  misc_feature (6)..(235): NCBI GI: 212527872 Blast Desc: carbonyl reductase, [Penicillium marneffei ATCC 18224] gi|210073491|gb|EEA27578.1| carbonyl reductase, [Penicillium marneffei ATCC 18224]
  misc_feature (6)..(240): NCBI GI: 242784105 Blast Desc: short chain dehydrogenase family protein, [Talaromyces stipitatus ATCC 10500] gi|218720467|gb|EED19886.1| short chain dehydrogenase family protein, [Talaromyces stipitatus ATCC 10500]
  misc_feature (1)..(234): NCBI GI: 212534432 Blast Desc: carbonyl reductase, [Penicillium marneffei ATCC 18224] gi|210069771|gb|EEA23861.1| carbonyl reductase, [Penicillium marneffei ATCC 18224]
  misc_feature (5)..(228): NCBI GI: 46115898 Blast Desc: FG03791.1 [Gibberella zeae PH-1]
  misc_feature (8)..(158): SWISSPROT Homolog: EC 1.1.1.208 (+)-neomenthol dehydrogenase
  misc_feature: Useful for introducing or modulating the production of volatile compounds
MTSNKVVLCTGANQGLGYYVLQVAGLRYPEYTFILGSRNLEKGKEAAKTLKEVGVKAEIDVVQLDVLNDEDISAAVAYVKEKYGKLDVLVNNAGILGRKPGRENLAEIRAAYNELLSTNLTSVAVVTEAFTELLYKSQDPKVISVSSGLGSMHNALTKKMGRYPPYGCSKIGLNGLMVHFQVAENDRIKAGGEDAEKPKIRYFVCQPGALHTNFSNYHPGLRMPDRGAEVIVRLVADDEKLYEGGSYWEYEDGEMKQVPW

SEQ ID NO: 33965 - DNA, 1002 bp, Muscodor strobelii
  misc_feature: SGI EST ID NO. CUFF.80362.0
  misc_feature: Variant of the nucleotide sequence at SEQ ID NO 33963
ctttcggcttgtatactttttccatctggtagcaatcactatatctcatcacgatgacttcgaacaaggttgtgttatgcactggtgcgaatcaggggcttggatactatgtgttgcaagttgctggtctacgataccccgagtacacatttattctcggaagtcgtaacctcgaaaaggggaaagaggcagcgaagactttgaaagaggttggcgtcaaagcagagatcgatgtcgttcagttggatgtgttgaacgatgaagacattagtgcggcggtcgcttatgtcaaggagaaatatggcaagttggatgttctggtgaacaatgccggtatcctcggtcgcaaaccgggcagggaaaacttagcagagatccgagcagcatacaacgagctcctctccacgaacttgacatcggtagcagttgtgacggaagccttcactgaactcttatacaaatcccaagacccaaaagtcatcagtgtatcttcaggactcggcagcatgcacaacgcgctcacgaagaagatgggtcgctacccgccttatggatgcagcaagatcggacttaatggcttgatggtgcatttccaggttgcggaaaatgaccggattaaagctggaggagaagacgctgaaaagccgaagattaggtattttgtttgtcagcctggagctctacatacgaatttctcgaattatcaccctggactgaggatgccggataggggcgcggaggttattgtgagattggtggctgatgatgagaagctgtatgagggaggctcgtattgggagtatgaggatggtgagatgaaacaggttccttggtagtagacaaaggtcgggacttgttggtaactagtcgtttgccgttggaatgaggccttggaaatggtgtgacgatactgagaagctcgtgagaaatcttctttcataattcatacagtaagtagtaacaatatcttagatgaaatgtcttcttttgttctgactcttg

SEQ ID NO: 33966 - DNA, 1431 bp, Muscodor strobelii
  misc_feature: SGI cDNA ID NO. 571726
  misc_feature: Reduced expression when VOC is produced
  misc_feature: Encodes the peptide sequence at SEQ ID NO 33967
atgagtcgaactgagagcatttcactacatgaactgcctgtaccaccgtccggtggtgatggccaggagctgggcggggatctcgacaccgcatctggaaccggtgaggcccggcaagacgcatggaagaagagagcgttggtgttactcggcgcctcaatttcgcaactaccaatatggggattctcgatgtcctacggcgtgttccaggaatactatatgactcattggactttggacggcagcagctccgtaacaggtatcattggcacgacctcgaatggcgttctgtacctgtcaatgcccgttctatttgcaatttttactcgtcggtgggccaagtatcgacagatcgccggagtggtcggagcattgctagcgagcctaagtttcatcatctcgagcttcagcacgtcggtctctcacctggtagcaacgcaaggtgttctatccgcgcttggctgcgcactcgtctacagttctacgacgctctcacttggagaatggttcagttccgacgcaggcaacggcaagaattcacgcgctgttgcctacggcgtgacattatcttgcaagaatattgtcggatctaccatgccgttcctagcacgtgctctgctttcggcatatgggtttcgtgttgcgctgcgagtttgggctgcattactactaggcacagcactactatccatctttctgatacctactcaccactccagcctggccatttcatcagaaggttcagcacatgaggaagctcgccgaaatcgaaaaattccctgggattttctacgccatcgtacattctacatctgctctatcgccatcattctccaatcagctggctacgggctccctcaatcatatttgcctacatacgccagtgaggtagctcgattaccccagacatctgctacactactcttgacagtattcaacgtccccggtatcatcgcatcattttcgttcggctacctcagtgataataggcacttttcgatatctgcaaccacaattgccgccatctctgcgctttgttcgtctcttgcaacgtttctcttttggggtcttacatcgcaagggagtcttgccttgctattgcttttttcaagcacgtacggcttcttcgcggggggctatagtgcgacttggggcggatggattaacgagcttgagagcgaagccgcacgttggaacgaagcaatagatcctggtatggtatacgggctcatgaacggtgcgagaggcattggctacgttagtggtggacttgtgagcgtcccacttttaaaggcaggattggggaatcgcatcggtgcacttggatattcctccgcatatgggccgctgattgtgttcaccggtctttcgacgatccttggtggatggggcgttgtttggaaggcgatgcatcggctccgcgggatatga

SEQ ID NO: 33967 - protein, 476 aa, Muscodor strobelii
  misc_feature: SGI Peptide ID NO. 571726
  misc_feature (48)..(423): Pfam Id: PF07690 Pfam Desc: Major Facilitator Superfamily
  misc_feature (27)..(468): NCBI GI: 242774799 Blast Desc: monocarboxylate transporter, [Talaromyces stipitatus ATCC 10500] gi|218722133|gb|EED21551.1| monocarboxylate transporter, [Talaromyces stipitatus ATCC 10500]
  misc_feature (16)..(474): NCBI GI: 169605583 Blast Desc: SNOG_05815 [Phaeosphaeria nodorum SN15] gi|160706796|gb|EAT86879.2| SNOG_05815 [Phaeosphaeria nodorum SN15]
  misc_feature (28)..(468): NCBI GI: 154322665 Blast Desc: BC1G_00675 [Botryotinia fuckeliana B05.10] gi|150848009|gb|EDN23202.1| BC1G_00675 [Botryotinia fuckeliana B05.10]
  misc_feature (1)..(433): NCBI GI: 67524267 Blast Desc: AN2591.2 [Aspergillus nidulans FGSC A4] gi|40745540|gb|EAA64696.1| AN2591.2 [Aspergillus nidulans FGSC A4] gi|259488028|tpe|CBF87159.1| TPA: MFS monocarboxylate FGSC
  misc_feature (1)..(470): NCBI GI: 121715604 Blast Desc: MFS monocarboxylate transporter, [Aspergillus clavatus NRRL 1] gi|119403568|gb|EAW13985.1| MFS monocarboxylate transporter, [Aspergillus clavatus NRRL 1]
  misc_feature (39)..(470): NCBI GI: 169774999 Blast Desc: [Aspergillus oryzae RIB40] gi|83769830|dbj|BAE59965.1| protein product [Aspergillus oryzae]
  misc_feature (40)..(468): NCBI GI: 255939031 Blast Desc: Pc15g00580 [Penicillium chrysogenum Wisconsin 54-1255] gi|211584907|emb|CAP82944.1| Pc15g00580 [Penicillium chrysogenum Wisconsin 54-1255]
  misc_feature (40)..(476): NCBI GI: 46115246 Blast Desc: FG03465.1 [Gibberella zeae PH-1]
  misc_feature (5)..(467): NCBI GI: 159125684 Blast Desc: MFS monocarboxylate transporter, [Aspergillus fumigatus A1163]
  misc_feature (5)..(467): NCBI GI: 146323923 Blast Desc: MFS monocarboxylate transporter [Aspergillus fumigatus Af293] gi|129557468|gb|EAL89368.2| MFS monocarboxylate transporter, [Aspergillus fumigatus Af293]
  misc_feature: Useful for introducing or modulating the production of volatile compounds
MSRTESISLHELPVPPSGGDGQELGGDLDTASGTGEARQDAWKKRALVLLGASISQLPIWGFSMSYGVFQEYYMTHWTLDGSSSVTGIIGTTSNGVLYLSMPVLFAIFTRRWAKYRQIAGVVGALLASLSFIISSFSTSVSHLVATQGVLSALGCALVYSSTTLSLGEWFSSDAGNGKNSRAVAYGVTLSCKNIVGSTMPFLARALLSAYGFRVALRVWAALLLGTALLSIFLIPTHHSSLAISSEGSAHEEARRNRKIPWDFLRHRTFYICSIAIILQSAGYGLPQSYLPTYASEVARLPQTSATLLLTVFNVPGIIASFSFGYLSDNRHFSISATTIAAISALCSSLATFLFWGLTSQGSLALLLLFSSTYGFFAGGYSATWGGWINELESEAARWNEAIDPGMVYGLMNGARGIGYVSGGLVSVPLLKAGLGNRIGALGYSSAYGPLIVFTGLSTILGGWGVVWKAMHRLRGI

SEQ ID NO: 33968 - DNA, 1696 bp, Muscodor strobelii
  misc_feature: SGI EST ID NO. CUFF.80436.1
  misc_feature: Variant of the nucleotide sequence at SEQ ID NO 33966
gttcgatctcgaaccacgcgaaataaataaactgaataaatatgagtcgaactgagagcatttcactacatgaactgcctgtaccaccgtccggtggtgatggccaggagctgggcggggatctcgacaccgcatctggaaccggtgaggcccggcaagacgcatggaagaagagagcgttggtgttactcggcgcctcaatttcgcaactaccaatatggggattctcgatgtcctacggcgtgttccaggaatactatatgactcattggactttggacggcagcagctccgtaacaggtatcattggcacgacctcgaatggcgttctgtacctgtcaatgcccgttctatttgcaatttttactcgtcggtgggccaagtatcgacagatcgccggagtggtcggagcattgctagcgagcctaagtttcatcatctcgagcttcagcacgtcggtctctcacctggtagcaacgcaaggtgttctatccgcgcttggctgcgcactcgtctacagttctacgacgctctcacttggagaatggttcagttccgacgcaggcaacggcaagaattcacgcgctgttgcctacggcgtgacattatcttgcaagaatattgtcggatctaccatgccgttcctagcacgtgctctgctttcggcatatgggtttcgtgttgcgctgcgagtttgggctgcattactactaggcacagcactactatccatctttctgatacctactcaccactccagcctggccatttcatcagaaggttcagcacatgaggaagctcgccgaaatcgaaaaattccctgggattttctacgccatcgtacattctacatctgctctatcgccatcattctccaatcagctggctacgggctccctcaatcatatttgcctacatacgccagtgaggtagctcgattaccccagacatctgctacactactcttgacagtattcaacgtccccggtatcatcgcatcattttcgttcggctacctcagtgataataggcacttttcgatatctgcaaccacaattgccgccatctctgcgctttgttcgtctcttgcaacgtttctcttttggggtcttacatcgcaagggagtcttgccttgctattgcttttttcaagcacgtacggcttcttcgcggggggctatagtgcgacttggggcggatggattaacgagcttgagagcgaagccgcacgttggaacgaagcaatagatcctggtatggtatacgggctcatgaacggtgcgagaggcattggctacgttagtggtggacttgtgagcgtcccacttttaaaggcaggattggggaatcgcatcggtgcacttggatattcctccgcatatgggccgctgattgtgttcaccggtctttcgacgatccttggtggatggggcgttgtttggaaggcgatgcatcggctccgcgggatatgaccaactgcataatgagagttacatgtacaatatgtgaaaattggcaagaggatatgaaaagtgtattaggcgtgctgagggcagtggtaggctagtacgtagtctcacgtacttctataatccatgtatcttgtcttgtcgaggtaatctacatatcatcgccatcatcatcatcctctgcagctctctgctccatcttcatttgctgcagttgcttggaaatg

SEQ ID NO: 33969 - DNA, 1908 bp, Muscodor strobelii
  misc_feature: SGI cDNA ID NO. 571727
  misc_feature: Encodes the peptide sequence at SEQ ID NO 33970
atgttgatgaaagtggttattttcgctctgatcgtccttgcagttttgtatgcaagcttcagaactcgtgaacatcacacaaagacaacggggggcttataccggaagaaagcaactgaatatcaatgggaagcctttcctaagttcaatggattttacaacggcgttcgcactcttgttccttacgaagactggatacctgaacaggaactgtcacacaagataaacgtctcaatccataatctatcaacgtttacacccgaggctgttaacccctatcccaagtacaactctaccgagtacttgaagaactttcacccagtgcgggattgctacctcgatgaaggcgagactcaattagcaccagatatctatgcctaccccgggatacctatgggtatgccagccccgtatctaggagcacatgcgttattcagtattgcgccagacaaatgctacgagcgctttggccgtttcggtccctatggctatagctacagtcgcgacgatggcggccttgggttatcagatcattcagctcctgtcggtgcagataaggtgcatactatgctcgacaacatcgactatcgacatgtgagctggggcgctgcgcaaagaaggtgttttgaaaagaatagggcaagatttcaaccgcaagaagatgttgccaaatctcggacaacattaaatcggacagcggttgttcttcgtacttggacggggtacgagtacacagatgcgcaactcctcactctgagagccatggtcagcgaactctcattaaaatcaggtggcgagtacgatgtgcacctgctcgtccatgttaaagatgacgcccttccaatctgggccgacgacgcaacttataagagggtagtcagagagaatgtaccggaggaatttcgggagatagcaactctctggtctgagcagcagatgcgaacttactaccctggcccgtttcttgacgaggatgacacggaaaatgtcatgggcttggagatgcacagcgtctggcggagtggacattttgctttacaatggtttgctcagcaacatcctgaatatgacttattttggaattgggagatggacgtccgttacacgggtcattattatgaactccttgaaggcgtttcgaagtgggcaactgcgcaacctcgaaagctcatgtgggagcgaagctcagagcattacagcacctggtctgcgttctctgatatcgttgaagagcgaacaaaggaaaacagaatcacacccgtctggggaccacaagaatttccgactggaaagtatactatgcttcccccgcccgaagcagtgaaacctcccacttccttcaaggaagaccgatacgaatggggagtcaacgagacttgcgacttgatcacgtttgatccaattttggacacgagcgccacggattggttgtttcggaatgatattttcgggtacgatacgtcgatcgaactcccgccgcgacgtaacactgctacgactattgcgcgaatctcaaagcgattgctgaacacgatgcacgaggaaacgtggcgtatgcaccacaccatggtctctgagatgtggccagctactatagccctacatcacggatacaaagctctgtatgcacctcatccaatttacttcgacagaaaatggccactagacgtcatggacgagaccctcaactatccccaaagctcccacgataactcccttagctggggtgataacaacatgtggggaagctctttccattacaacgcgaagttcagcagtgttctttggcgtcgttggctcggtgcgatggaacctagtattggagggcacaaagaggaagacaacaatacaggtcgcatgtgtcttccgcctatgctacttcaccctgtcaagcacgacggtatttga

SEQ ID NO: 33970 - protein, 635 aa, Muscodor strobelii
  misc_feature: SGI Peptide ID NO. 571727
  misc_feature (1)..(633): NCBI GI: 169595692 Blast Desc: SNOG_00590 [Phaeosphaeria nodorum SN15] gi|111070965|gb|EAT92085.1| SNOG_00590 [Phaeosphaeria nodorum SN15]
  misc_feature (41)..(631): NCBI GI: 115491641 Blast Desc: conserved [Aspergillus terreus NIH2624] gi|114197308|gb|EAU39008.1| conserved [Aspergillus terreus NIH2624]
  misc_feature (1)..(631): NCBI GI: 145605778 Blast Desc: MGG_11809 [Magnaporthe grisea 70-15] gi|145013567|gb|EDJ98208.1| MGG_11809 [Magnaporthe grisea 70-15]
  misc_feature (27)..(631): NCBI GI: 145239683 Blast Desc: An08g03710 [Aspergillus niger] gi|134076999|emb|CAK45408.1| protein product [Aspergillus niger]
  misc_feature (43)..(631): NCBI GI: 171693793 Blast Desc: protein product [Podospora anserina] gi|170946845|emb|CAP73649.1| protein product [Podospora anserina]
  misc_feature (5)..(632): NCBI GI: 189195776 Blast Desc: conserved [Pyrenophora tritici-repentis Pt-1C-BFP] gi|187980105|gb|EDU46731.1| conserved [Pyrenophora tritici-repentis Pt-1C-BFP]
  misc_feature (3)..(631): NCBI GI: 255936975 Blast Desc: Pc13g10940 [Penicillium chrysogenum Wisconsin 54-1255] gi|211584134|emb|CAP92163.1| Pc13g10940 [Penicillium chrysogenum Wisconsin 54-1255]
  misc_feature (42)..(631): NCBI GI: 119495629 Blast Desc: NFIA_013880 [Neosartorya fischeri NRRL 181] gi|119412757|gb|EAW22698.1| conserved [Neosartorya fischeri NRRL 181]
  misc_feature (2)..(631): NCBI GI: 70995554 Blast Desc: conserved [Aspergillus fumigatus Af293] gi|41581242|emb|CAE47891.1| , conserved [Aspergillus fumigatus] gi|66850167|gb|EAL90494.1| conserved [Aspergillus fumigatus
  misc_feature (2)..(631): NCBI GI: 169781476 Blast Desc: [Aspergillus oryzae RIB40] gi|238498260|ref|XP_002380365.1| conserved [Aspergillus flavus NRRL3357] gi|83773943|dbj|BAE64068.1| protein product oryzae]
MLMKVVIFALIVLAVLYASFRTREHHTKTTGGLYRKKATEYQWEAFPKFNGFYNGVRTLVPYEDWIPEQELSHKINVSIHNLSTFTPEAVNPYPKYNSTEYLKNFHPVRDCYLDEGETQLAPDIYAYPGIPMGMPAPYLGAHALFSIAPDKCYERFGRFGPYGYSYSRDDGGLGLSDHSAPVGADKVHTMLDNIDYRHVSWGAAQRRCFEKNRARFQPQEDVAKSRTTLNRTAVVLRTWTGYEYTDAQLLTLRAMVSELSLKSGGEYDVHLLVHVKDDALPIWADDATYKRVVRENVPEEFREIATLWSEQQMRTYYPGPFLDEDDTENVMGLEMHSVWRSGHFALQWFAQQHPEYDLFWNWEMDVRYTGHYYELLEGVSKWATAQPRKLMWERSSEHYSTWSAFSDIVEERTKENRITPVWGPQEFPTGKYTMLPPPEAVKPPTSFKEDRYEWGVNETCDLITFDPILDTSATDWLFRNDIFGYDTSIELPPRRNTATTIARISKRLLNTMHEETWRMHHTMVSEMWPATIALHHGYKALYAPHPIYFDRKWPLDVMDETLNYPQSSHDNSLSWGDNNMWGSSFHYNAKFSSVLWRRWLGAMEPSIGGHKEEDNNTGRMCLPPMLLHPVKHDGI

SEQ ID NO: 33971 - DNA, 1629 bp, Muscodor strobelii
  misc_feature: SGI cDNA ID NO. 571728
  misc_feature: Reduced expression when VOC is produced
  misc_feature: Encodes the peptide sequence at SEQ ID NO 33972
atgcgcccttttctcgcccggatacccccgatccgacaaccaaaccctcgactgtattctacgccgcctatacgactacagccgaggtaccgaccctggtgcttgcgcgtgggtggcaggcggcattatgtcacgcgcacccgaacacgcagcacagtcgcaagccttgcgcccagacgacacctcgcaaccgtgatatcgagcccggtagaaagagcaaccgttgcagacgatgtcggccccatactagaatacgatagacgggtagccgccggccgcttgcgcgaagacgagcaccagcgcggcatcatccagagcctgcagacattgcacgacgagctcgtacactacaccgcccgccccgtcgtgcaccccactctggaatcactcaagcccaccaagtcgctgttcggctggtttggccccaagcatggcgccgccatccaagagatcccctccgatctgcccaggggactgtatctgtacggcgacgtgggcagcgggaagaccatgctgatggatctgttctacgacactctgcccaccgccgtcaagtccaagacgaggatacacttccacaatttcatgcaggacgtccacaagcggttgcatcgcatcaagatggagcatggcaacgatatagatgctgtcccttttattgccgccgatatcgctgagcaggccaacgttctgtgcttcgacgagttccagtgtaccgatgttgccgatgccatgatcctacgcagactgctcgagtccttgatgtcccacggcgtggtgctggtaaccacttctaaccgccacccagacgacctctacaagaacggcatccagagagagtccttcattcctgcaatcaatctactcaaagcgcgcctacatgtgataaacctcgactcccctaccgattaccgcaagatacccagaccgccgtcaggcgtctaccacacccccctcgacggccacgccgcatcgcacgtagagaagtggctgcgctttctaggcgaccccgagaatcctgagccccatcccgaaacccagaaagtctggggccgtgaaatccatgtgccgcgcgtcagtggacggtgcgcatggttcacattcaaggaattaatcggccgtgcaacaggcgccgccgactatattgagctcatgcgaagctatgatgccttcatcgtctccgacattccaggcatgacatatcgcgagcgcgatctcgcacggcgattcatcacgtttatcgacgcagtctacgaatcacatgccaagctcgtcctcaccacggccgtaccgctaactcaactcttcatctcaccggaggagatgcgcgaatcgctaaagaaggacgggaaatctaccgaggccgatgacgatagcgaggacgccgtcagtcatgtaatgcagcacatgatggaagacgtcgacagcaatatcgatcagctcaagaactcaaatctattctccggcgacgaggagcggttcgcattcgcccgcgctctgtcgagattaagcgagatggcgagtaaagagtgggttgagcgtggtatgggattagagagccaaggtggcaagaaggagagggacgattgggcgaaagttcggagccggcagatggaagatagcatgtga

SEQ ID NO: 33972 - protein, 542 aa, Muscodor strobelii
  misc_feature: SGI Peptide ID NO. 571728
  misc_feature (79)..(515): Pfam Id: PF03969 Pfam Desc: AFG1-like ATPase
  misc_feature (79)..(435): Pfam Id: PF03969 Pfam Desc: AFG1-like ATPase
  misc_feature (492)..(515): Pfam Id: PF03969 Pfam Desc: AFG1-like ATPase
  misc_feature (77)..(542): NCBI GI: 85083111 Blast Desc: NCU04481 [Neurospora crassa OR74A] gi|28918134|gb|EAA27814.1| NCU04481 [Neurospora crassa OR74A]
  misc_feature (78)..(542): NCBI GI: 171691338 Blast Desc: protein product [Podospora anserina] gi|170945617|emb|CAP71730.1| protein product [Podospora anserina]
  misc_feature (72)..(542): NCBI GI: 145607677 Blast Desc: MGG_12248 [Magnaporthe grisea 70-15] gi|145015185|gb|EDJ99753.1| MGG_12248 [Magnaporthe grisea 70-15]
  misc_feature (53)..(542): NCBI GI: 116195318 Blast Desc: CHGG_04257 [Chaetomium globosum CBS 148.51] gi|88180170|gb|EAQ87638.1| CHGG_04257 [Chaetomium globosum CBS 148.51]
  misc_feature (51)..(542): NCBI GI: 256727039 Blast Desc: NECHADRAFT_66609 [Nectria haematococca mpVI 77-13-4]
  misc_feature (102)..(542): NCBI GI: 156049825 Blast Desc: SS1G_08620 [Sclerotinia sclerotiorum 1980] gi|154693018|gb|EDN92756.1| SS1G_08620 [Sclerotinia sclerotiorum 1980]
  misc_feature (60)..(535): NCBI GI: 46136217 Blast Desc: FG09624.1 [Gibberella zeae PH-1]
  misc_feature (80)..(540): NCBI GI: 189194791 Blast Desc: mitochondrial ATPase (Afg1) [Pyrenophora tritici-repentis Pt-1C-BFP] gi|187979298|gb|EDU45924.1| mitochondrial ATPase (Afg1) [Pyrenophora tritici-repentis
  misc_feature (66)..(542): NCBI GI: 119486941 Blast Desc: mitochondrial ATPase (Afg1), [Neosartorya fischeri NRRL 181] gi|119410547|gb|EAW20493.1| mitochondrial ATPase (Afg1), [Neosartorya fischeri NRRL 181]
  misc_feature (31)..(542): NCBI GI: 255936069 Blast Desc: Pc13g06270 [Penicillium chrysogenum Wisconsin 54-1255] gi|211583681|emb|CAP91696.1| Pc13g06270 [Penicillium chrysogenum Wisconsin 54-1255]
  misc_feature: Useful for introducing or modulating the production of volatile compounds
MRPFLARIPPIRQPNPRLYSTPPIRLQPRYRPWCLRVGGRRHYVTRTRTRSTVASLAPRRHLATVISSPVERATVADDVGPILEYDRRVAAGRLREDEHQRGIIQSLQTLHDELVHYTARPVVHPTLESLKPTKSLFGWFGPKHGAAIQEIPSDLPRGLYLYGDVGSGKTMLMDLFYDTLPTAVKSKTRIHFHNFMQDVHKRLHRIKMEHGNDIDAVPFIAADIAEQANVLCFDEFQCTDVADAMILRRLLESLMSHGVVLVTTSNRHPDDLYKNGIQRESFIPAINLLKARLHVINLDSPTDYRKIPRPPSGVYHTPLDGHAASHVEKWLRFLGDPENPEPHPETQKVWGREIHVPRVSGRCAWFTFKELIGRATGAADYIELMRSYDAFIVSDIPGMTYRERDLARRFITFIDAVYESHAKLVLTTAVPLTQLFISPEEMRESLKKDGKSTEADDDSEDAVSHVMQHMMEDVDSNIDQLKNSNLFSGDEERFAFARALSRLSEMASKEWVERGMGLESQGGKKERDDWAKVRSRQMEDSM

SEQ ID NO: 33973 - DNA, 3467 bp, Muscodor strobelii
  misc_feature: SGI EST ID NO. CUFF.80646.1
  misc_feature: Variant of the nucleotide sequence at SEQ ID NO 33971
gttcggcactctggttcatggttcgcctgctcgctccagagctatcaagccatcgagtttgctatcaaaccatgcatggggactgattgagctgaaggcggaggcttcaaaatatcgatatcaggactcacagctgctgatgtctcagagttcggctatatatccatctgttctcacgataccaaaatgagcagagattggcgtatgactgcagagcaaaagcgccacgacccagccagaactcttcagcaacatatctcagacgcatgtttgataaggcaattcgtgtatgattgacaacgaggctttggcgttggcgctactttagcgtctcccatgaaacaagtcgctcaacggcgactttcgccactaagtacattgcgcttgggttgctcagagcatacaacaaaattaatcatgtttaatttcttcaaatcttgctcttaagtccgtgaagatgcgtacaggcccatcatcgcgatgcccgcagagtgacagaagcttcagatagattgtttccgtcccttgcctggtattaaggtttcgattactaacgcggtagcacagagagattgggtcgcgagtaaggtattgagaattgaagcgatcgtggagatgatgctgccactgttggtagtagaccattgttggtgtcacgacgagacagtctatttcgccccatccaggcttacctacttgatgatagttgtgagttctccatgatgaaccgcaggagagcaaagtttactatcttcatgtagtctaaaatgctagatgtcaacaggtagctaatctgcgagatgctccattctgacgtcaacgtaaggagttgctcacaatccgatacgtacgagaaagttctaaaacgttggaaatattctaaagcaatagaccgttcgtacgtttctgtaattagggaaacgagaacgagccgtcaaccttgtccaagtccaacacgagaggtcggccgtgctctcgtcataacatcggggtctagcagtggcgcatagattgataagcagcattcattgggctgccagaaattccgatgagttcgaagtcttgaccaaatggtggataatgatggaagactgcgagcttaaggacagcagctcgttgtcattaaagcgaacgggagggaattgtccactacatcaaattatgacggttcgttcgcggaactagaatgcttcttctatggtgtaagctattggtatcgggggttgccgatggttgaaactagtgctagagagggtcgtggggtctcacgggcgtttttctggaggctatcgggaacgggtgtttgtgggggccgacgcctcgtgcagaagtgacgccatgggcaagtcccagctgctcagcgcccagagcccagagtccaccccgctggaactgaccaagccgcacgcgagaagaggacaagcctcgggccactaaggtagcagtgggacgcctcaaactccattttcaacagccgtcctcattgtcgactgtcgaacctagaagccgtccctgacaacgaaattcaaaatatcccaagtctgacagcgttagctaaataacctactcgacacttgctcctcctcctgtcgccactcatttctaggcattcactcctcatttctacctatgatgcatgtgctttacaaacgctgctggttataggaataatcccctcattgcttcttgccgttgcttcccatacgcccctcccgagaatgcgcccttttctcgcccggatacccccgatccgacaaccaaaccctcgactgtattctacgccgcctatacgactacagccgaggtaccgaccctggtgcttgcgcgtgggtggcaggcggcattatgtcacgcgcacccgaacacgcagcacagtcgcaagccttgcgcccagacgacacctcgcaaccgtgatatcgagcccggtagaaagagcaaccgttgcagacgatgtcggccccatactagaatacgatagacgggtagccgccggccgcttgcgcgaagacgagcaccagcgcggcatcatccagagcctgcagacattgcacgacgagctcgtacactacaccgcccgccccgtcgtgcaccccactctggaatcactcaagcccaccaagtcgctgttcggctggtttggccccaagcatggcgccgccatccaagagatcccctccgatctgcccaggggactgtatctgtacggcgacgtgggcagcgggaagaccatgctgatggatctgttctacgacactctgcccaccgccgtcaagtccaagacgaggatacacttccacaatttcatgcaggacgtccacaagcggttgcatcgcatcaagatggagcatggcaacgatatagatgctgtcccttttattgccgccgatatcgctgagcaggccaacgttctgtgcttcgacgagttccagtgtaccgatgttgccgatgccatgatcctacgcagactgctcgagtccttgatgtcccacggcgtggtgctggtaaccacttctaaccgccacccagacgacctctacaagaacggcatccagagagagtccttcattcctgcaatcaatctactcaaagcgcgcctacatgtgataaacctcgactcccctaccgattaccgcaagatacccagaccgccgtcaggcgtctaccacacccccctcgacggccacgccgcatcgcacgtagagaagtggctgcgctttctaggcgaccccgagaatcctgagccccatcccgaaacccagaaagtctggggccgtgaaatccatgtgccgcgcgtcagtggacggtgcgcatggttcacattcaaggaattaatcggccgtgcaacaggcgccgccgactatattgagctcatgcgaagctatgatgccttcatcgtctccgacattccaggcatgacatatcgcgagcgcgatctcgcacggcgattcatcacgtttatcgacgcagtctacgaatcacatgccaagctcgtcctcaccacggccgtaccgctaactcaactcttcatctcaccggaggagatgcgcgaatcgctaaagaaggacgggaaatctaccgaggccgatgacgatagcgaggacgccgtcagtcatgtaatgcagcacatgatggaagacgtcgacagcaatatcgatcagctcaagaactcaaatctattctccggcgacgaggagcggttcgcattcgcccgcgctctgtcgagattaagcgagatggcgagtaaagagtgggttgagcgtggtatgggattagagagccaaggtggcaagaaggagagggacgattgggcgaaagttcggagccggcagatggaagatagcatgtgaataagacttatacggcatttgatacctctagcgtgcattctgctttttcactccgggcgttggaataaggtcatagtgttttggactagatatgtttcgaatatcatcttcttgttccaa

SEQ ID NO: 33974 - DNA, 2046 bp, Muscodor strobelii
  misc_feature: SGI cDNA ID NO. 571729
  misc_feature: Encodes the peptide sequence at SEQ ID NO 33975
atgacgaccgaaactgagccggccgtaaaggccgtcgcgcccgcgaggaagaagtttgccattcctcctgtgaagatagcctgtttgtcctgtcgggcatccaggacgagatgtaacggcgagcatccgtgcgccagttgtgtaatgaaagaacgggagtgtgtctacaaaccaagtcgccgaggaggtccacgtatccgcaagaaatcgcgccagacttcggaataccaggatatcactgcttcgctaccgacgaaaagcgaggagcttccacagcatggcttgatggtgcaagactacatagatccaggcgccggtctcaaaacactggcagacgtttggcaagatagcgatgctatctatgatcatctattccaggcgcccttagcaagcccgcctctccatatccaaattcccgttgctcgcacttatggaaatgatgaccaggcgattctaaatgcctactatatctggatacatccgtatttcccaattttaccaccgcctgaagcagtacccacccccgaccagcccagggcgctttcggaggatcagagtgatgaatttcaggagccttcgtcggctgttagcctggccatttctgccatactggcacttattccgtgtcctcacgacagcaatcctatgagtgaacaatcggttcgctggcgccgcacatattctcaatttttagccaaaactgctttggaatatattgagaatgaaagcgagagacctgaatcttctgtcgatccacccaaggcccttgacgattctgatgaggatgaaacctttcgcgagaagttccatccacgagtaccacttgagctcgaaagcatcatcgcactggatctcttaagcgtttatgaatatgcacagcgtggtaatttgaagaaaatgagggccagagcgggtgctgccttggttgccgccatgtcattgcacattcacacaaagaacgatgtcgaggatggttactctgaagcgcgtcggcgtgcatggtggatgacgtacatttgtgtttgccagggttcgatagtcagcggtacccctcccacttttgaagtatttgctgctagctatacagctagatttcctacgatccaggccgatccagaggcctggtccgtttttgttcagtcgcagcaggctattcttgctgctacacaattcgtgtccgagtttaacaaggccagaaaagccggggcagacatgaatagaagttataatcgaatgcgtgaactcgagcgaatccttgagccgatgatcacccaggccgaatcatggacctccaattgtccgctgatgcaaccggttgatcagagtgaagcggtcctagctcatgctcttcggtgcatgtctcgcattaaattgaacagtgcccgtatcaaggttcatcgttactgcgctttcttcgacgttgctgtgttcactggcaagcattgcgacttagcaagtctgcctaaaagagaaacagatgattcgataccacgacagttgcaatcttgctgtaccactcaattgagtagccctccatcagcttatagccattctaatgggtctgggtctcccgctccatccgatggttcttcaccagcaggccatatcttgagccaggcctctgttgcggattttcctttcacaagtcatgactcctctaggatctgtctgaagtccgcactcaacattgctgagaactttgatgcgttgccttatccaaatccttcgggtcagttgtgcgagacaccgatctacctcggctccggatcgacattcatcacgccgaggacaatgccatcctttgcgtgctgcgcaatgcaatgcagttatgcactacttatggtcaaggatcgaaccgaatcgatgtacgcaaactcgaatgggcaatctgcagttctggtcgacaacctacgtgaccgacttcagcaaggtctatactctgtccttgctacactcgagaactacggcaccgcctttgaggctttgggtggcatgcgagaccaaattcgagccaaggtcaacttatccttggactttggatcttga

SEQ ID NO: 33975 - protein, 681 aa, Muscodor strobelii
  misc_feature: SGI Peptide ID NO. 571729
  misc_feature (26)..(63): Pfam Id: PF00172 Pfam Desc: Fungal Zn(2)-Cys(6) binuclear cluster domain
  misc_feature (6)..(671): NCBI GI: 261360702 Blast Desc: C6 zinc finger domain-containing protein [Verticillium albo-atrum VaMs.102]
  misc_feature (16)..(679): NCBI GI: 145609141 Blast Desc: MGG_07386 [Magnaporthe grisea 70-15] gi|145016562|gb|EDK00992.1| MGG_07386 [Magnaporthe grisea 70-15]
  misc_feature (23)..(665): NCBI GI: 256730365 Blast Desc: NECHADRAFT_45265 [Nectria haematococca mpVI 77-13-4]
  misc_feature (47)..(666): NCBI GI: 242813746 Blast Desc: conserved [Talaromyces stipitatus ATCC 10500] gi|218714567|gb|EED13990.1| conserved [Talaromyces stipitatus ATCC 10500]
  misc_feature (1)..(671): NCBI GI: 240106845 Blast Desc: Fungal Zn binuclear cluster domain containing protein [Coccidioides posadasii C735 delta SOWgp]
  misc_feature (3)..(671): NCBI GI: 238842666 Blast Desc: C6 zinc finger domain-containing protein [Microsporum canis CBS 113480]
  misc_feature (44)..(671): NCBI GI: 119174472 Blast Desc: CIMG_09218 [Coccidioides immitis RS]
  misc_feature (15)..(671): NCBI GI: 239613093 Blast Desc: C6 zinc finger domain-containing protein [Ajellomyces dermatitidis ER-3]
  misc_feature (47)..(671): NCBI GI: 261191083 Blast Desc: C6 zinc finger domain-containing protein [Ajellomyces dermatitidis SLH14081] gi|239590994|gb|EEQ73575.1| C6 zinc finger domain-containing protein [Ajellomyces dermatitidis SLH14081]
  misc_feature (14)..(669): NCBI GI: 159130141 Blast Desc: conserved [Aspergillus fumigatus A1163]
MTTETEPAVKAVAPARKKFAIPPVKIACLSCRASRTRCNGEHPCASCVMKERECVYKPSRRGGPRIRKKSRQTSEYQDITASLPTKSEELPQHGLMVQDYIDPGAGLKTLADVWQDSDAIYDHLFQAPLASPPLHIQIPVARTYGNDDQAILNAYYIWIHPYFPILPPPEAVPTPDQPRALSEDQSDEFQEPSSAVSLAISAILALIPCPHDSNPMSEQSVRWRRTYSQFLAKTALEYIENESERPESSVDPPKALDDSDEDETFREKFHPRVPLELESIIALDLLSVYEYAQRGNLKKMRARAGAALVAAMSLHIHTKNDVEDGYSEARRRAWWMTYICVCQGSIVSGTPPTFEVFAASYTARFPTIQADPEAWSVFVQSQQAILAATQFVSEFNKARKAGADMNRSYNRMRELERILEPMITQAESWTSNCPLMQPVDQSEAVLAHALRCMSRIKLNSARIKVHRYCAFFDVAVFTGKHCDLASLPKRETDDSIPRQLQSCCTTQLSSPPSAYSHSNGSGSPAPSDGSSPAGHILSQASVADFPFTSHDSSRICLKSALNIAENFDALPYPNPSGQLCETPIYLGSGSTFITPRTMPSFACCAMQCSYALLMVKDRTESMYANSNGQSAVLVDNLRDRLQQGLYSVLATLENYGTAFEALGGMRDQIRAKVNLSLDFGS

SEQ ID NO: 33976 - DNA, 3499 bp, Muscodor strobelii
  misc_feature: SGI EST ID NO. CUFF.80755.0
  misc_feature: Variant of the nucleotide sequence at SEQ ID NO 33974
ccagactactccaatgatgaaccccaatgggctccaacccgatgagagctgtcaattcttttctccgtcgcccgcagccgggttgaatgcacaagaacaagctcagcggatgttcaccttcgagacccggacaagggtcggcgataatcaccttgtcatttttggaaggggcccttgcttctatctcatcctagaaaccccctcttccccatcaccccacgtacgaccatatcgggatgatcgatgtgacctgtgatttacgagcagaggcgagcagatttacaagcaaggcagggctcccagaggtgaaccggtggaagcgcagataacacagcccaatcatccattccatcggaacagactttgtcgacgtgtttgctggtgcatcagtgttcttgtcattcaccacgcaggtggctcttgtgacacatacccgcggcagtgcttctaaaaatccccgcctgctcgctgttgctgttgttcatgacgggtcaaaagtagacccgtctatcccaagcccccaatcccaagtcccaggtcccgatcgtacatacagctgtcggaggctggtcttcctttgttgttctcccatctccacccaagcccgctcgtcttcgaactgtccacagcagccccaggcgcaggatcggccgccgtatggatcccattacctaacttttccagcccggattcctatcaccgcattcaggacagaagccgtgtcttccggcttcaccaccatgacgaccgaaactgagccggccgtaaaggccgtcgcgcccgcgaggaagaagtttgccattcctcctgtgaagatagcctgtttgtcctggtacgtgactggtcttacgtcgagctatacgaacgcgaccttcttcgcgccgtgtcacctcgtactaatagcgaaacaagtcgggcatccaggacgagatgtaacggcgagcatccgtgcgccagtgtacgcttcccatactttgacaattatgtgtctaggttcatgctattttatccacggcgtgcgacccgagataggagaacatttgaatctgacccattttagtgtgtaatgaaagaacgggagtgtgtctacaaaccaagtcgccgaggaggtccacgtatccgcaagaaatcgcgccagacttcggaataccaggatatcactgcttcgctaccgacgaaaagcgaggagcttccacagcatggcttgatggtgcaagactacatagatccaggcgccggtctcaaaacactggcagacgtttggcaagatagcgatgctatctatgatcatctattccaggcgcccttagcaagcccgcctctccatatccaaattcccgttgctcgcacttatggaaatgatgaccaggcgattctaaatgcctactatatctggatacatccgtatttcccaattttaccaccgcctgaagcagtacccacccccgaccagcccagggcgctttcggaggatcagagtgatgaatttcaggagccttcgtcggctgttagcctggccatttctgccatactggcacttattccgtgtcctcacgacagcaatcctatgagtgaacaatcggttcgctggcgccgcacatattctcaatttttagccaaaactgctttggaatatattgagaatgaaagcgagagacctgaatcttctgtcgatccacccaaggcccttgacgattctgatgaggatgaaacctttcgcgagaagttccatccacgagtaccacttgagctcgaaagcatcatcgcactggatctcttaagcgtttatgaatatgcacagcgtggtaatttgaagaaaatgagggccagagcgggtgctgccttggttgccgccatgtcattgcacattcacacaaagaacgatgtcgaggatggttactctgaagcgcgtcggcgtgcatggtggatgacgtacatttgtgtttgccagggttcgatagtcagcggtacccctcccacttttgaagtatttgctgctagctatacagctagatttcctacgatccaggccgatccagaggcctggtccgtttttgttcagtcgcagcaggctattcttgctgctacacaattcgtgtccgagtttaacaaggccagaaaagccggggcagacatgaatagaagttataatcgaatgcgtgaactcgagcgaatccttgagccgatgatcacccaggccgaatcatggacctccaattgtccgctgatgcaaccggttgatcagagtgaagcggtcctagctcatgctcttcggtgcatgtctcgcattaaattgaacagtgcccgtatcaaggttcatcgttactgcgctttcttcgacgttgctgtgttcactggcaagcattgcgacttagcaagtctgcctaaaagagaaacagatgattcgataccacgacagttgcaatcttgctgtaccactcaattgagtagccctccatcagcttatagccattctaatgggtctgggtctcccgctccatccgatggttcttcaccagcaggccatatcttgagccaggcctctgttgcggattttcctttcacaagtcatgactcctctaggatctgtctgaagtccgcactcaacattgctgagaactttgatgcgttgccttatccaaatccttcgggtcagttgtgcgagacaccgatctacctcggctccggatcgacattcatcacgccgaggacaatgccatcctttgcgtgctgcgcaatgcaatgcagttatgcactacttatggtcaaggatcgaaccgaatcgatgtacgcaaactcgaatgggcaatctgcagttctggtcgacaacctacgtgaccgacttcagcaaggtctatactctgtccttgctacactcgagaactacggcaccgcctttgaggctttgggtggcatgcgagaccaaattcgagccaaggtcaacttatccttggactttggatcttgatccaaattacacttactacacgatttgtttccttatctctcggtcggcgaaacaggaatagcttcttctactgggagacgacatcaccggcgcgtatggtttgtgtttgtatgaaggtctatcgggatatacataaaggcaattcacgcttctttgtaggatatatctacaggttttagccgatagaggttttctacgccattagccggccattgtaagcttcgatcactgagacaaagatgagcggagtgggatactgtgtaaactacaaactccactcgactcggtactgaataacgaagatgccgggtggtcgcggctctatgacaatccttcgggtgtcaaacgatagttaggcggcaaaagtcatatagctaacgcaatttggcgtcactttgatgatattatagtgacaatgtgaatatcttcccttcatgtgtgtggatataggagcttgtgcttcaggctttcctactctgtctgcatgttgtacaaggcactgctttggagtagatatcttttcatggtttc

SEQ ID NO: 33977 - DNA, 2106 bp, Muscodor strobelii
  misc_feature: SGI cDNA ID NO. 571730
  misc_feature: Encodes the peptide sequence at SEQ ID NO 33978
atgacgaccgaaactgagccggccgtaaaggccgtcgcgcccgcgaggaagaagtttgccattcctcctgtgaagatagcctgtttgtcctgtcgggcatccaggacgagatgtaacggcgagcatccgtgcgccagttgtgtaatgaaagaacgggagtgtgtctacaaaccaagtcgccgaggaggtccacgtatccgcaagaaatcgcgccagacttcggaataccaggatatcactgcttcgctaccgacgaaaagcgaggagcttccacagcatggcttgatggtgcaagactacatagatccaggcgccggtctcaaaacactggcagacgtttggcaagatagcgatgctatctatgatcatctattccaggcgcccttagcaagcccgcctctccatatccaaattcccgttgctcgcacttatggaaatgatgaccaggcgattctaaatgcctactatatctggatacatccgtatttcccaattttaccaccgcctgaagcagtacccacccccgaccagcccagggcgctttcggaggatcagagtgatgaatttcaggagccttcgtcggctgttagcctggccatttctgccatactggcacttattccgtgtcctcacgacagcaatcctatgagtgaacaatcggttcgctggcgccgcacatattctcaatttttagccaaaactgctttggaatatattgagaatgaaagcgagagacctgaatcttctgtcgatccacccaaggcccttgacgattctgatgaggatgaaacctttcgcgagaagttccatccacgagtaccacttgagctcgaaagcatcatcgcactggatctcttaagcgtttatgaatatgcacagcgtggtaatttgaagaaaatgagggccagagcgggtgctgccttggttgccgccatgtcattgcacattcacacaaagaacgatgtcgaggatggttactctgaagcgcgtcggcgtgcatggtggatgacgtacatttgtgtttgccagggttcgatagtcagcggtacccctcccacttttgaagtatttgctgctagctatacagctagatttcctacgatccaggccgatccagaggcctggtccgtttttgttcagtcgcagcaggctattcttgctgctacacaattcgtgtccgagtttaacaaggccagaaaagccggggcagacatgaatagaagttataatcgaatgcgtgaactcgagcgaatccttgagccgatgatcacccaggccgaatcatggacctccaattgtccgctgatgcaaccggttgatcagagtgaagcggtcctagctcatgctcttcggtgcatgtctcgcattaaattgaacagtgcccgtatcaaggttcatcgttactgcgctttcttcgacgttgctgtgttcactggcaagcattgcgacttagcaagtctgcctaaaagagaaacagatgattcgataccacgacagttgcaatcttgctgtaccactcaattgagtagccctccatcagcttatagccattctaatgggtctgggtctcccgctccatccgatggttcttcaccagcaggccatatcttgagccaggcctctgttgcggattttcctttcacaagtcatgactcctctaggatctgtctgaagtccgcactcaacattgctgagaactttgatgcgttgccttatccaaatccttcgggtcagttgtgcgagacaccgatctacctcggctccggatcgacattcatcacgccgaggacaatgccatcctttgcgtgctgcgcaatgcaatgcagttatgcactacttatggtcaaggatcgaaccgaatcgatgtacgcaaactcgaatgggcaatctgcagttctggtcgacaacctacgtgaccgacttcagcaaggtctatactctgtccttgctacactcgagaactacggcaccgcctttgaggctttgggtggcatgcgaggtatgccgacactgttcattgaccccaagaatacttataatgagactaatattatctcagaccaaattcgagccaaggtcaacttatccttggactttggatcttga

SEQ ID NO: 33978 - protein, 701 aa, Muscodor strobelii
  misc_feature: SGI Peptide ID NO. 571730
  misc_feature (26)..(63): Pfam Id: PF00172 Pfam Desc: Fungal Zn(2)-Cys(6) binuclear cluster domain
  misc_feature (6)..(680): NCBI GI: 261360702 Blast Desc: C6 zinc finger domain-containing protein [Verticillium albo-atrum VaMs.102]
  misc_feature (16)..(666): NCBI GI: 145609141 Blast Desc: MGG_07386 [Magnaporthe grisea 70-15] gi|145016562|gb|EDK00992.1| MGG_07386 [Magnaporthe grisea 70-15]
  misc_feature (23)..(667): NCBI GI: 256730365 Blast Desc: NECHADRAFT_45265 [Nectria haematococca mpVI 77-13-4]
  misc_feature (47)..(667): NCBI GI: 242813746 Blast Desc: conserved [Talaromyces stipitatus ATCC 10500] gi|218714567|gb|EED13990.1| conserved [Talaromyces stipitatus ATCC 10500]
  misc_feature (1)..(666): NCBI GI: 240106845 Blast Desc: Fungal Zn binuclear cluster domain containing protein [Coccidioides posadasii C735 delta SOWgp]
  misc_feature (3)..(666): NCBI GI: 238842666 Blast Desc: C6 zinc finger domain-containing protein [Microsporum canis CBS 113480]
  misc_feature (44)..(666): NCBI GI: 119174472 Blast Desc: CIMG_09218 [Coccidioides immitis RS]
  misc_feature (14)..(700): NCBI GI: 159130141 Blast Desc: conserved [Aspergillus fumigatus A1163]
  misc_feature (14)..(700): NCBI GI: 146323094 Blast Desc: C6 finger domain protein [Aspergillus fumigatus Af293] gi|129558613|gb|EAL94048.2| C6 finger domain protein, [Aspergillus fumigatus Af293]
  misc_feature (15)..(666): NCBI GI: 239613093 Blast Desc: C6 zinc finger domain-containing protein [Ajellomyces dermatitidis ER-3]
MTTETEPAVKAVAPARKKFAIPPVKIACLSCRASRTRCNGEHPCASCVMKERECVYKPSRRGGPRIRKKSRQTSEYQDITASLPTKSEELPQHGLMVQDYIDPGAGLKTLADVWQDSDAIYDHLFQAPLASPPLHIQIPVARTYGNDDQAILNAYYIWIHPYFPILPPPEAVPTPDQPRALSEDQSDEFQEPSSAVSLAISAILALIPCPHDSNPMSEQSVRWRRTYSQFLAKTALEYIENESERPESSVDPPKALDDSDEDETFREKFHPRVPLELESIIALDLLSVYEYAQRGNLKKMRARAGAALVAAMSLHIHTKNDVEDGYSEARRRAWWMTYICVCQGSIVSGTPPTFEVFAASYTARFPTIQADPEAWSVFVQSQQAILAATQFVSEFNKARKAGADMNRSYNRMRELERILEPMITQAESWTSNCPLMQPVDQSEAVLAHALRCMSRIKLNSARIKVHRYCAFFDVAVFTGKHCDLASLPKRETDDSIPRQLQSCCTTQLSSPPSAYSHSNGSGSPAPSDGSSPAGHILSQASVADFPFTSHDSSRICLKSALNIAENFDALPYPNPSGQLCETPIYLGSGSTFITPRTMPSFACCAMQCSYALLMVKDRTESMYANSNGQSAVLVDNLRDRLQQGLYSVLATLENYGTAFEALGGMRGMPTLFIDPKNTYNETNIISDQIRAKVNLSLDFGS

SEQ ID NO: 33979 - DNA, 3499 bp, Muscodor strobelii; identical to SEQ ID NO: 33976
  misc_feature: SGI EST ID NO. CUFF.80755.0
  misc_feature: Variant of the nucleotide sequence at SEQ ID NO 33977

SEQ ID NO: 33980 - DNA, 900 bp, Muscodor strobelii
  misc_feature: SGI cDNA ID NO. 571731
  misc_feature: Elevated expression when VOC is produced
  misc_feature: Encodes the peptide sequence at SEQ ID NO 33981
atgtcaaaatcaccaatacggagcttgtccggacgtaacagagccttcgctctaatactatctttcatatccctcttattcatcctactcgtcctactctcaggaacagggggccgtgtctcttcgtcatacttaacaatcgacacaaccgacctctccgtcccgtcaaaacttagcacatcaacactcttacacgacctctcacaagtatcaaagagcgatctcgttggcggcagcaacacccagaagaccctcggtctatcccaaacctacgacgtagccctcctcacagcatgtggccgaggcgacagaacggcttgcacttcctctgaagtcggatatacatttgatcccacgtcaactcttaagctctcccgcacagcagcacaaggaacattctcctcttcatacaataaggaattggacacatatgcctcggtctctactttcgtaggagtagcatacgctctatctattcccctcatcatcctctcatcactttgcgtctttctcgcaccgaaatccaaaccctttcttctctccgctcggatcctctccgcactcgccgctatactcgtcctttcagcgaccatcgcatcaatcgtgacgttcatccgactccgcaacgtcttcaacaacgaactcagcgctatcggtgtcaagacaaacacaagttccagcgcaatcggtctcagcatcgcggcaaccattacatcactcgctacgttcatcttgacgctgtttatccggcgcatagaggcagctgatcggggacagtacagcgaggttaaggaagaaggagagagactgaaggggactcgtactcccagtgctgaggatatcagaaatgacattcgggcaaagcttattattgacacgtcgtatcgaccacacgattag

SEQ ID NO: 33981 - protein, 299 aa, Muscodor strobelii
  misc_feature: SGI Peptide ID NO. 571731
  misc_feature (12)..(245): NCBI GI: 85083173 Blast Desc: NCU04497 [Neurospora crassa OR74A] gi|28918150|gb|EAA27830.1| [Neurospora crassa OR74A]
  misc_feature (70)..(221): NCBI GI: 70991581 Blast Desc: integral membrane protein [Aspergillus fumigatus Af293] gi|66848272|gb|EAL88601.1| integral membrane protein [Aspergillus fumigatus Af293] gi|159124199|gb|EDP49317.1| protein
  misc_feature (70)..(221): NCBI GI: 119468569 Blast Desc: integral membrane protein [Neosartorya fischeri NRRL 181] gi|119406017|gb|EAW15968.1| integral membrane protein [Neosartorya fischeri NRRL 181]
  misc_feature (69)..(221): NCBI GI: 121699066 Blast Desc: integral membrane protein [Aspergillus clavatus NRRL 1] gi|119396042|gb|EAW06474.1| integral membrane protein [Aspergillus clavatus NRRL 1]
  misc_feature (12)..(175): NCBI GI: 258568710 Blast Desc: conserved [Uncinocarpus reesii 1704] gi|237906545|gb|EEP80946.1| conserved [Uncinocarpus reesii 1704]
  misc_feature (50)..(222): NCBI GI: 212546939 Blast Desc: conserved [Penicillium marneffei ATCC 18224] gi|210065143|gb|EEA19238.1| conserved [Penicillium marneffei ATCC 18224]
  misc_feature (91)..(276): NCBI GI: 242800591 Blast Desc: integral membrane protein [Talaromyces stipitatus ATCC 10500] gi|218716965|gb|EED16386.1| integral membrane protein [Talaromyces stipitatus ATCC 10500]
  misc_feature (16)..(284): NCBI GI: 256734737 Blast Desc: NECHADRAFT_98939 [Nectria haematococca mpVI 77-13-4]
  misc_feature (75)..(248): NCBI GI: 169596366 Blast Desc: SNOG_00941 [Phaeosphaeria nodorum SN15] gi|111071316|gb|EAT92436.1| SNOG_00941 [Phaeosphaeria nodorum SN15]
  misc_feature (3)..(247): NCBI GI: 238489873 Blast Desc: conserved [Aspergillus flavus NRRL3357] gi|220698562|gb|EED54902.1| conserved [Aspergillus flavus NRRL3357]
  misc_feature: Useful for introducing or modulating the production of volatile compounds
MSKSPIRSLSGRNRAFALILSFISLLFILLVLLSGTGGRVSSSYLTIDTTDLSVPSKLSTSTLLHDLSQVSKSDLVGGSNTQKTLGLSQTYDVALLTACGRGDRTACTSSEVGYTFDPTSTLKLSRTAAQGTFSSSYNKELDTYASVSTFVGVAYALSIPLIILSSLCVFLAPKSKPFLLSARILSALAAILVLSATIASIVTFIRLRNVFNNELSAIGVKTNTSSSAIGLSIAATITSLATFILTLFIRRIEAADRGQYSEVKEEGERLKGTRTPSAEDIRNDIRAKLIIDTSYRPHD

SEQ ID NO: 33982 - DNA, 1674 bp, Muscodor strobelii
  misc_feature: SGI EST ID NO. CUFF.80758.0
  misc_feature: Variant of the nucleotide sequence at SEQ ID NO 33980
cgagaatcggaaagcgaattgcagggcgctaccatgttattaagcgcggcggatgtctatttctaaaacgtggcattgggtcatgtaatgagtgccgctttcaacggcttgccaacaggccggattgcattcttcccgcgcttagacaggcgagccaagacgaccaacaaactggcaaggcttggcgtaccagtctccctatatgacctttcttctgcttattggagatatgtgagggcattccaaaattagtttctgcgtgactgctattgatactgtgcctacctgcaattccggaatcgatccctttgttaatatgaggcctcagccataatgttcgcaaaagcgacgagcttatagatagacactagagacctgaaattgaagttatcaatgagcttcacaacctaactcttccaataaacactcgtatttcatatctgttcttgtttatatgcttctcccaccaatagctgatacgtctgctcaaagggttgggcctagtgcacctaattattcaacgaataccagatttacaatgtcaaaatcaccaatacggagcttgtccggacgtaacagagccttcgctctaatactatctttcatatccctcttattcatcctactcgtcctactctcaggaacagggggccgtgtctcttcgtcatacttaacaatcgacacaaccgacctctccgtcccgtcaaaacttagcacatcaacactcttacacgacctctcacaagtatcaaagagcgatctcgttggcggcagcaacacccagaagaccctcggtctatcccaaacctacgacgtagccctcctcacagcatgtggccgaggcgacagaacggcttgcacttcctctgaagtcggatatacatttgatcccacgtcaactcttaagctctcccgcacagcagcacaaggaacattctcctcttcatacaataaggaattggacacatatgcctcggtctctactttcgtaggagtagcatacgctctatctattcccctcatcatcctctcatcactttgcgtctttctcgcaccgaaatccaaaccctttcttctctccgctcggatcctctccgcactcgccgctatactcgtcctttcagcgaccatcgcatcaatcgtgacgttcatccgactccgcaacgtcttcaacaacgaactcagcgctatcggtgtcaagacaaacacaagttccagcgcaatcggtctcagcatcgcggcaaccattacatcactcgctacgttcatcttgacgctgtttatccggcgcatagaggcagctgatcggggacagtacagcgaggttaaggaagaaggagagagactgaaggggactcgtactcccagtgctgaggatatcagaaatgacattcgggcaaagcttattattgacacgtcgtatcgaccacacgattagaggcacgtccatactaggggcgcggagcattgtttgtagatgatcagaaacataggaaggagtttggcgttggtagctttcataagcttctctgtattgcgtattactggataaatctctaattgcacgcaatgtacctagataggtaatttgaccatgtagatacgcttcgtgtcattgtgattaaaatattttggggccgcggacaagttcattttcttgagatacacatgtgc

SEQ ID NO: 33983 - DNA, 1926 bp, Muscodor strobelii
  misc_feature: SGI cDNA ID NO. 571732
  misc_feature: Elevated expression when VOC is produced
  misc_feature: Encodes the peptide sequence at SEQ ID NO 33984
atgttgttgtctcatttctcaagcccggcgcttcggctggcattctttgcttctcttactgctgccactcactttgaagtaactgttggcaaagacagtaaattggaattcaatccagcgatcataaatgcacagatcggtgacacagtcacatataaattcttctctaaaaaccacgctgtagctcagtcaacttttgcagacccctgccacctccaggagaatggcatattctcaggctttactccaaatgattcaccagatgttgcagctgcaactgatttcacaataacgataaacgatacgaaaccactctggttctactgcccgcaaacaaatggaaatcattgccaaagcggaatggtacacgcgataaatgctcccgctaccggaaacaccttcgatgcctacaagaccaaggcacaaactgctgcaacccctagtacgccctcggctgatgtattacctgctggcggtcttcgaaagacacacgtcaatgtcggtgtcggcactgatctgattttcgacccgagtaatattttcgagcctattggtactgttatcgagtttaattacaatccgaaaaatcactccattgttcaatcatcctttgatcaaccatgcgctccaatcgctcgtggaggctttgcggccccttttgtccccctagagaagtcatcaggcgtgacgtttgaagtcactatcacgaatatggatcctgtctggttctactgcgcccagactgccaaatctcactgtcaatccggaatggtcggcgctttgaacgcggcgacagagggtgacaagacattcgatgccttcaaagcacttgctgctaaagcgcctcctagcacaactgttcccgacacaccacttgtgggagcgctcaagatcaacggtacttttatcaacgatgtcggaagctcagtactagatgtgacaacccttgatctttctctcggttcctacacaccagcaccagggatgaactatccaccatacatcggaggaatggctggtggtaatcaacctgccaattacggttggggcaacaacatttcagatgaagcagttttgatcttccagtctctccagtacatcgacaactttattgtggtcctcctgttagatggctacaatagcttggtgcaaggcgattgggctaatgtgtatccccgctcgattcaaaactcgctaggatcgcttgcggctcagagtttgattcatcgcagaagctatacggatacattgcaacactttagcaaagatgtagtcagtgtctgcgactacaatctcgattcggaaatggacagcgtcgacgactggctagcgacagtcttgaaaggcttacatctctctatgggtactacgcttgacgccattacgaaactggcggagagcgactcctgggccatacctattctcgcaacggcctttggcacacagactcgtatggccgcgctcgtgaacctcatgcaaaatcatatcgtcgctgctgcaccgcgcgaagttctactcccccaagctctctcgacatcttacattgcatcgcaatatgcgacgcccggaacctgcgagcctcccactgccgctggctcaaaatccacgaccacttttcccgcgcttactgtcaaagacaaagtcaacaatgtggatacgggcagattgacacagatcactgtagatgtcccaaaggagagcaccggcgagcatttcattgcttggctgggcgcctggggtggtattcagtacacctctgtggatgcgcaggatagtacagccgcggtacctgcttcgctgtcgggacatgtgtgggctgtcctgacaaacaaagctgatgtcccggctgcagagctagacggtgtcactgtagctggcccagagatgctctgggtttcgcaacagtggtcatcatcggacgagtaa

SEQ ID NO: 33984 - protein, 641 aa, Muscodor strobelii
  misc_feature: SGI Peptide ID NO. 571732
  misc_feature (18)..(633): NCBI GI: 145606432 Blast Desc: MGG_02330 [Magnaporthe grisea 70-15] gi|145014093|gb|EDJ98734.1| MGG_02330 [Magnaporthe grisea 70-15]
  misc_feature (121)..(510): NCBI GI: 261352774 Blast Desc: conserved [Verticillium albo-atrum VaMs.102]
  misc_feature (1)..(284): NCBI GI: 169853290 Blast Desc: CC1G_04305 [Coprinopsis cinerea okayama7#130] gi|116505704|gb|EAU88599.1| CC1G_04305 [Coprinopsis cinerea okayama7#130]
  misc_feature (10)..(278): NCBI GI: 170085271 Blast Desc: [Laccaria bicolor S238N-H82] gi|164651411|gb|EDR15651.1| [Laccaria bicolor S238N-H82]
  misc_feature (22)..(278): NCBI GI: 169867110 Blast Desc: CC1G_02599 [Coprinopsis cinerea okayama7#130] gi|116498688|gb|EAU81583.1| CC1G_02599 [Coprinopsis cinerea okayama7#130]
  misc_feature (10)..(280): NCBI GI: 170094096 Blast Desc: [Laccaria bicolor S238N-H82] gi|164646723|gb|EDR10968.1| [Laccaria bicolor S238N-H82]
  misc_feature (26)..(159): NCBI GI: 261352774 Blast Desc: conserved [Verticillium albo-atrum VaMs.102]
  misc_feature (6)..(171): NCBI GI: 169621039 Blast Desc: SNOG_13723 [Phaeosphaeria nodorum SN15] gi|111057627|gb|EAT78747.1| SNOG_13723 [Phaeosphaeria nodorum SN15]
  misc_feature (173)..(292): NCBI GI: 119185977 Blast Desc: CIMG_03036 [Coccidioides immitis RS]
  misc_feature (173)..(292): NCBI GI: 240108742 Blast Desc: CPC735_010950 [Coccidioides posadasii C735 delta SOWgp]
  misc_feature: Useful for introducing or modulating the production of volatile compounds
MLLSHFSSPALRLAFFASLTAATHFEVTVGKDSKLEFNPAIINAQIGDTVTYKFFSKNHAVAQSTFADPCHLQENGIFSGFTPNDSPDVAAATDFTITINDTKPLWFYCPQTNGNHCQSGMVHAINAPATGNTFDAYKTKAQTAATPSTPSADVLPAGGLRKTHVNVGVGTDLIFDPSNIFEPIGTVIEFNYNPKNHSIVQSSFDQPCAPIARGGFAAPFVPLEKSSGVTFEVTITNMDPVWFYCAQTAKSHCQSGMVGALNAATEGDKTFDAFKALAAKAPPSTTVPDTPLVGALKINGTFINDVGSSVLDVTTLDLSLGSYTPAPGMNYPPYIGGMAGGNQPANYGWGNNISDEAVLIFQSLQYIDNFIVVLLLDGYNSLVQGDWANVYPRSIQNSLGSLAAQSLIHRRSYTDTLQHFSKDVVSVCDYNLDSEMDSVDDWLATVLKGLHLSMGTTLDAITKLAESDSWAIPILATAFGTQTRMAALVNLMQNHIVAAAPREVLLPQALSTSYIASQYATPGTCEPPTAAGSKSTTTFPALTVKDKVNNVDTGRLTQITVDVPKESTGEHFIAWLGAWGGIQYTSVDAQDSTAAVPASLSGHVWAVLTNKADVPAAELDGVTVAGPEMLWVSQQWSSSDE

SEQ ID NO: 33985 - DNA, 2507 bp, Muscodor strobelii
  misc_feature: SGI EST ID NO. CUFF.80761.0
  misc_feature: Variant of the nucleotide sequence at SEQ ID NO 33983
caataacgaactatagagagcgcgttaaggctttgaatgctgcgactgtcggtggcttatatgttcggaatcattttgcccgaattcttggctcaagcgattaagatgcgacaaagacaccacagcccgcatttgctgtaaagtggtattgagccaagcaatgttggccgtacagtatagctattccgagcatatggtgtaaaatgattggaatttctattttcggctgcctgtttccattgcattggtgcgccccctccctagatgcgagatgtgataaataagaacatgtagacgataaagatattgtgtatcatgatccagcaatctatccccaatacacgattcgttctcatcaactctaattttttgtatcataatgttgttgtctcatttctcaagcccggcgcttcggctggcattctttgcttctcttactgctgccactcactttgaagtaactgttggcaaagacagtaaattggaattcaatccagcgatcataaatgcacagatcggtgacacagtcacatataaattcttctctaaaaaccacgctgtagctcagtcaacttttgcagacccctgccacctccaggagaatggcatattctcaggctttactccaaatgattcaccagatgttgcagctgcaactgatttcacaataacgataaacgatacgaaaccactctggttctactgcccgcaaacaaatggaaatcattgccaaagcggaatggtacacgcgataaatgctcccgctaccggaaacaccttcgatgcctacaagaccaaggcacaaactgctgcaacccctagtacgccctcggctgatgtattacctgctggcggtcttcgaaagacacacgtcaatgtcggtgtcggcactgatctgattttcgacccgagtaatattttcgagcctattggtactgttatcgagtttaattacaatccgaaaaatcactccattgttcaatcatcctttgatcaaccatgcgctccaatcgctcgtggaggctttgcggccccttttgtccccctagagaagtcatcaggcgtgacgtttgaagtcactatcacgaatatggatcctgtctggttctactgcgcccagactgccaaatctcactgtcaatccggaatggtcggcgctttgaacgcggcgacagagggtgacaagacattcgatgccttcaaagcacttgctgctaaagcgcctcctagcacaactgttcccgacacaccacttgtgggagcgctcaagatcaacggtacttttatcaacgatgtcggaagctcagtactagatgtgacaacccttgatctttctctcggttcctacacaccagcaccagggatgaactatccaccatacatcggaggaatggctggtggtaatcaacctgccaattacggttggggcaacaacatttcagatgaagcagttttgatcttccagtctctccagtacatcgacaactttattgtggtcctcctgttagatggctacaatagcttggtgcaaggcgattgggctaatgtgtatccccgctcgattcaaaactcgctaggatcgcttgcggctcagagtttgattcatcgcagaagctatacggatacattgcaacactttagcaaagatgtagtcagtgtctgcgactacaatctcgattcggaaatggacagcgtcgacgactggctagcgacagtcttgaaaggcttacatctctctatgggtactacgcttgacgccattacgaaactggcggagagcgactcctgggccatacctattctcgcaacggcctttggcacacagactcgtatggccgcgctcgtgaacctcatgcaaaatcatatcgtcgctgctgcaccgcgcgaagttctactcccccaagctctctcgacatcttacattgcatcgcaatatgcgacgcccggaacctgcgagcctcccactgccgctggctcaaaatccacgaccacttttcccgcgcttactgtcaaagacaaagtcaacaatgtggatacgggcagattgacacagatcactgtagatgtcccaaaggagagcaccggcgagcatttcattgcttggctgggcgcctggggtggtattcagtacacctctgtggatgcgcaggatagtacagccgcggtacctgcttcgctgtcgggacatgtgtgggctgtcctgacaaacaaagctgatgtcccggctgcagagctagacggtgtcactgtagctggcccagagatgctctgggtttcgcaacagtggtcatcatcggacgagtaaagtgtaattattgacgatattatgaatatttcctagttatttttatatagagtctgggtattacattgctgaattatcgttatgggggccattgtcattggaaatagactaataagaatgcttgccatggagtatagagttttgataagatatcagaaaggaagacagtatttccatgcatagagctaatgatgatcattca

SEQ ID NO: 33986 - DNA, 1422 bp, Muscodor strobelii
  misc_feature: SGI cDNA ID NO. 571733
  misc_feature: Reduced expression when VOC is produced
  misc_feature: Encodes the peptide sequence at SEQ ID NO 33987
atgccgtcttcttgcgcaatatcatgttgctcggcgctttcgactgcgctggggaataaggtatatttcccaggagactcagtctacaacgacacagagcaatcgtactggtcaacgcaggaggcacttttaactccttcgtgtgttgttaagccagaggtttcgactgacgtggcgaatttcatgtcagtcgttaccgatatcacgaattgcagttttgccatccggactcagggacatgcgccgaatgcaggcgctgccaacattcaaaatggcgtgacgctggacttatcatatctgaactctacaactataagcgaggatcactccgtagcgaatgttgagaccggttcgcgatgggttgatgtttataaaactctcaatccttacaacaaaacggtcaacggagggcgcaatggaggcgttggtgtcgggggagtcacactaggaggtggcatctcacacttttcgccccgagttggcttcacatgcgatacagtgcagaacttcgaggttgtgctcgcggacgcttctatcgtcaatgccaacgcatcctcgaaccctgacctgtttcgtgcactgaaaggcggtggcaataattttggtgttgtgacgcgcattgactacagtactgtggatatcacagatgttaggggagggctcctctttcagagtggtgactatgtcaaagaagtcgtaacagcgttcggaaatattgctgccagtaaggagtttgatatacatacatcactagtcacgagtctcatattcaactcgacttcgaaagagtggctagctttgagtatcccgatctacacattgcccgagctcaatccgcccgtgtaccaggagttattcgccatcccaaacattacgaccgaaacgacagctatgattgagagcgttgcaactttagcagatgagccaggcattgctcaaaaatatcagacgttctatactagcacttacgccgcatcatcggaactgcttgttgagctattcaacgtcgcaaatgaaacgatctatcccctcgacattcctgctgacgtgacgtggtctttcgctcttgagccatttccaactgtcttttcgaaacaaggtgaaggcaagaacgtgctgggtacctcggaggcagatgggaatggagctattattctcgccggtgcaagttggactgagcaaagttcatcaaaagtcgggcaaagcttgacgccgattatagtcaaagctatggatgatgcagcggaaaaggctggtggattacatagattcaagtatctgaattatgctgatcctaatcagaaggtctttgaaagctacggcgaagcgaacgccaactttttgaaagacacgagccggaagtacgatcccaagcaagtgtttcagaagaaggtgcctggagggttcaaattagggttatag

SEQ ID NO: 33987 - protein, 473 aa, Muscodor strobelii
  misc_feature: SGI Peptide ID NO. 571733
  misc_feature (46)..(183): Pfam Id: PF01565 Pfam Desc: FAD binding domain
  misc_feature (9)..(471): NCBI GI: 121719474 Blast Desc: FAD binding domain protein [Aspergillus clavatus NRRL 1] gi|119404634|gb|EAW15010.1| FAD binding domain protein [Aspergillus clavatus NRRL 1]
  misc_feature (1)..(471): NCBI GI: 238845686 Blast Desc: FAD binding domain-containing protein [Microsporum canis CBS 113480]
  misc_feature (8)..(471): NCBI GI: 238498002 Blast Desc: oxidoreductase, FAD-binding, [Aspergillus flavus NRRL3357] gi|220693510|gb|EED49855.1| oxidoreductase, FAD-binding, [Aspergillus flavus NRRL3357]
  misc_feature (3)..(471): NCBI GI: 242765021 Blast Desc: conserved [Talaromyces stipitatus ATCC 10500] gi|218724086|gb|EED23503.1| conserved [Talaromyces stipitatus ATCC 10500]
  misc_feature (9)..(471): NCBI GI: 156061767 Blast Desc: SS1G_03029 [Sclerotinia sclerotiorum 1980] gi|154700430|gb|EDO00169.1| SS1G_03029 [Sclerotinia sclerotiorum 1980]
  misc_feature (1)..(471): NCBI GI: 115401312 Blast Desc: conserved [Aspergillus terreus NIH2624] gi|114190185|gb|EAU31885.1| conserved [Aspergillus terreus NIH2624]
  misc_feature (24)..(471): NCBI GI: 154323027 Blast Desc: BC1G_00856 [Botryotinia fuckeliana B05.10] gi|150848190|gb|EDN23383.1| BC1G_00856 [Botryotinia fuckeliana B05.10]
  misc_feature (9)..(471): NCBI GI: 159129835 Blast Desc: oxidoreductase, FAD-binding, [Aspergillus fumigatus A1163]
  misc_feature (9)..(471): NCBI GI: 71002198 Blast Desc: oxidoreductase, FAD-binding [Aspergillus fumigatus Af293] gi|66853418|gb|EAL93742.1| oxidoreductase, FAD-binding, [Aspergillus fumigatus Af293]
  misc_feature (9)..(471): NCBI GI: 119481753 Blast Desc: oxidoreductase, FAD-binding, [Neosartorya fischeri NRRL 181] gi|119409059|gb|EAW19008.1| oxidoreductase, FAD-binding, [Neosartorya fischeri NRRL 181]
  misc_feature: Useful for introducing or modulating the production of volatile compounds
MPSSCAISCCSALSTALGNKVYFPGDSVYNDTEQSYWSTQEALLTPSCVVKPEVSTDVANFMSVVTDITNCSFAIRTQGHAPNAGAANIQNGVTLDLSYLNSTTISEDHSVANVETGSRWVDVYKTLNPYNKTVNGGRNGGVGVGGVTLGGGISHFSPRVGFTCDTVQNFEVVLADASIVNANASSNPDLFRALKGGGNNFGVVTRIDYSTVDITDVRGGLLFQSGDYVKEVVTAFGNIAASKEFDIHTSLVTSLIFNSTSKEWLALSIPIYTLPELNPPVYQELFAIPNITTETTAMIESVATLADEPGIAQKYQTFYTSTYAASSELLVELFNVANETIYPLDIPADVTWSFALEPFPTVFSKQGEGKNVLGTSEADGNGAIILAGASWTEQSSSKVGQSLTPIIVKAMDDAAEKAGGLHRFKYLNYADPNQKVFESYGEANANFLKDTSRKYDPKQVFQKKVPGGFKLGL

SEQ ID NO: 33988 - DNA, 2390 bp, Muscodor strobelii
  misc_feature: SGI EST ID NO. CUFF.80400.0
  misc_feature: Variant of the nucleotide sequence at SEQ ID NO 33986
ggaatggacattccctcgatcaatatttgcccgagcataaaataagctcggagaagcttatgttaagcgtctattgcaaaggcactggatagacatagactgacaattttgcggtcgatttttgttgttagcgataagccagagaattcttaatggcagctaaatcagtcagttttaactagtaaggtctgagtatacagactgtgagcgtatcccatcatgtgtccaattaaccagcctatcatcattcgattgggctaaagactgagccctgagctaaagctatcgagcattgtatgtgatgagaccgatgtagaagccgatacaagaggatgttgttctggtaggattcatatttagcgtgggttgagtgctatccccggatttagtttgagagcgaaggattcaatcggacccggctccccggcgtttcttctttcttggcggtcgttcttcggggctactctggggtacccatcataatacaccttgttagtattagtcactatgctgacctggatcaagatgaatgatatatgggatttaactaaaactcgcttattcgaagggcattcctttcttcctctctttccctgcactacaagatatttgtctttattccttaaccgaccttgtcgattcgcaatctcaagctatcgcatcacgaatctaacccgatgccgtcttcttgcgcaatatcatgttgctcggcgctttcgactgcgctggggaataaggtatatttcccaggagactcagtctacaacgacacagagcaatcgtactggtcaacgcaggaggcacttttaactccttcgtgtgttgttaagccagaggtttcgactgacgtggcgaatttcatgtcagtcgttaccgatatcacgaattgcagttttgccatccggactcagggacatgcgccgaatgcaggcgctgccaacattcaaaatggcgtgacgctggacttatcatatctgaactctacaactataagcgaggatcactccgtagcgaatgttgagaccggttcgcgatgggttgatgtttataaaactctcaatccttacaacaaaacggtcaacggagggcgcaatggaggcgttggtgtcgggggagtcacactaggaggtggcatctcacacttttcgccccgagttggcttcacatgcgatacagtgcagaacttcgaggttgtgctcgcggacgcttctatcgtcaatgccaacgcatcctcgaaccctgacctgtttcgtgcactgaaaggcggtggcaataattttggtgttgtgacgcgcattgactacagtactgtggatatcacagatgttaggggagggctcctctttcagagtggtgactatgtcaaagaagtcgtaacagcgttcggaaatattgctgccagtaaggagtttgatatacatacatcactagtcacgagtctcatattcaactcgacttcgaaagagtggctagctttgagtatcccgatctacacattgcccgagctcaatccgcccgtgtaccaggagttattcgccatcccaaacattacgaccgaaacgacagctatgattgagagcgttgcaactttagcagatgagccaggcattgctcaaaaatatcagacgttctatactagcacttacgccgcatcatcggaactgcttgttgagctattcaacgtcgcaaatgaaacgatctatcccctcgacattcctgctgacgtgacgtggtctttcgctcttgagccatttccaactgtcttttcgaaacaaggtgaaggcaagaacgtgctgggtacctcggaggcagatgggaatggagctattattctcgccggtgcaagttggactgagcaaagttcatcaaaagtcgggcaaagcttgacgccgattatagtcaaagctatggatgatgcagcggaaaaggctggtggattacatagattcaagtatctgaattatgctgatcctaatcagaaggtctttgaaagctacggcgaagcgaacgccaactttttgaaagacacgagccggaagtacgatcccaagcaagtgtttcagaagaaggtgcctggagggttcaaattagggttatagaaagaacatgatgaacaatcgccttgcgaatgagggccgagacaaattcaaagctatataacaatacgaaactagtattacgagtcatgttgactacttgtctggcttttcctgatgttaaagacagcaatggtcggtatcaaagtctcacggacttttacgaatccttcgccccgtagaatagactcaacggctctatcatgacgagatagattactctcatctgtgagctaatcttcccgagaagagaaacctcgagtaattcgtccacatttccggacaccaagtcgg

SEQ ID NO: 33989 - DNA, 585 bp, Muscodor strobelii
  misc_feature: SGI cDNA ID NO. 571734
  misc_feature: Encodes the peptide sequence at SEQ ID NO 33990
atgaattattctgtcatcttcctcatttgcttcttgggacttgctgtctgctttccggcggacccggcggagccttccaagttctctgatctcaaacatctgttgtacgagaacgagatcatcgaccctgatgcatggtgggctgcggattttctccttagtcgtcaaaatcatgtccgcagcgacgggactttgacgaacattacagatacaactgatacgactccgactaacggcacgcgtatcgcaactatgaacccggacagtgtaaaatgctataattggcagcccattgactactttggaaccatgttagctggcatccaattaggcaaacaatgcgatggccgttctttccccggaaatacgaaatggtccagccttgatcctacaggcgtagcgcgtgttttcgcatgcaattggggcggcagcgctcaatgtaatattggcgagatacttgaagctattggactaatcatagaagaatgtaaaggcggcagcttcaccggagttgtatacacgaaaagtaagaaggcgtacggaatggacattccctcgatcaatatttgcccgagcataaaataa

SEQ ID NO: 33990 - protein, 194 aa, Muscodor strobelii
  misc_feature: SGI Peptide ID NO. 571734
MNYSVIFLICFLGLAVCFPADPAEPSKFSDLKHLLYENEIIDPDAWWAADFLLSRQNHVRSDGTLTNITDTTDTTPTNGTRIATMNPDSVKCYNWQPIDYFGTMLAGIQLGKQCDGRSFPGNTKWSSLDPTGVARVFACNWGGSAQCNIGEILEAIGLIIEECKGGSFTGVVYTKSKKAYGMDIPSINICPSIK

SEQ ID NO: 33991 - DNA, 387 bp, Muscodor strobelii
  misc_feature: SGI cDNA ID NO. 571735
  misc_feature: Encodes the peptide sequence at SEQ ID NO 33992
atgaattattctgtcatcttcctcatttgcttcttgggacttgctgtctgctttccggcggacccggcggagccttccaagttctctgatctcaaacatctgttgtacgagaacgagatcatcgaccctgatgcatggtgggctgcggattttctccttagtcgtcaaaatcatgtccgcagcgacgggactttgacgaacattacagatacaactgatacgactccgactaacggcacgcgtatcgcaactatgaacccggacagtgtaaaatgctataattggcagcccattgactactttggaaccatgttagctggcatccaattaggcaaacaatgcgatggccgttctttccccggaaatacgaaatggtccagcctgtga

SEQ ID NO: 33992 - protein, 128 aa, Muscodor strobelii
  misc_feature: SGI Peptide ID NO. 571735
MNYSVIFLICFLGLAVCFPADPAEPSKFSDLKHLLYENEIIDPDAWWAADFLLSRQNHVRSDGTLTNITDTTDTTPTNGTRIATMNPDSVKCYNWQPIDYFGTMLAGIQLGKQCDGRSFPGNTKWSSL

SEQ ID NO: 33993 - DNA, 321 bp, Muscodor strobelii
  misc_feature: SGI cDNA ID NO. 571736
  misc_feature: Encodes the peptide sequence at SEQ ID NO 33994
atgggtgtccacaacatcgagactaaggccgcctttgaggaggccatcaaggccaacaaggtcgtccttctcgactgcttcgctacctggtgcggtccttgcaaggccattgcccccaagctcgtcgagttctccaacgatgagcagtacaaggatatctacttcgccaagattgacgtcgatgacctccccgaggtcgctgccgagctgaagatcaccgccatgcccaccttcaagatcttcaaggacggaaaggagctcgacaccctcgtcggtgctagccccccggccctcgtcagccttctccagaagggtttataa

SEQ ID NO: 33994 - protein, 106 aa, Muscodor strobelii
  misc_feature: SGI Peptide ID NO. 571736
  misc_feature (7)..(105): Pfam Id: PF00085 Pfam Desc: Thioredoxin
  misc_feature (1)..(106): NCBI GI: 164424978 Blast Desc: NCU06556 [Neurospora crassa OR74A] gi|12802362|gb|AAK07845.1|AF309689_7 thioredoxin G6G8.7 [Neurospora crassa] gi|157070737|gb|EAA33027.2| NCU06556 crassa
  misc_feature (1)..(106): NCBI GI: 156049655 Blast Desc: SS1G_08534 [Sclerotinia sclerotiorum 1980] gi|154692933|gb|EDN92671.1| SS1G_08534 [Sclerotinia sclerotiorum 1980]
  misc_feature (1)..(104): NCBI GI: 85718172 Blast Desc: thioredoxin [Cryphonectria parasitica]
  misc_feature (1)..(103): NCBI GI: 39944450 Blast Desc: conserved [Magnaporthe grisea 70-15] gi|59802825|gb|AAX07630.1| thioredoxin-like protein [Magnaporthe grisea] gi|145014982|gb|EDJ99550.1| conserved [Magnaporthe grisea
  misc_feature (1)..(106): NCBI GI: 154292057 Blast Desc: thioredoxin [Botryotinia fuckeliana B05.10] gi|150846320|gb|EDN21513.1| thioredoxin [Botryotinia fuckeliana B05.10]
  misc_feature (1)..(105): NCBI GI: 240106763 Blast Desc: thioredoxin, [Coccidioides posadasii C735 delta SOWgp]
  misc_feature (1)..(104): NCBI GI: 256727377 Blast Desc: NECHADRAFT_99138 [Nectria haematococca mpVI 77-13-4]
  misc_feature (3)..(103): NCBI GI: 145228757 Blast Desc: An01g02500 [Aspergillus niger] gi|134054779|emb|CAK43619.1| protein product [Aspergillus niger]
  misc_feature (1)..(104): NCBI GI: 261354933 Blast Desc: thioredoxin [Verticillium albo-atrum VaMs.102]
  misc_feature (1)..(106): NCBI GI: 34100668 Blast Desc: thioredoxin II [Podospora anserina] gi|170940137|emb|CAP65363.1| protein product [Podospora anserina]
  misc_feature (12)..(97): SWISSPROT Homolog: EC 1.8.1.9 Thioredoxin-disulfide reductase
MGVHNIETKAAFEEAIKANKVVLLDCFATWCGPCKAIAPKLVEFSNDEQYKDIYFAKIDVDDLPEVAAELKITAMPTFKIFKDGKELDTLVGASPPALVSLLQKGL

SEQ ID NO: 33995 - DNA, 983 bp, Muscodor strobelii
  misc_feature: SGI EST ID NO. CUFF.80414.0
  misc_feature: Variant of the nucleotide sequence at SEQ ID NO 33993
gtaaaagcaaagcaatccatccaacggtaacaagctcccgccactgcatgccctctctcggtgattccatcctgctgtataatccgctagaaacaggttgcactgccccaagctacagctcccgaggtccctaatccgtctcagcaggcttgttgtagaaggtatcattaccaattcgcagctccccgcatcgccgtctgggttctgtcaccaccatacataaaatcactctgcccctcgccttattacgtcccgcccactccacttcaatgtcaacattcttcctccgatccgctgccatccgacgatcagccttctcactacctgcgatttatcgaccaagcatcactcgccaattctcttccacatcagcaaatatgggtgtccacaacatcgagactaaggccgcctttgaggaggccatcaaggccaacaaggtcgtccttctcgactgcttcgctacctggtgcggtccttgcaaggccattgcccccaagctcgtcgagttctccaacgatgagcagtacaaggatatctacttcgccaagattgacgtcgatgacctccccgaggtcgctgccgagctgaagatcaccgccatgcccaccttcaagatcttcaaggacggaaaggagctcgacaccctcgtcggtgctagccccccggccctcgtcagccttctccagaagggtttataagcgcgcgattagactagtccgttatattgaacgatatctgcgtggttgtgctatgagaacatgagaagatcagcttctatcgttagtctcgatccgatctggatatagatgaggatgctacaggcgctgtgtgcgtgaaggcagattccgacatcgacacgaaacgataaatacaattatagattaggattaacaaagttgattcgcctccactactagtgaccttgatatttgcattgcatagtgtgtgacgcgctactactaaactgcgataaccgaactgcg

SEQ ID NO: 33996 - DNA, 738 bp, Muscodor strobelii
  misc_feature: SGI cDNA ID NO. 571737
  misc_feature: Encodes the peptide sequence at SEQ ID NO 33997
atggattctctgctcaaaattggaatggtgaacggcccacaggacatctcggaaggcttcacatgcataagcaatgcgttcggccgtcaagcacaagacgcaatatggatggccttcaacccaggatgggacacaccagaaggccgagccaagagagaagagactatgatccggagatgggagggcataacaaccgataaattcggcaacccgaatgaaatactcctcaaagccacattaccaaaccccaagcaaccggagcgtcgaatgatcgtgggcttcgcgatttgggcacaagcatcaaatgtggaaggctacggggacaagacggcgggcgatatcagaagcgttctaaatctagaagctttacatccgggtaacgagccagaacagcgatttctcgaacaaatgtgtaattcactgctgaagcgccgcgttgaattcgtcaaagagagggctacggatgacccaccagtaatcatggctcttgatctatgcgctacggacccagcctttcaacgtcgtggggtcgcgacgaaactggtgcaatggggtcttgatgaggcaaagagacgcggtatcaaatatgtcactactgaggcttcgagtatgggtcggcatgcgtaccagaaactgggtttcgtgccggaggctgaagatatagtttatgaagttgacgaggagtttgctactcgtgataagccgccgaataggtttatggtttatacgattaggtga

SEQ ID NO: 33997 - protein, 245 aa, Muscodor strobelii
  misc_feature: SGI Peptide ID NO. 571737
  misc_feature (148)..(215): Pfam Id: PF00583 Pfam Desc: Acetyltransferase (GNAT) family
  misc_feature (162)..(215): Pfam Id: PF00583 Pfam Desc: Acetyltransferase (GNAT) family
  misc_feature (2)..(240): NCBI GI: 255955349 Blast Desc: Pc21g14110 [Penicillium chrysogenum Wisconsin 54-1255] gi|211590138|emb|CAP96308.1| Pc21g14110 [Penicillium chrysogenum Wisconsin 54-1255]
  misc_feature (5)..(240): NCBI GI: 256733440 Blast Desc: NECHADRAFT_36686 [Nectria haematococca mpVI 77-13-4]
  misc_feature (5)..(240): NCBI GI: 67902036 Blast Desc: AN8005.2 [Aspergillus nidulans FGSC A4] gi|40739618|gb|EAA58808.1| AN8005.2 [Aspergillus nidulans FGSC A4] gi|259480756|tpe|CBF73690.1| TPA: conserved [Aspergillus FGSC
  misc_feature (1)..(240): NCBI GI: 119485895 Blast Desc: GNAT family acetyltransferase, [Neosartorya fischeri NRRL 181] gi|119410446|gb|EAW20393.1| GNAT family acetyltransferase, [Neosartorya fischeri NRRL 181]
  misc_feature (5)..(240): NCBI GI: 242782613 Blast Desc: conserved [Talaromyces stipitatus ATCC 10500] gi|218720182|gb|EED19601.1| conserved [Talaromyces stipitatus ATCC 10500]
  misc_feature (5)..(240): NCBI GI: 169763870 Blast Desc: [Aspergillus oryzae RIB40] gi|83770863|dbj|BAE60996.1| protein product [Aspergillus oryzae]
  misc_feature (5)..(240): NCBI GI: 238489847 Blast Desc: conserved [Aspergillus flavus NRRL3357] gi|220698549|gb|EED54889.1| conserved [Aspergillus flavus NRRL3357]
  misc_feature (14)..(240): NCBI GI: 189207905 Blast Desc: conserved [Pyrenophora tritici-repentis Pt-1C-BFP] gi|187976379|gb|EDU43005.1| conserved [Pyrenophora tritici-repentis Pt-1C-BFP]
  misc_feature (7)..(240): NCBI GI: 39977435 Blast Desc: MGG_06620 [Magnaporthe grisea 70-15] gi|145015932|gb|EDK00422.1| MGG_06620 [Magnaporthe grisea 70-15]
  misc_feature (7)..(218): NCBI GI: 169615190 Blast Desc: SNOG_10751 [Phaeosphaeria nodorum SN15] gi|160702904|gb|EAT82145.2| SNOG_10751 [Phaeosphaeria nodorum SN15]
MDSLLKIGMVNGPQDISEGFTCISNAFGRQAQDAIWMAFNPGWDTPEGRAKREETMIRRWEGITTDKFGNPNEILLKATLPNPKQPERRMIVGFAIWAQASNVEGYGDKTAGDIRSVLNLEALHPGNEPEQRFLEQMCNSLLKRRVEFVKERATDDPPVIMALDLCATDPAFQRRGVATKLVQWGLDEAKRRGIKYVTTEASSMGRHAYQKLGFVPEAEDIVYEVDEEFATRDKPPNRFMVYTIR

SEQ ID NO: 33998 - DNA, 829 bp, Muscodor strobelii
  misc_feature: SGI EST ID NO. CUFF.80417.0
  misc_feature: Variant of the nucleotide sequence at SEQ ID NO 33996
ggattctctgctcaaaattggaatggtgaacggcccacaggacatctcggaaggcttcacatgcataagcaatgcgttcggccgtcaagcacaagacgcaatatggatggccttcaacccaggatgggacacaccagaaggccgagccaagagagaagagactatgatccggagatgggagggcataacaaccgataaattcggcaacccgaatgaaatactcctcaaagccacattaccaaaccccaagcaaccggagcgtcgaatgatcgtgggcttcgcgatttgggcacaagcatcaaatgtggaaggctacggggacaagacggcgggcgatatcagaagcgttctaaatctagaagctttacatccgggtaacgagccagaacagcgatttctcgaacaaatgtgtaattcactgctgaagcgccgcgttgaattcgtcaaagagagggctacggatgacccaccagtaatcatggctcttgatctatgcgctacggacccagcctttcaacgtcgtggggtcgcgacgaaactggtgcaatggggtcttgatgaggcaaagagacgcggtatcaaatatgtcactactgaggcttcgagtatgggtcggcatgcgtaccagaaactgggtttcgtgccggaggctgaagatatagtttatgaagttgacgaggagtttgctactcgtgataagccgccgaataggtttatggtttatacgattaggtgatcgtgttggtggaaaggagtataatcatgtatacccggagttaaagagtcatgctagacaatgaaacatcaaatcaagtgggttctgtagaac

SEQ ID NO: 33999 - DNA, 975 bp, Muscodor strobelii
  misc_feature: SGI cDNA ID NO. 571738
  misc_feature: Elevated expression when VOC is produced
  misc_feature: Encodes the peptide sequence at SEQ ID NO 34000
atgagtgagatactggttgtgacgagcccaagtggcaagcaatgcaaccaccttcttcctcacttgtacgataaaggcaaattcaaattacgacttgccgctcattcagagacatctgtcgcgaagcttaaggcggcatatccaaatgctgatgcacgggcctgcgatataagctcacgagaagactgccgcacactcttacaaggagcgacagcagtctaccacgtaggaccatcgtttcattcagcagagaaggagatgggcatcaatatgatcgacgctgcagtcgttgagtctcaacgccctggaaacgtctttaagcactttgttttctctagtgtcctcggaacacaacatcgacagctgatgcaacacgatctcaaatcctatgtagaggagcgactgttcctcagtccgctccagtggacagtgctgcaacccacgaacttcatgaattcttatcccatccagcaaatggcgaaggccgagcgacccgaatacgcgcacaagttctcgcccgtgcctcgaaatagcgtcgttaacctcgacgatctcgccgaggtcgctgcgaaggtactcaatgagagggaagcacatttttacgcccagtatccattgtgctcgacacttcctatcagtgagaacgagatcctgggcatcatagagaatcagattggaaagaaaatcaagacttcgactccttccatggaagaaggaacccaagcgatccttaactttttgtacttgggtaatagtagagatgagtttatcctaatcaagagtaaggagggagccgtttctgcagcgcagggagatccgcgtccagacatcgtgcgcgacgaggcacagagattgttgatgttttaccagcataggggtcttacgggcagcccaaatgtgatgcgatggctgctgggtcgcgagcccacgtcggttgaggattatgtgaagcgtgagattgagaaggcaggttag

SEQ ID NO: 34000 - protein, 324 aa, Muscodor strobelii
  misc_feature: SGI Peptide ID NO. 571738
  misc_feature (5)..(233): Pfam Id: PF05368 Pfam Desc: NmrA-like family
  misc_feature (1)..(316): NCBI GI: 67516485 Blast Desc: AN0524.2 [Aspergillus nidulans FGSC A4] gi|40747467|gb|EAA66623.1| AN0524.2 [Aspergillus nidulans FGSC A4] gi|259489219|tpe|CBF89311.1| TPA: conserved [Aspergillus FGSC
  misc_feature (1)..(316): NCBI GI: 238501334 Blast Desc: conserved [Aspergillus flavus NRRL3357] gi|220692138|gb|EED48485.1| conserved [Aspergillus flavus NRRL3357]
  misc_feature (56)..(316): NCBI GI: 225558608 Blast Desc: conserved [Ajellomyces capsulatus G186AR]
  misc_feature (3)..(323): NCBI GI: 256722163 Blast Desc: NECHADRAFT_55574 [Nectria haematococca mpVI 77-13-4]
  misc_feature (2)..(320): NCBI GI: 145252874 Blast Desc: An16g06480 [Aspergillus niger] gi|134083505|emb|CAK46982.1| protein product [Aspergillus niger]
  misc_feature (1)..(137): NCBI GI: 169768908 Blast Desc: [Aspergillus oryzae RIB40] gi|83766782|dbj|BAE56922.1| protein product [Aspergillus oryzae]
  misc_feature (56)..(159): NCBI GI: 154286490 Blast Desc: HCAG_01086 [Ajellomyces capsulatus NAm1] gi|150407681|gb|EDN03222.1| HCAG_01086 [Ajellomyces capsulatus NAm1]
  misc_feature (4)..(320): NCBI GI: 170754481 Blast Desc: nucleoside-diphosphate-sugar epimerase [Clostridium botulinum B1 str. Okra] gi|169119693|gb|ACA43529.1| nucleoside-diphosphate-sugar epimerase [Clostridium botulinum B1
  misc_feature (210)..(312): NCBI GI: 169768910 Blast Desc: [Aspergillus oryzae RIB40] gi|83766783|dbj|BAE56923.1| protein product [Aspergillus oryzae]
  misc_feature (5)..(317): NCBI GI: 193782742 Blast Desc: SMa2109 [Sinorhizobium meliloti 1021] gi|193073198|gb|AAK65808.2| conserved [Sinorhizobium meliloti 1021]
  misc_feature: Useful for introducing or modulating the production of volatile compounds
MSEILVVTSPSGKQCNHLLPHLYDKGKFKLRLAAHSETSVAKLKAAYPNADARACDISSREDCRTLLQGATAVYHVGPSFHSAEKEMGINMIDAAVVESQRPGNVFKHFVFSSVLGTQHRQLMQHDLKSYVEERLFLSPLQWTVLQPTNFMNSYPIQQMAKAERPEYAHKFSPVPRNSVVNLDDLAEVAAKVLNEREAHFYAQYPLCSTLPISENEILGIIENQIGKKIKTSTPSMEEGTQAILNFLYLGNSRDEFILIKSKEGAVSAAQGDPRPDIVRDEAQRLLMFYQHRGLTGSPNVMRWLLGREPTSVEDYVKREIEKAG

SEQ ID NO: 34001 - DNA, 564 bp, Muscodor strobelii
  misc_feature: SGI EST ID NO. CUFF.80420.0
  misc_feature: Variant of the nucleotide sequence at SEQ ID NO 33999
acgaacttcatgaattcttatcccatccagcaaatggcgaaggccgagcgacccgaatacgcgcacaagttctcgcccgtgcctcgaaatagcgtcgttaacctcgacgatctcgccgaggtcgctgcgaaggtactcaatgagagggaagcacatttttacgcccagtatccattgtgctcgacacttcctatcagtgagaacgagatcctgggcatcatagagaatcagattggaaagaaaatcaagacttcgactccttccatggaagaaggaacccaagcgatccttaactttttgtacttgggtaatagtagagatgagtttatcctaatcaagagtaaggagggagccgtttctgcagcgcagggagatccgcgtccagacatcgtgcgcgacgaggcacagagattgttgatgttttaccagcataggggtcttacgggcagcccaaatgtgatgcgatggctgctgggtcgcgagcccacgtcggttgaggattatgtgaagcgtgagattgagaaggcaggttaggcgaatcgcagctgtcaatatgaatcgaat

SEQ ID NO: 34002 - DNA, 1254 bp, Muscodor strobelii
  misc_feature: SGI cDNA ID NO. 571739
  misc_feature: Encodes the peptide sequence at SEQ ID NO 34003
atgtcggacagtaaagtgaaaaccaagagcccgtgggatgcgttaccagatgagcttgtggaaattatcttcaatgagacgcccgactccgggttgatgaacctgtcacatttgtttcgcgattatgtctatatggaagatcgtgcgagagatcttataaagcaacagaccgaaagagaagcaatactacctctcatggctcgtttcaattttgccgccgacccaacagtgcccatcgataaggaattcgttcaactgattcgcaacgagtacgagaaaattgaagaaggacacaaccagagatctggcttatcgaagggtcatgctaactactcttcatggagatatggcagatactatgaatacggtccttatcttcatggccgcggaacactagatgcgcttgcagcagccattggagatgtcgagtacatcacatttttgaatgaacttaagccaatgagagacgacgtcagaagcttgcgctcttgcacacgcgtcttgtggtcaaccacggaaacttggagaagctatctcaggcacaagaaacagacaggagaggctgtcgaggatgtcaacccatttcgagggcatacttcgtgtgacaaacacgttgatatggatgacatttccagagatgaaaaaatcccgatgtgtgagaccactgccgacatagcgttgatatgcgggagagaagacatgcttaaatatcttctcgatatggattatgaattcaacactacaatacgctccaagcacaaaagcacggagtgggtgggatcgttgctcaatagagcatgcaagcgcctcctggttaacacagtcgaatatatactcgagaaattcaacgtcagcgaccaaatggccacggttgcgctcacgcaagtgtctacatcgcagaaaccagaaatagaacttttcgacaaagaaatcatcaaacagctgaacgactatatcaacattgtaaatataagccgcgagcgcgttgatgtgatcaaaaggaagaatactgacgaaaggggaaacatggtgaccaaaaccgaacgggtcacgaagcagataagacctatgatagaattgatcaatcttgacggacaagatctttcgaatagcatcaagatctttaacctattgcttaatcgtacgggcgtcttgccaaatggagatacgaaggaaaatatccgcacgctagcggaaagtcgcccaaatgacgaagacgccaaaaaactacttgagagagtcaataagctataa

SEQ ID NO: 34003 - protein, 417 aa, Muscodor strobelii
  misc_feature: SGI Peptide ID NO. 571739
MSDSKVKTKSPWDALPDELVEIIFNETPDSGLMNLSHLFRDYVYMEDRARDLIKQQTEREAILPLMARFNFAADPTVPIDKEFVQLIRNEYEKIEEGHNQRSGLSKGHANYSSWRYGRYYEYGPYLHGRGTLDALAAAIGDVEYITFLNELKPMRDDVRSLRSCTRVLWSTTETWRSYLRHKKQTGEAVEDVNPFRGHTSCDKHVDMDDISRDEKIPMCETTADIALICGREDMLKYLLDMDYEFNTTIRSKHKSTEWVGSLLNRACKRLLVNTVEYILEKFNVSDQMATVALTQVSTSQKPEIELFDKEIIKQLNDYINIVNISRERVDVIKRKNTDERGNMVTKTERVTKQIRPMIELINLDGQDLSNSIKIFNLLLNRTGVLPNGDTKENIRTLAESRPNDEDAKKLLERVNKL

SEQ ID NO: 34004 - DNA, 618 bp, Muscodor strobelii
  misc_feature: SGI EST ID NO. CUFF.80439.0
  misc_feature: Variant of the nucleotide sequence at SEQ ID NO 34002
ccgcggaacactagatgcgcttgcagcagccattggagatgtcgagtacatcacatttttgaatgaacttaagccaatgagagacgacgtcagaagcttgcgctcttgcacacgcgtcttgtggtcaaccacggaaacttggagaagctatctcaggcacaagaaacagacaggagaggctgtcgaggatgtcaacccatttcgagggcatacttcgtgtgacaaacacgttgatatggatgacatttccagagatgaaaaaatcccgatgtgtgagaccactgccgacatagcgttgatatgcgggagagaagacatgcttaaatatcttctcgatatggattatgaattcaacactacaatacgctccaagcacaaaagcacggagtgggtgggatcgttgctcaatagagcatgcaagcgcctcctggttaacacagtcgaatatatactcgagaaattcaacgtcagcgaccaaatggccacggttgcgctcacgcaagtgtctacatcgcagaaaccagaaatagaacttttcgacaaagaaatcatcaaacagctgaacgactatatcaacattgtaaatataagccgcgagcgcgttgatgtgatcaaaag

SEQ ID NO: 34005 - DNA, 1938 bp, Muscodor strobelii
  misc_feature: SGI cDNA ID NO. 571740
  misc_feature: Encodes the peptide sequence at SEQ ID NO 34006
atggccgaacgagattatgacggaagaaacgaggcccttgaccccgaggtcctctataccaaggaatactgcattgggggcggtagctttggcaaggtctacaaaggtgtcgagaagcgcacgggcgaggctgtagctatcaagattatcgatattgagagcgccgaagacgaagtcgaagatatcatccaggagattgccattctctccgagttgcgctcgccctttgtcaccaaatactacggctcctacatgaaaggcgctgaactatggattgtcatggaattctgctctggcggcagctgtgccgacttgatgaagcccggtatgattggggaagactacattgctatcgtcgtgagggaactattactcggcttggaatatctgcatgcggacaaaaaacttcaccgagacatcaaggcggccaacattctgctcgggtccaatggtcaggtcaagttggccgacttcggtgtctcgggccagctgtccgctactatgaccaagaagaatacctttgtcggcactccgttctggatggcccctgaggtcatcaaacagtctggctacgaccataaggcagatatctggtctcttggcattacggctctcgagcttgccaacggcgaaccgccctacgccgatatacatcccatgaaggtcctgtttctcatccccaagaaccctcccccaagattggacggaaacttcaccaaggcgttcaaagatttcattgaggtctgcttacagcgtgatccaaaagaccgattgtcggccagagatcttttaaaacaccctttcatccgaaaagcgaagaagacgtcatgtctgaccgagttgattgagcgctaccaaaggtggaaagccacacacaagtcggaagacgacgaatactacgaagagggtcatgaacctgcgcaatctcaacctgttaatgaggatgtgtgggatttcggtacggttcggatggtgggcgacagaggaggcatcggcaacaggccaggtttgaacgcattggatgagtcgaccagaaacactcgcgcatcaagaccgctggagggagactacggagagaggccccgaggaatgtctcccaacaagattcttgttccggacttggccgattcatccagttcaaccaccctcaagagtcacaacacaccgacggggactgcccgacagatctcgcctcagaggaagcccatttcttcaggagttccgcccctttcgccttcaaaagttgcacttcctccttcgccaccaaagcatgctcaggatcccaataccccgcgtcccatatcaaagcaggctccgcctaccttgagctcagtcgattatgaccaagctctgcaggagcaacttcaacaagatatgggattcctcaacataacatcgcactcacagcccataagccaacaaacgtcagtgtcatcgcagactcgcggccctcccaaaatgcacttgcccgaaattcctccgtatcgcggtcccagtgcccagatacccctacagcatgtaacaaatacagctcaacaacccagccctcaagcttttgcttccaaagcgcagcctaaacagctaccaccagctcctgagagttttccatcaccagctcccgccaatcccaatggggagctagatgctctgaacgacgtgatctttccagcactagaagaagccctgaagcgccgtcagatacgcttgcaacaattatatcgcaacgaaaaagtcatcaccccgcagcgacagcgtgccgaagcagcgcacgacaaaatccgcaaacatgtatataagctcgcaaacgtatgcaaggagttagaccgcctagacaaagctgagccagtcggcatgggtaaggatgtgggcacgtttctcgagggtctgttagaggagatccttgtgcgtgttgagcctttagatgaagaagagttttaa

SEQ ID NO: 34006 - protein, 645 aa, Muscodor strobelii
  misc_feature: SGI Peptide ID NO. 571740
  misc_feature (19)..(269): Pfam Id: PF00069 Pfam Desc: Protein kinase domain
  misc_feature (19)..(269): Pfam Id: PF07714 Pfam Desc: Protein tyrosine kinase
  misc_feature (126)..(269): Pfam Id: PF07714 Pfam Desc: Protein tyrosine kinase
  misc_feature (19)..(101): Pfam Id: PF07714 Pfam Desc: Protein tyrosine kinase
  misc_feature (1)..(644): NCBI GI: 46122713 Blast Desc: FG05734.1 [Gibberella zeae PH-1]
  misc_feature (3)..(644): NCBI GI: 256727313 Blast Desc: NECHADRAFT_33705 [Nectria haematococca mpVI 77-13-4]
  misc_feature (1)..(644): NCBI GI: 171695752 Blast Desc: protein product [Podospora anserina] gi|170948118|emb|CAP60282.1| protein product [Podospora anserina]
  misc_feature (1)..(644): NCBI GI: 145601265 Blast Desc: MGG_08746 [Magnaporthe grisea 70-15] gi|145009288|gb|EDJ93999.1| MGG_08746 [Magnaporthe grisea 70-15]
  misc_feature (1)..(518): NCBI GI: 164428588 Blast Desc: NCU00772 [Neurospora crassa OR74A] gi|157072205|gb|EAA35692.2| NCU00772 [Neurospora crassa OR74A]
  misc_feature (1)..(518): NCBI GI: 38636408 Blast Desc: related to severin kinase [Neurospora crassa]
  misc_feature (7)..(643): NCBI GI: 119177054 Blast Desc: CIMG_07521 [Coccidioides immitis RS]
  misc_feature (7)..(643): NCBI GI: 240107782 Blast Desc: Protein kinase domain containing protein [Coccidioides posadasii C735 delta SOWgp]
  misc_feature (12)..(639): NCBI GI: 226280106 Blast Desc: serine/threonine-protein kinase [Paracoccidioides brasiliensis Pb01]
  misc_feature (13)..(643): NCBI GI: 145247963 Blast Desc: An13g00890 [Aspergillus niger] gi|134080977|emb|CAK41491.1| protein product [Aspergillus niger]
MAERDYDGRNEALDPEVLYTKEYCIGGGSFGKVYKGVEKRTGEAVAIKIIDIESAEDEVEDIIQEIAILSELRSPFVTKYYGSYMKGAELWIVMEFCSGGSCADLMKPGMIGEDYIAIVVRELLLGLEYLHADKKLHRDIKAANILLGSNGQVKLADFGVSGQLSATMTKKNTFVGTPFWMAPEVIKQSGYDHKADIWSLGITALELANGEPPYADIHPMKVLFLIPKNPPPRLDGNFTKAFKDFIEVCLQRDPKDRLSARDLLKHPFIRKAKKTSCLTELIERYQRWKATHKSEDDEYYEEGHEPAQSQPVNEDVWDFGTVRMVGDRGGIGNRPGLNALDESTRNTRASRPLEGDYGERPRGMSPNKILVPDLADSSSSTTLKSHNTPTGTARQISPQRKPISSGVPPLSPSKVALPPSPPKHAQDPNTPRPISKQAPPTLSSVDYDQALQEQLQQDMGFLNITSHSQPISQQTSVSSQTRGPPKMHLPEIPPYRGPSAQIPLQHVTNTAQQPSPQAFASKAQPKQLPPAPESFPSPAPANPNGELDALNDVIFPALEEALKRRQIRLQQLYRNEKVITPQRQRAEAAHDKIRKHVYKLANVCKELDRLDKAEPVGMGKDVGTFLEGLLEEILVRVEPLDEEEF

SEQ ID NO: 34007 - DNA, 2797 bp, Muscodor strobelii
  misc_feature: SGI EST ID NO. CUFF.80528.1
  misc_feature: Variant of the nucleotide sequence at SEQ ID NO 34005
accgcctatcgtgcaggctaagaacatgcatgtgcttgtgtgctggtgtgcttgtgtgtttgggttagtacagtagtcttgtttgatgtgcacgtcaacacggcatttcccaaggctacatgtatgttatacgtgtaaagtcctactaacattatccattctccccgccagtttctctctggctcagggcgggattgcatgactttggccctcccttcctgaaacaaaacaaccttgagccctccaccaaacccaattggcacttgagcacatgtcacggatcaagctgagagctcctccctcctctgcctcttgcattccccatcttcaggttcagttgccttcttccccttcgttcgcgcaggcaatctcggctgcatgcattgaatgcccctgtccccttctaactgcactattgtccttgacattcatgcatcctgccggtgtcacttggggtgacctatcgccgtcatagcacatcgacccgtctaaattccgcggggcgtacactcctttcctcactccagcccacgctcactacattccgatccttgttgctcgacatttgaccacaagatccacgatctatttcacgcgttacgaagtcacgacgtcacgactctacgaatcccttactcctctggggaacgaaataaacatggccgaacgagattatgacggaagaaacgaggcccttgaccccgaggtcctctataccaaggaatactgcattgggggcggtagctttggcaaggtctacaaaggtgtcgagaagcgcacgggcgaggctgtagctatcaagattatcgatattgagagcgccgaagacgaagtcgaagatatcatccaggagattgccattctctccgagttgcgctcgccctttgtcaccaaatactacggctcctacatgaaaggcgctgaactatggattgtcatggaattctgctctggcggcagctgtgccgacttgatgaagcccggtatgattggggaagactacattgctatcgtcgtgagggaactattactcggcttggaatatctgcatgcggacaaaaaacttcaccgagacatcaaggcggccaacattctgctcgggtccaatggtcaggtcaagttggccgacttcggtgtctcgggccagctgtccgctactatgaccaagaagaatacctttgtcggcactccgttctggatggcccctgaggtcatcaaacagtctggctacgaccataaggcagatatctggtctcttggcattacggctctcgagcttgccaacggcgaaccgccctacgccgatatacatcccatgaaggtcctgtttctcatccccaagaaccctcccccaagattggacggaaacttcaccaaggcgttcaaagatttcattgaggtctgcttacagcgtgatccaaaagaccgattgtcggccagagatcttttaaaacaccctttcatccgaaaagcgaagaagacgtcatgtctgaccgagttgattgagcgctaccaaaggtggaaagccacacacaagtcggaagacgacgaatactacgaagagggtcatgaacctgcgcaatctcaacctgttaatgaggatgtgtgggatttcggtacggttcggatggtgggcgacagaggaggcatcggcaacaggccaggtttgaacgcattggatgagtcgaccagaaacactcgcgcatcaagaccgctggagggagactacggagagaggccccgaggaatgtctcccaacaagattcttgttccggacttggccgattcatccagttcaaccaccctcaagagtcacaacacaccgacggggactgcccgacagatctcgcctcagaggaagcccatttcttcaggagttccgcccctttcgccttcaaaagttgcacttcctccttcgccaccaaagcatgctcaggatcccaataccccgcgtcccatatcaaagcaggctccgcctaccttgagctcagtcgattatgaccaagctctgcaggagcaacttcaacaagatatgggattcctcaacataacatcgcactcacagcccataagccaacaaacgtcagtgtcatcgcagactcgcggccctcccaaaatgcacttgcccgaaattcctccgtatcgcggtcccagtgcccagatacccctacagcatgtaacaaatacagctcaacaacccagccctcaagcttttgcttccaaagcgcagcctaaacagctaccaccagctcctgagagttttccatcaccagctcccgccaatcccaatggggagctagatgctctgaacgacgtgatctttccagcactagaagaagccctgaagcgccgtcagatacgcttgcaacaattatatcgcaacgaaaaagtcatcaccccgcagcgacagcgtgccgaagcagcgcacgacaaaatccgcaaacatgtatataagctcgcaaacgtatgcaaggagttagaccgcctagacaaagctgagccagtcggcatgggtaaggatgtgggcacgtttctcgagggtctgttagaggagatccttgtgcgtgttgagcctttagatgaagaagagttttaatcttgcaaacggcgccgatgtatatacgtgtctatggcgtttcgattaccgttaccggcctttgtaaatagcatatgtggattagctctcagtcgtattactacgccttgctggatatcggtatgctttagtgcaaaatacggggtataaatagcggtcggtgcagctatcaggtataaaacagaagcagggcaggagaat

SEQ ID NO: 34008 - DNA, 2094 bp, Muscodor strobelii
  misc_feature: SGI cDNA ID NO. 571741
  misc_feature: Encodes the peptide sequence at SEQ ID NO 34009
atgaactctagtaacaaacgaccaagacttgaccgtgatgattctgcacctaataagcgaaccacagccaattcatcgaagcctcaactcacacgtgcctgcgcagaatgcaagaaacataaaatcaagtgtttcgtaacaccggggtcctcagcttgtaacaagtgcctgaaaagtggcatcgaatgcgtgccattcaacttcgctaagaagttcattgacgatgattcggcatggaaggctcaagctcaggcaaccattgatcaattgagggctgccgtcgaacagctactacagcacaacaatctccctggactagcgccatatgatgagacactctcgtcgctacaggtcgattctaatggtgcgaatgagagtccatcaacgactggacctatggatgctgtggccgcaggatctgctaattttacatccgagggtgcatctgcggatcagcagcaagacgactctgacttagtacctttcgctatgaataatctatatagcttaactaatcctagtagttcacgactgatacaagtcgaccctgctcctggacttaatggtcctgatttcatcagccgcggtgttgtttcgttagcggaagccgagttcctcttcaaccattttcgcgatcgcatcaatcctttactctgggaaggcatcttgtgttcgcaccagtcactcagcgatgccaggcaatcatcctcgcttctcgttgccactgtcttaactgttgctgctctacatatgccgagtagagagaaagctcttcatgccacctatgacgccttcatttcgctcatgagggcttcatgcatgttgcatactcggaacctggacgacattcgagcattatgtattggctcgttctacttaacaagtcttagctggtcgctttgctctagagcagtaaggatctctacagagatgaatcttcataagtcttctctgctcttctctcgcgggtcacttgagtcttacgagcgagttagattgtggtacgctctctacgtctgtgatcatcaattcgctttggcttatggaagacctccaatgatgcacgaggattccgcgatccggaacgtagataaactgcttacaagcggcctgtgcacgaatggcgatcgaatactcgtggcgcaagtcaagcttttccgcatcctagctggagcctacttcatgtacggttgtgatccggatctcgaactcagcgggcaggactacgagatgctacaatctttcagtatatcagttgatcaatggagcctcggacaagccccaaagcgtaacgatatgtccgcacccgagcgaccgatgtcctcgaaaggaactgcgctctattatcacttagcacgatttcaactcaactccatgtcactacgagggatatctgctcgcactgaaaatatgtcatatatgaactgggaccgccaagaagctgccaacaatgcaatatccgcagcaactagcactgttcgtttaatcgtcgaagacagcgatctacggaaatcactcatcggcatgccaatctttacacacgccatgatcgcagtatgtgcctcgtttttgctaaaaatggcggttgtcttcggcgaacctagtacaagaagcgatccggtgctccatttgccaagagacttggcaaagtacggtctgaattttcataccaagaatgctttgaccaatgtagagagcctcatcggaatgctcagtttagttgctgagaataccagccagcgacacgtcattcgacaagtggtcacggggttgaaggaactactacagcgcttctgtgcgagcggcaacgacgacagtttcgtttaccagcggtctaatgtttcagagagttctgcatcgacggtgcaatatgcaacaactcgtaacgggaatattaatgactcagcagaaacgctggctcttgctgacagcactggtctcatacaggcgcaaccgaacatacaagctgcccaaccagctgatccgacgcaattcattcctcagcaggatccctttgatcttatgggagacttggactggcgatttaatgatgggttcctttggggcattgatgctgagatgcctcctatctaa

SEQ ID NO: 34009 - protein, 697 aa, Muscodor strobelii
  misc_feature: SGI Peptide ID NO. 571741
  misc_feature (32)..(73): Pfam Id: PF00172 Pfam Desc: Fungal Zn(2)-Cys(6) binuclear cluster domain
  misc_feature (279)..(370): Pfam Id: PF04082 Pfam Desc: Fungal specific transcription factor domain
  misc_feature (287)..(370): Pfam Id: PF04082 Pfam Desc: Fungal specific transcription factor domain
  misc_feature (10)..(600): NCBI GI: 242784070 Blast Desc: C6 transcription factor, [Talaromyces stipitatus ATCC 10500] gi|218720460|gb|EED19879.1| C6 transcription factor, [Talaromyces stipitatus ATCC 10500]
  misc_feature (12)..(598): NCBI GI: 115391583 Blast Desc: conserved [Aspergillus terreus NIH2624] gi|114194220|gb|EAU35920.1| conserved [Aspergillus terreus NIH2624]
  misc_feature (31)..(598): NCBI GI: 189202348 Blast Desc: conserved [Pyrenophora tritici-repentis Pt-1C-BFP] gi|187984609|gb|EDU50097.1| conserved [Pyrenophora tritici-repentis Pt-1C-BFP]
  misc_feature (12)..(598): NCBI GI: 238489747 Blast Desc: C6 transcription factor, [Aspergillus flavus NRRL3357] gi|220698499|gb|EED54839.1| C6 transcription factor, [Aspergillus flavus NRRL3357]
  misc_feature (8)..(600): NCBI GI: 238837805 Blast Desc: conserved [Microsporum canis CBS 113480]
  misc_feature (10)..(621): NCBI GI: 212527552 Blast Desc: C6 transcription factor, [Penicillium marneffei ATCC 18224] gi|210073331|gb|EEA27418.1| C6 transcription factor, [Penicillium marneffei ATCC 18224]
  misc_feature (9)..(598): NCBI GI: 119491126 Blast Desc: C6 transcription factor, [Neosartorya fischeri NRRL 181] gi|119411345|gb|EAW21288.1| C6 transcription factor, [Neosartorya fischeri NRRL 181]
  misc_feature (9)..(598): NCBI GI: 159127358 Blast Desc: C6 transcription factor, [Aspergillus fumigatus A1163]
  misc_feature (9)..(598): NCBI GI: 70999243 Blast Desc: C6 transcription factor [Aspergillus fumigatus Af293] gi|66851980|gb|EAL92305.1| C6 transcription factor, [Aspergillus fumigatus Af293]
  misc_feature (6)..(598): NCBI GI: 255942373 Blast Desc: Pc18g01090 [Penicillium chrysogenum Wisconsin 54-1255] gi|211586688|emb|CAP94333.1| Pc18g01090 [Penicillium chrysogenum Wisconsin 54-1255]
MNSSNKRPRLDRDDSAPNKRTTANSSKPQLTRACAECKKHKIKCFVTPGSSACNKCLKSGIECVPFNFAKKFIDDDSAWKAQAQATIDQLRAAVEQLLQHNNLPGLAPYDETLSSLQVDSNGANESPSTTGPMDAVAAGSANFTSEGASADQQQDDSDLVPFAMNNLYSLTNPSSSRLIQVDPAPGLNGPDFISRGVVSLAEAEFLFNHFRDRINPLLWEGILCSHQSLSDARQSSSLLVATVLTVAALHMPSREKALHATYDAFISLMRASCMLHTRNLDDIRALCIGSFYLTSLSWSLCSRAVRISTEMNLHKSSLLFSRGSLESYERVRLWYALYVCDHQFALAYGRPPMMHEDSAIRNVDKLLTSGLCTNGDRILVAQVKLFRILAGAYFMYGCDPDLELSGQDYEMLQSFSISVDQWSLGQAPKRNDMSAPERPMSSKGTALYYHLARFQLNSMSLRGISARTENMSYMNWDRQEAANNAISAATSTVRLIVEDSDLRKSLIGMPIFTHAMIAVCASFLLKMAVVFGEPSTRSDPVLHLPRDLAKYGLNFHTKNALTNVESLIGMLSLVAENTSQRHVIRQVVTGLKELLQRFCASGNDDSFVYQRSNVSESSASTVQYATTRNGNINDSAETLALADSTGLIQAQPNIQAAQPADPTQFIPQQDPFDLMGDLDWRFNDGFLWGIDAEMPPI

SEQ ID NO: 34010 - DNA, 2902 bp, Muscodor strobelii
  misc_feature: SGI EST ID NO. CUFF.80458.0
  misc_feature: Variant of the nucleotide sequence at SEQ ID NO 34008
cggaaatgcattgtattggttgcaggcctagccaaacatacggttgcttttcactcacaagattgtagcatgtcaagcaatctaccacatgtaactggtacgcaattcttgttgagcccgagttcgaacggcaaagcatttcgcatatgggccttcgcattcgattcattctcgacttgctggcctattggacgacactcgtcagttactgaattgctcacctctttgcactacgcttcgcttctcgcatatcggatgactgagtcttgattgatctgtctcgcctcaagctcgcaaagaaatgaaacatctccaagcaaacgaggaggcaaacaacttgcgaggctcctgacaaacacaagtaggcaaatatgagctatcagatcaatcaatatctctagcaaaaattcttaatactacgtctttcgccctgggccgtagtttgctgttgcattcgccatccaggcactttgttccattattccagcttgggggagtaggtaaggttatgaaagactaaagctgaagaagatctatctccgtcgctctgtcgccaaccacatacaaactggatcatacgatcacagacccctacggtaatgctgggagaggaacagggagagtcgatcaacatgccgtgagaacgaatggcaattcatgatgccgaggctggcaagaggattcgctatggctcatctcaacacaacccgctcagatcctcttggggtcgagcctgccgtgttcgcagttcacgctcggggcgagctggggaatgcttgaaccgacgaatgtgtactccacatagcgtcgcgagtgcgctccaccatggtgggttattgggtgtatgcatctagactctggggaattgctcggggatggggaaagggtttcattccgactttgcctcttgccggatacaatttccccatgatcgtctcactttggttacgaaagatattacaaatttcatgtgcataatcagccatgaactctagtaacaaacgaccaagacttgaccgtgatgattctgcacctaataagcgaaccacagccaattcatcgaagcctcaactcacacgtgcctgcgcagaatgcaagaaacataaaatcaagtgtttcgtaacaccggggtcctcagcttgtaacaagtgcctgaaaagtggcatcgaatgcgtgccattcaacttcgctaagaagttcattgacgatgattcggcatggaaggctcaagctcaggcaaccattgatcaattgagggctgccgtcgaacagctactacagcacaacaatctccctggactagcgccatatgatgagacactctcgtcgctacaggtcgattctaatggtgcgaatgagagtccatcaacgactggacctatggatgctgtggccgcaggatctgctaattttacatccgagggtgcatctgcggatcagcagcaagacgactctgacttagtacctttcgctatgaataatctatatagcttaactaatcctagtagttcacgactgatacaagtcgaccctgctcctggacttaatggtcctgatttcatcagccgcggtgttgtttcgttagcggaagccgagttcctcttcaaccattttcgcgatcgcatcaatcctttactctgggaaggcatcttgtgttcgcaccagtcactcagcgatgccaggcaatcatcctcgcttctcgttgccactgtcttaactgttgctgctctacatatgccgagtagagagaaagctcttcatgccacctatgacgccttcatttcgctcatgagggcttcatgcatgttgcatactcggaacctggacgacattcgagcattatgtattggctcgttctacttaacaagtcttagctggtcgctttgctctagagcagtaaggatctctacagagatgaatcttcataagtcttctctgctcttctctcgcgggtcacttgagtcttacgagcgagttagattgtggtacgctctctacgtctgtgatcatcaattcgctttggcttatggaagacctccaatgatgcacgaggattccgcgatccggaacgtagataaactgcttacaagcggcctgtgcacgaatggcgatcgaatactcgtggcgcaagtcaagcttttccgcatcctagctggagcctacttcatgtacggttgtgatccggatctcgaactcagcgggcaggactacgagatgctacaatctttcagtatatcagttgatcaatggagcctcggacaagccccaaagcgtaacgatatgtccgcacccgagcgaccgatgtcctcgaaaggaactgcgctctattatcacttagcacgatttcaactcaactccatgtcactacgagggatatctgctcgcactgaaaatatgtcatatatgaactgggaccgccaagaagctgccaacaatgcaatatccgcagcaactagcactgttcgtttaatcgtcgaagacagcgatctacggaaatcactcatcggcatgccaatctttacacacgccatgatcgcagcgcaaccgaacatacaagctgcccaaccagctgatccgacgcaattcattcctcagcaggatccctttgatcttatgggagacttggactggcgatttaatgatgggttcctttggggcattgatgctgagatgcctcctatctaatcctttgattttcattcacttggattcactatgcctacatctttagccgttgatatcctttgattaaatttatctcaaatttttgtttccacatttccagagttccgcaagaatcttcaatacgtcatcaagatggtcttggtttgtgtgatgcactacgaaatggcagccgacatatcgaaacccatttctaactccgtcgttgagtgaacaaaac

SEQ ID NO: 34011 - DNA, 1518 bp, Muscodor strobelii
  misc_feature: SGI cDNA ID NO. 571742
  misc_feature: Encodes the peptide sequence at SEQ ID NO 34012
atgactgaaaagaacgagtctcgtgccgagcacatcaacacaggtgcttctgttgcatctcgcgatagcgtagatcgcaaagaagaccttgccggcattcaagaggccgagttgctcgctgctaactgggctgaaggctctgaagccgagaagaagctcgtgcgcaaactcgattggcgaattttgccctgtacttgggttctgtatctattgggatatctcgatagagccaacattggaaatgcgaagacgggtggccttgaagatgacttcggactcactgactctcaatactcaataatcgtgttaatcttctttgtgtcctacctcctctttgaggtcccagcgaacatgatcttgacccgggtgaagccctccgtctttttgccgggtctgggcttgctttggggaacattcgcaacccttatggcagcaagtcagagctggtcacatcttgttggccttagattcctgctcggattcgctgaggccggatttgcgccaggatgtgctttctacctttcatcgtggtaccgaaaatacgaactctccacccgctatgccctcttgtacacctctgtccctctggccggagccttttcaggtcttctcgcaggtgtgattacagagtacgctgacggcgcgggtggactcgctgggtggcgatggctctttatcatcgaaggaatcctctcaatcgtagcatcagtcatcatctacttcctcatgcccaactacccctcgaactcaaagcgctttctcaaagaagacgagacaatcctggcctgccacagactcgtcgttgacggcattgccctcactcaaggcgctggcgaagagcgaatttcgcactggaaggtcttcaagatgacagtcggcgattggcgtgtctggtgtcaatgcttccttttcgtcctcattacaggcgcacaaacgatgcagtacttcatccccactttggtgaagagttttggctggtctggacatatcggtcaataccacactattcctttctacgcagcggcccttgtctatgtggttgcatgctgctatctctccgacaaattcaagactaagtggcaattcgtttgtggtctagcaaccgtgggagctgtgctgttcatcgccgtcgtcacatcttacaatctgaccgttcaatacgtcctttccatcttcgcgtttggaaccatctacggctgctcgccactggttaaaacgtgggttgctgatgtgatacctcaaccggccgcaaaacgagctgttgccattgcgctgatcaacgccatcggcaacgcgagctcgatttattccagctggttgtggccggattccgatagtccccgctatgttgttggatttgctgtgaccacaagctggctgggcgccgttgccattggagcacccatctttgcgtactttttccgcaagtatcctgtggaaacagccgagcaacgcgagactctggctcgtgagctacgagcacgggagaagagggagcgtggaaatacgaaggtctga

SEQ ID NO: 34012 - protein, 505 aa, Muscodor strobelii
  misc_feature: SGI Peptide ID NO. 571742
  misc_feature (65)..(438): Pfam Id: PF07690 Pfam Desc: Major Facilitator Superfamily
  misc_feature (7)..(505): NCBI GI: 58258975 Blast Desc: nicotinamide mononucleotide permease [Cryptococcus neoformans var. neoformans JEC21] gi|134107105|ref|XP_777865.1| CNBA5620 [Cryptococcus neoformans var. neoformans B-3501A] var.
  misc_feature (21)..(498): NCBI GI: 58264770 Blast Desc: MFS transporter [Cryptococcus neoformans var. neoformans JEC21] gi|134109873|ref|XP_776486.1| CNBC5400 [Cryptococcus neoformans var. neoformans B-3501A] CNBC5400 var.
  misc_feature (20)..(464): NCBI GI: 46127339 Blast Desc: FG08047.1 [Gibberella zeae PH-1]
  misc_feature (2)..(496): NCBI GI: 256723913 Blast Desc: NECHADRAFT_37100 [Nectria haematococca mpVI 77-13-4]
  misc_feature (4)..(496): NCBI GI: 212539598 Blast Desc: conserved [Penicillium marneffei ATCC 18224] gi|210067253|gb|EEA21345.1| conserved [Penicillium marneffei ATCC 18224]
  misc_feature (18)..(484): NCBI GI: 238504080 Blast Desc: vitamin H transporter, [Aspergillus flavus NRRL3357] gi|220690743|gb|EED47092.1| vitamin H transporter, [Aspergillus flavus NRRL3357]
  misc_feature (20)..(462): NCBI GI: 261357780 Blast Desc: allantoate permease [Verticillium albo-atrum VaMs.102]
  misc_feature (52)..(461): NCBI GI: 67903898 Blast Desc: AN8936.2 [Aspergillus nidulans FGSC A4] gi|40744914|gb|EAA64070.1| AN8936.2 [Aspergillus nidulans FGSC A4] gi|259486621|tpe|CBF84619.1| TPA: conserved [Aspergillus FGSC
  misc_feature (19)..(461): NCBI GI: 256720586 Blast Desc: NECHADRAFT_49824 [Nectria haematococca mpVI 77-13-4]
  misc_feature (20)..(483): NCBI GI: 169620056 Blast Desc: SNOG_13229 [Phaeosphaeria nodorum SN15] gi|111058436|gb|EAT79556.1| SNOG_13229 [Phaeosphaeria nodorum SN15]
MTEKNESRAEHINTGASVASRDSVDRKEDLAGIQEAELLAANWAEGSEAEKKLVRKLDWRILPCTWVLYLLGYLDRANIGNAKTGGLEDDFGLTDSQYSIIVLIFFVSYLLFEVPANMILTRVKPSVFLPGLGLLWGTFATLMAASQSWSHLVGLRFLLGFAEAGFAPGCAFYLSSWYRKYELSTRYALLYTSVPLAGAFSGLLAGVITEYADGAGGLAGWRWLFIIEGILSIVASVIIYFLMPNYPSNSKRFLKEDETILACHRLVVDGIALTQGAGEERISHWKVFKMTVGDWRVWCQCFLFVLITGAQTMQYFIPTLVKSFGWSGHIGQYHTIPFYAAALVYVVACCYLSDKFKTKWQFVCGLATVGAVLFIAVVTSYNLTVQYVLSIFAFGTIYGCSPLVKTWVADVIPQPAAKRAVAIALINAIGNASSIYSSWLWPDSDSPRYVVGFAVTTSWLGAVAIGAPIFAYFFRKYPVETAEQRETLARELRAREKRERGNTKV

SEQ ID NO: 34013 - DNA, 1092 bp, Muscodor strobelii
  misc_feature: SGI cDNA ID NO. 571743
  misc_feature: Encodes the peptide sequence at SEQ ID NO 34014
atggctcagaacagtcacataccccgtcgggcgcgcattgccgtcactatgggagatcccagtggtgtaggtccagagctcgcagcaaagctcctaagtaacacagcaaatctcgagagagcagatatcgtgctcctagcagaccactccgagcttcaagccggtattgcagatgcaggaggcgtcggtgtagcagtatcagaaggagctgctggtcctcacggcatccaagtccttgatgatggcaccgcatcagagtataagacagagcgcggcgaggtatctaaagacagcggtgctcgctgcatctatcagcttaagcgtgccctcagcatggtacaggctggcgagattgacgctattgttttcacgcccctgaataagagctctctcaagaaggctggcatgacagaggaggatgaactaagatggtttgccaaccagcttaattatacggggaagactagtgagatcaacatcgctggtcctctgtggactggcagagttacttcgcacatcggtatagaagaggttgcagagagaatcacgaaagattccacgctcttggcgattgagttgttgaacagattaagatgggaatcgggtataaattcccctcgtttgggagtctgcgctctcaatccccataatggtgagaatggagcatttggaatgcaagagatcatttccatccgaccagcggttgaggccgctcgcaagaaaggaatagatgtgcaaggaccgttcccgtgcgataccatattcctcaagcgagaacactttgatggtatcgtgaccatgtatcacgaccagggtcagatagccatgaagttgctttccttcgacggtggtgtcaccatgcaaggcggtctgcctatccccattgccacaccggctcatggcactgcctttgacatcgctggaaagaacctggcgtctgtgacgagcacgcagaacgcttttgatattgctgttacaatggccgagagaaggataatgaaggctgctggaatatcggctccggagactattcctgttaagagcggcgtgttgcccgagtcaacagttgttgaggttccttcttgctgctga

SEQ ID NO: 34014 - protein, 363 aa, Muscodor strobelii
  misc_feature: SGI Peptide ID NO. 571743
  misc_feature (36)..(325): Pfam Id: PF04166 Pfam Desc: Pyridoxal phosphate biosynthetic protein PdxA
  misc_feature (89)..(325): Pfam Id: PF04166 Pfam Desc: Pyridoxal phosphate biosynthetic protein PdxA
  misc_feature (10)..(331): NCBI GI: 118588593 Blast Desc: 4-hydroxythreonine-4-phosphate dehydrogenase [Stappia aggregata IAM 12614] gi|118438579|gb|EAV45212.1| 4-hydroxythreonine-4-phosphate dehydrogenase [Stappia aggregata
  misc_feature (10)..(327): NCBI GI: 188592062 Blast Desc: 4-hydroxythreonine-4-phosphate dehydrogenase [Cupriavidus taiwanensis] gi|170938436|emb|CAP63423.1| 4-hydroxythreonine-4-phosphate dehydrogenase 2, dehydrogenase 2)
  misc_feature (10)..(331): NCBI GI: 163744481 Blast Desc: pyridoxal phosphate biosynthesis protein [Oceanibulbus indolifex HEL-45] gi|161381299|gb|EDQ05708.1| pyridoxal phosphate biosynthesis protein [Oceanibulbus indolifex HEL-45]
  misc_feature (8)..(331): NCBI GI: 116050145 Blast Desc: 4-hydroxythreonine-4-phosphate dehydrogenase [Pseudomonas aeruginosa UCBPP-PA14] gi|218891835|ref|YP_002440702.1| 4-hydroxythreonine-4-phosphate
  misc_feature (8)..(331): NCBI GI: 254235238 Blast Desc: conserved [Pseudomonas aeruginosa C3719] gi|126167169|gb|EAZ52680.1| conserved [Pseudomonas aeruginosa C3719]
  misc_feature (10)..(331): NCBI GI: 116694171 Blast Desc: 4-hydroxythreonine-4-phosphate dehydrogenase [Ralstonia eutropha H16] gi|113528670|emb|CAJ95017.1| 4-Hydroxythreonine-4-phosphate dehydrogenase [Ralstonia eutropha
  misc_feature (8)..(331): NCBI GI: 15597408 Blast Desc: 4-hydroxythreonine-4-phosphate dehydrogenase [Pseudomonas aeruginosa PAO1] gi|20139742|sp|Q9I1Q5.1|PDXA2_PSEAE RecName: Full=4-hydroxythreonine-4-phosphate dehydrogenase 2; 2
  misc_feature (10)..(329): NCBI GI: 56709030 Blast Desc: 4-hydroxythreonine-4-phosphate dehydrogenase [Ruegeria pomeroyi DSS-3] gi|56680715|gb|AAV97380.1| 4-hydroxythreonine-4-phosphate dehydrogenase [Ruegeria pomeroyi
  misc_feature (15)..(331): NCBI GI: 107101639 Blast Desc: PaerPA_01002683 [Pseudomonas aeruginosa PACS2]
  misc_feature (8)..(331): NCBI GI: 152987677 Blast Desc: 4-hydroxythreonine-4-phosphate dehydrogenase [Pseudomonas aeruginosa PA7] gi|150962835|gb|ABR84860.1| 4-hydroxythreonine-4-phosphate dehydrogenase [Pseudomonas PA7]
  misc_feature (8)..(331): SWISSPROT Homolog: EC 1.1.1.262 4-hydroxythreonine-4-phosphate dehydrogenase
MAQNSHIPRRARIAVTMGDPSGVGPELAAKLLSNTANLERADIVLLADHSELQAGIADAGGVGVAVSEGAAGPHGIQVLDDGTASEYKTERGEVSKDSGARCIYQLKRALSMVQAGEIDAIVFTPLNKSSLKKAGMTEEDELRWFANQLNYTGKTSEINIAGPLWTGRVTSHIGIEEVAERITKDSTLLAIELLNRLRWESGINSPRLGVCALNPHNGENGAFGMQEIISIRPAVEAARKKGIDVQGPFPCDTIFLKREHFDGIVTMYHDQGQIAMKLLSFDGGVTMQGGLPIPIATPAHGTAFDIAGKNLASVTSTQNAFDIAVTMAERRIMKAAGISAPETIPVKSGVLPESTVVEVPSCC

SEQ ID NO: 34015 - DNA, 1200 bp, Muscodor strobelii
  misc_feature: SGI cDNA ID NO. 571744
  misc_feature: Encodes the peptide sequence at SEQ ID NO 34016
atgtcctcatcagcaactgccccaattgcgatcgtgggagggggacccgggggcctgactttagcaaggctccttgagtgtaagaagatcgactatgttgtatttgaacgagacgaatcggcctccgtttccaaccgcgaaggggggtctctggacattcactatgaaacgggacaacgcgccttacgagaggcagggcttatcgccgactttgaacagcatgctcgttatgaggacgaaagatttcaggtctgcggatcggatggcgagggaacaatgtggatcattggcggcgatgaaaacaacaccgaaagtgagaagccgaaaactcacgggcggccggaaattgatcgtagtgtgctgcggcagatcctacttgagtcgatcccgaaagagaaagttcgttgggggcacgcactaaaagaggtcgtgtttggagatgacgggaaacctatcctcaaattcaaaaacggacaatccgcaacaggcttcagattgattattgggtgtgatggaattttcagcaaggttcggagacagttctcgcaagttgcacccgtgttctccggccgccactacgtcgaaattcgcgtggaaagaagcaatactatttacgagacagtagcgaaacgtgttggacatggcaccttggcttgtatgggcgatgagaaaacaatgttgtacatgcgacaaggtgatggaagttatcgaatttaccttggacttatggctaaagaaggcgccttgcccgacctcagcaatatcgaaggcactcgcgccttcatgctttcaccggaggcattcggctcttgggctgaagaattcagaaactgcataagtcacgccacgcatttccgcaactggccgctgtactatttgcctgaggaggcactgacttggagctacgttcccggtatcacgctgcttggcgatgcggctcatggtgcccttccaaatggcgagggtgtaaaccttgcgatgacggacgccatagacttagtcgataagatcatgcagcacggcctggattctgaggagactcttggcaaagccctccgcgaatatgaggagatcatgattcctcgtggaaaagagtctataaaatctggtttgcagataacaggagcgatgcttcaggagaataatccagaggcgtttgtagagtcgctgaagtggaagatggaagcaggacaacactag

SEQ ID NO: 34016 - protein, 399 aa, Muscodor strobelii
  misc_feature: SGI Peptide ID NO. 571744
  misc_feature (6)..(370): Pfam Id: PF01494 Pfam Desc: FAD binding domain
  misc_feature (5)..(390): NCBI GI: 171677270 Blast Desc: protein product [Podospora anserina] gi|170936703|emb|CAP61361.1| protein product [Podospora anserina]
  misc_feature (9)..(395): NCBI GI: 256726710 Blast Desc: NECHADRAFT_90693 [Nectria haematococca mpVI 77-13-4]
  misc_feature (1)..(391): NCBI GI: 46126397 Blast Desc: FG07576.1 [Gibberella zeae PH-1]
  misc_feature (7)..(389): NCBI GI: 242780955 Blast Desc: monoxygenase, [Talaromyces stipitatus ATCC 10500] gi|218719851|gb|EED19270.1| monoxygenase, [Talaromyces stipitatus ATCC 10500]
  misc_feature (8)..(391): NCBI GI: 116205485 Blast Desc: CHGG_10626 [Chaetomium globosum CBS 148.51] gi|88176754|gb|EAQ84222.1| CHGG_10626 [Chaetomium globosum CBS 148.51]
  misc_feature (9)..(390): NCBI GI: 238485280 Blast Desc: monooxygenase, [Aspergillus flavus NRRL3357] gi|220698757|gb|EED55096.1| monooxygenase, [Aspergillus flavus NRRL3357]
  misc_feature (9)..(390): NCBI GI: 169772109 Blast Desc: [Aspergillus oryzae RIB40] gi|83768383|dbj|BAE58522.1| protein product [Aspergillus oryzae]
  misc_feature (7)..(389): NCBI GI: 242780960 Blast Desc: monoxygenase, [Talaromyces stipitatus ATCC 10500] gi|218719852|gb|EED19271.1| monoxygenase, [Talaromyces stipitatus ATCC 10500]
  misc_feature (9)..(388): NCBI GI: 256730663 Blast Desc: NECHADRAFT_16445 [Nectria haematococca mpVI 77-13-4]
  misc_feature (7)..(381): NCBI GI: 145248071 Blast Desc: An13g01450 [Aspergillus niger] gi|134081033|emb|CAK41545.1| protein product [Aspergillus niger]
MSSSATAPIAIVGGGPGGLTLARLLECKKIDYVVFERDESASVSNREGGSLDIHYETGQRALREAGLIADFEQHARYEDERFQVCGSDGEGTMWIIGGDENNTESEKPKTHGRPEIDRSVLRQILLESIPKEKVRWGHALKEVVFGDDGKPILKFKNGQSATGFRLIIGCDGIFSKVRRQFSQVAPVFSGRHYVEIRVERSNTIYETVAKRVGHGTLACMGDEKTMLYMRQGDGSYRIYLGLMAKEGALPDLSNIEGTRAFMLSPEAFGSWAEEFRNCISHATHFRNWPLYYLPEEALTWSYVPGITLLGDAAHGALPNGEGVNLAMTDAIDLVDKIMQHGLDSEETLGKALREYEEIMIPRGKESIKSGLQITGAMLQENNPEAFVESLKWKMEAGQH

SEQ ID NO: 34017 - DNA, 1204 bp, Muscodor strobelii
  misc_feature: SGI EST ID NO. CUFF.80474.0
  misc_feature: Variant of the nucleotide sequence at SEQ ID NO 34015
ctttagcaaggctccttgagtgtaagaagatcgactatgttgtatttgaacgagacgaatcggcctccgtttccaaccgcgaaggggggtctctggacattcactatgaaacgggacaacgcgccttacgagaggcagggcttatcgccgactttgaacagcatgctcgttatgaggacgaaagatttcaggtctgcggatcggatggcgagggaacaatgtggatcattggcggcgatgaaaacaacaccgaaagtgagaagccgaaaactcacgggcggccggaaattgatcgtagtgtgctgcggcagatcctacttgagtcgatcccgaaagagaaagttcgttgggggcacgcactaaaagaggtcgtgtttggagatgacgggaaacctatcctcaaattcaaaaacggacaatccgcaacaggcttcagattgattattgggtgtgatggaattttcagcaaggttcggagacagttctcgcaagttgcacccgtgttctccggccgccactacgtcgaaattcgcgtggaaagaagcaatactatttacgagacagtagcgaaacgtgttggacatggcaccttggcttgtatgggcgatgagaaaacaatgttgtacatgcgacaaggtgatggaagttatcgaatttaccttggacttatggctaaagaaggcgccttgcccgacctcagcaatatcgaaggcactcgcgccttcatgctttcaccggaggcattcggctcttgggctgaagaattcagaaactgcataagtcacgccacgcatttccgcaactggccgctgtactatttgcctgaggaggcactgacttggagctacgttcccggtatcacgctgcttggcgatgcggctcatggtgcccttccaaatggcgagggtgtaaaccttgcgatgacggacgccatagacttagtcgataagatcatgcagcacggcctggattctgaggagactcttggcaaagccctccgcgaatatgaggagatcatgattcctcgtggaaaagagtctataaaatctggtttgcagataacaggagcgatgcttcaggagaataatccagaggcgtttgtagagtcgctgaagtggaagatggaagcaggacaacactagaccggactactgacttgtggttcttgtacattatttctagactctcttactcaacaatcgac

SEQ ID NO: 34018 - DNA, 1971 bp, Muscodor strobelii
  misc_feature: SGI cDNA ID NO. 571745
  misc_feature: Encodes the peptide sequence at SEQ ID NO 34019
atgaacggcgaatcttctcctataactgagccgagagtgactcgagttctagcttccgcgacacgccgaagaaaacgcaagttcccagagcgagagctcctggcaagagttcgtcggtatgagggcttactcgcccaaaacaaagtgaagtttgagcctctacgccaggacccggatgcagtccaaaatatcattgaccaacagcaatatctatcggactcagacgacggagatcctatcgtgatagatgctaccaatacttcgacgccatcaaacgagcgagcttcgaccaacgatgaattttggcaagctattactcaggcgcggctggacagtgactccgattcgatgaatgaagatgcggatctaattttcgcgacaggatttagcgactcatcaccggagaatgactatcttctattgggtggtagtcgtagcggcgatgtagatatatcgagtttgcatcccggaccaggcgaaatcttcaagctctggcaggtctaccttgacaatgttgatccccttctcaaggttactcatacgccaagtctgcaacggcagatcgtgaacgttgttggcaatctttctggagtaccacccgctctagaggcgatgctattcgccgtgtacagcattgctatctgtagtttggatcacgattgctgccaagctcagtttggttactcgaagaaggtgctgttgcgaagatttcactttggttgccaacaggcccttctgaactgccattttctccgaacgacgagtcggcaggtgctagttgcctatgttttgtatctactctccatttggcacaagacgcatcctcggtcattatcgccgatgtttggtgtcgcagttcgaatagccgaaaggatgaatattggctttgaggctatttgcgccaagtcacccgttctcgaaggcgaaatgcagcgacgactctggtggacattgaagcaattcgacactcgcatcagtgggctagatgactatcggcccacgaacttgggcgacgattgggattgccatgttcctcttgacgtcaacgactcggatctacgtcctgaaatgcgtcaactcccagccactcgctcagtatcatctgaggcagtatttgttgtagttcgtagcctcttaagcgactttaagcgctccaagctacttagctttgatttcagcgccgtggagcggaaacatgttatcagctgttcccaacctgcttcactagccaatgagctggacatactatctcggaagattgacacagagtttttgcaattctgtgagcctactaatggattacatgcaatgactatctcaacagcacgctgtcagcttgcgacctatcagcttgtactacagcaattgaagaatgcgaacacgccgaatgaggaaacagatgaagagcgtgacaaagctctgctctatgccatcgatgttcttaaatacaacacccaaatgatgacatcctctctcaccgctgggtatcgatggttcatcactctttactttccgttcgctgcatatgttcatattctttcagatttaaagcagcgatcacaatgccaacattctgagcaagcctgggaagcaatgaagcttgattatgaatctcgcttctctcaaatctcacccggtgacgaacgtctgtttacaatcactggaaagttcatcgttgatgcttggcaagccatggaggcgagcataaagcagcaagggagagaacctcgtgagccatccatagtgacagacatcaaacacaaaagacagcaacgagcagccgcgtcctccatggttgatcagatgtcaccaaacgaggttttggggatgtctagtagcgtgcatgacatggagggcccaaacactgccgggcttgaggcgttgttagatgcaggcttgcaaccggactatctattcgacaaccacaacctcctcgccgggaatacgcacgattggacacaatacacatag

SEQ ID NO: 34019 - protein, 656 aa, Muscodor strobelii
  misc_feature: SGI Peptide ID NO. 571745
  misc_feature (252)..(351): Pfam Id: PF04082 Pfam Desc: Fungal specific transcription factor domain
  misc_feature (303)..(351): Pfam Id: PF04082 Pfam Desc: Fungal specific transcription factor domain
  misc_feature (33)..(653): NCBI GI: 256732350 Blast Desc: NECHADRAFT_80838 [Nectria haematococca mpVI 77-13-4]
  misc_feature (29)..(621): NCBI GI: 159125891 Blast Desc: C6 transcription factor, [Aspergillus fumigatus A1163]
  misc_feature (28)..(636): NCBI GI: 242791049 Blast Desc: C6 transcription factor, [Talaromyces stipitatus ATCC 10500] gi|218718271|gb|EED17691.1| C6 transcription factor, [Talaromyces stipitatus ATCC 10500]
  misc_feature (28)..(604): NCBI GI: 121711681 Blast Desc: C6 zinc finger domain protein [Aspergillus clavatus NRRL 1] gi|119401607|gb|EAW12030.1| C6 zinc finger domain protein [Aspergillus clavatus NRRL 1]
  misc_feature (29)..(621): NCBI GI: 70985362 Blast Desc: C6 transcription factor [Aspergillus fumigatus Af293] gi|66845815|gb|EAL86149.1| C6 transcription factor, [Aspergillus fumigatus Af293]
  misc_feature (28)..(612): NCBI GI: 212534752 Blast Desc: C6 transcription factor, [Penicillium marneffei ATCC 18224] gi|210069931|gb|EEA24021.1| C6 transcription factor, [Penicillium marneffei ATCC 18224]
  misc_feature (28)..(591): NCBI GI: 255941246 Blast Desc: Pc16g10860 [Penicillium chrysogenum Wisconsin 54-1255] gi|211586015|emb|CAP93756.1| Pc16g10860 [Penicillium chrysogenum Wisconsin 54-1255]
  misc_feature (24)..(606): NCBI GI: 119499622 Blast Desc: fungal specific transcription factor, [Neosartorya fischeri NRRL 181] gi|119414733|gb|EAW24671.1| fungal specific transcription factor, [Neosartorya fischeri NRRL 181]
  misc_feature (33)..(588): NCBI GI: 67903222 Blast Desc: AN8598.2 [Aspergillus nidulans FGSC A4] gi|40741442|gb|EAA60632.1| AN8598.2 [Aspergillus nidulans FGSC A4]
  misc_feature (33)..(588): NCBI GI: 259483189 Blast Desc: TPA: Zn(II)2Cys6 transcription factor (Eurofung) [Aspergillus nidulans FGSC A4]
MNGESSPITEPRVTRVLASATRRRKRKFPERELLARVRRYEGLLAQNKVKFEPLRQDPDAVQNIIDQQQYLSDSDDGDPIVIDATNTSTPSNERASTNDEFWQAITQARLDSDSDSMNEDADLIFATGFSDSSPENDYLLLGGSRSGDVDISSLHPGPGEIFKLWQVYLDNVDPLLKVTHTPSLQRQIVNVVGNLSGVPPALEAMLFAVYSIAICSLDHDCCQAQFGYSKKVLLRRFHFGCQQALLNCHFLRTTSRQVLVAYVLYLLSIWHKTHPRSLSPMFGVAVRIAERMNIGFEAICAKSPVLEGEMQRRLWWTLKQFDTRISGLDDYRPTNLGDDWDCHVPLDVNDSDLRPEMRQLPATRSVSSEAVFVVVRSLLSDFKRSKLLSFDFSAVERKHVISCSQPASLANELDILSRKIDTEFLQFCEPTNGLHAMTISTARCQLATYQLVLQQLKNANTPNEETDEERDKALLYAIDVLKYNTQMMTSSLTAGYRWFITLYFPFAAYVHILSDLKQRSQCQHSEQAWEAMKLDYESRFSQISPGDERLFTITGKFIVDAWQAMEASIKQQGREPREPSIVTDIKHKRQQRAAASSMVDQMSPNEVLGMSSSVHDMEGPNTAGLEALLDAGLQPDYLFDNHNLLAGNTHDWTQYT

SEQ ID NO: 34020 - DNA, 2944 bp, Muscodor strobelii
  misc_feature: SGI EST ID NO. CUFF.80482.0
  misc_feature: Variant of the nucleotide sequence at SEQ ID NO 34018
tcgaaacgttgtgtccaagcaacagccgcgacacgccgaagaaaacgcaagttcccagagcgagagctcctggcaagagttcgtcggtatgagggcttactcgcccaaaacaaagtgaagtttgagcctctacgccaggacccggatgcagtccaaaatatcattgaccaacagcaatatctatcggactcagacgacggagatcctatcgtgatagatgctaccaatacttcgacgccatcaaacgagcgagcttcgaccaacgatgaattttggcaagctattactcaggcgcggctggacagtgactccgattcgatgaatgaagatgcggatctaattttcgcgacaggatttagcgactcatcaccggagaatgactatcttctattgggtggtagtcgtagcggcgatgtagatatatcgagtttgcatcccggaccaggcgaaatcttcaagctctggcaggtctaccttgacaatgttgatccccttctcaaggttactcatacgccaagtctgcaacggcagatcgtgaacgttgttggcaatctttctggagtaccacccgctctagaggcgatgctattcgccgtgtacagcattgctatctgtagtttggatcacgattgctgccaagctcagtttggttactcgaagaaggtgctgttgcgaagatttcactttggttgccaacaggcccttctgaactgccattttctccgaacgacgagtcggcaggtgctagttgcctatgttttgtatctactctccatttggcacaagacgcatcctcggtcattatcgccgatgtttggtgtcgcagttcgaatagccgaaaggatgaatattggctttgaggctatttgcgccaagtcacccgttctcgaaggcgaaatgcagcgacgactctggtggacattgaagcaattcgacactcgcatcagtgggctagatgactatcggcccacgaacttgggcgacgattgggattgccatgttcctcttgacgtcaacgactcggatctacgtcctgaaatgcgtcaactcccagccactcgctcagtatcatctgaggcagtatttgttgtagttcgtagcctcttaagcgactttaagcgctccaagctacttagctttgatttcagcgccgtggagcggaaacatgttatcagctgttcccaacctgcttcactagccaatgagctggacatactatctcggaagattgacacagagtttttgcaattctgtgagcctactaatggattacatgcaatgactatctcaacagcacgctgtcagcttgcgacctatcagcttgtactacagcaattgaagaatgcgaacacgccgaatgaggaaacagatgaagagcgtgacaaagctctgctctatgccatcgatgttcttaaatacaacacccaaatgatgacatcctctctcaccgctgggtatcgatggttcatcactctttactttccgttcgctgcatatgttcatattctttcagatttaaagcagcgatcacaatgccaacattctgagcaagcctgggaagcaatgaagcttgattatgaatctcgcttctctcaaatctcacccggtgacgaacgtctgtttacaatcactggaaagttcatcgttgatgcttggcaagccatggaggcgagcataaagcagcaagggagagaacctcgtgagccatccatagtgacagacatcaaacacaaaagacagcaacgagcagccgcgtcctccatggttgatcagatgtcaccaaacgaggttttggggatgtctagtagcgtgcatgacatggagggcccaaacactgccgggcttgaggcgttgttagatgcaggcttgcaaccggactatctattcgacaaccacaacctcctcgccgggaatacgcacgattggacacaatacacatagaaagtagtcagagcgcatcaatcgagagtcatgatgagtagcactactgaatgacacaaaattcaaactctcgaatgacccaatgaacgattcggtgatgatagtctagtgaattagccgaatcaacttttggataatgtttgacatatgcatatagcttcagattcgagcagaaaatatttctaggggtgtgtttctggtgctattagatgcgggtagagataggggtgtctttcatcctgtttctaatctgctgcatctcaagatgaatctctaaacacgtttcaagtgctcttgtcgcagttatcccatctcttacatgatctgatttgtacaacgacgtcgcatctacggcaccattcattctcgtcaacttctagttcgacgtctcagaaatgtgcaaactctctgagtgacgtcggcctgtccgcgatgcaccaaattatgctaatgtcttcggacgcacagtctctagccatgacttagcacaaatatgatacacatcaaaactcgaaccgcaaatactgcaagttgcgcttccattgaggatgcagcgctacaagtcgagtcatgacggggccaaagaatggcgggtggctagccatataatccccccagtagacacggtccttcatctttagccgcgggtcgatggcgctcatctcgcgtggagcatcgtcaaccgaccacttccaacttgtagcacttgatttcaacggcagcacataccgactgagccgagttgacagtggaccgacagtgtcgaagaggacctcgccgccgggtttcccaaagtgcgcgacaacatctcgaaagatcttgattacgagttctggttccaaataatagagcaacccctcgaggatgacgagcgtcggacggtcggccggcatgtcgttgagccatccttcactgcccgccgcgagcgcccgcagtgtatagtcgacatcctcgccctctgatggcgacggcacgagtcgcttccgcagatcaatgacaggcg

SEQ ID NO: 34021 - DNA, 888 bp, Muscodor strobelii
  misc_feature: SGI cDNA ID NO. 571746
  misc_feature: Encodes the peptide sequence at SEQ ID NO 34022
atggagtccaccagcgcagcgccacaggcgaaagaaaaagtccagctcacaggcgtggaacagacgatgctaatgacgacattcctcaagtatcatgacgccaagagtgcaagtccaattctgggtgatcagtacgccgagcaactcctgggtcgctgtgacctaggtccggttgacgagggcttccgcagcttgtcggacaagagatatgtgcagcagatcgtcgggcgaaccaagcgcatagatgactggtgccaagacttccttgactctcactcacgtaccgggactcatgtcacggttgtacatgtcgcttgtggcatcgactgccgctttctgcggatgcgcaaggctgcgggtgccgttcgatggatcgacttcgacctgccgcctgtcattgatctgcggaagcgactcgtgccgtcgccatcagagggcgaggatgtcgactatacactgcgggcgctcgcggcgggcagtgaaggatggctcaacgacatgccggccgaccgtccgacgctcgtcatcctcgaggggttgctctattatttggaaccagaactcgtaatcaagatctttcgagatgttgtcgcgcactttgggaaacccggcggcgaggtcctcttcgacactgtcggtccactgtcaactcggctcagtcggtatgtgctgccgttgaaatcaagtgctacaagttggaagtggtcggttgacgatgctccacgcgagatgagcgccatcgacccgcggctaaagatgaaggaccgtgtctactggggggattatatggctagccacccgccattctttggccccgtcatgactcgacttgtagcgctgcatcctcaatggaagcgcaacttgcagtatttgcggttcgagttttga

SEQ ID NO: 34022 - protein, 295 aa, Muscodor strobelii
  misc_feature: SGI Peptide ID NO. 571746
  misc_feature (12)..(114): Pfam Id: PF02409 Pfam Desc: O-methyltransferase N-terminus
  misc_feature (11)..(295): NCBI GI: 256782382 Blast Desc: polyketide synthase protein [Streptomyces hygroscopicus ATCC 53653]
  misc_feature (12)..(295): NCBI GI: 134103104 Blast Desc: O-methyltransferase-like protein [Saccharopolyspora erythraea NRRL 2338] gi|133915727|emb|CAM05840.1| O-methyltransferase-like protein [Saccharopolyspora erythraea
  misc_feature (5)..(258): NCBI GI: 46117494 Blast Desc: FG04589.1 [Gibberella zeae PH-1]
  misc_feature (13)..(295): NCBI GI: 169628060 Blast Desc: polyketide synthase protein [Mycobacterium abscessus ATCC 19977] gi|169240027|emb|CAM61055.1| polyketide synthase protein [Mycobacterium abscessus]
  misc_feature (12)..(255): NCBI GI: 121594461 Blast Desc: O-methyltransferase domain-containing protein [Acidovorax sp. JS42] gi|120606541|gb|ABM42281.1| O-methyltransferase domain protein [Acidovorax sp. JS42]
  misc_feature (12)..(256): NCBI GI: 153491 Blast Desc: O-methyltransferase [Streptomyces glaucescens]
  misc_feature (12)..(256): NCBI GI: 730915 Blast Desc: O-methyltransferase [Streptomyces glaucescens]
  misc_feature (5)..(295): NCBI GI: 158148287 Blast Desc: carboxyl O-methyltransferase [Streptomyces olivaceus]
  misc_feature (11)..(261): NCBI GI: 145611224 Blast Desc: MGG_00573 [Magnaporthe grisea 70-15] gi|145018526|gb|EDK02805.1| MGG_00573 [Magnaporthe grisea 70-15]
  misc_feature (14)..(295): NCBI GI: 183982973 Blast Desc: O-methyltransferase [Mycobacterium marinum M] gi|183176299|gb|ACC41409.1| O-methyltransferase [Mycobacterium marinum M]
  misc_feature: Useful for fungicidal and/or biocontrol applications
MESTSAAPQAKEKVQLTGVEQTMLMTTFLKYHDAKSASPILGDQYAEQLLGRCDLGPVDEGFRSLSDKRYVQQIVGRTKRIDDWCQDFLDSHSRTGTHVTVVHVACGIDCRFLRMRKAAGAVRWIDFDLPPVIDLRKRLVPSPSEGEDVDYTLRALAAGSEGWLNDMPADRPTLVILEGLLYYLEPELVIKIFRDVVAHFGKPGGEVLFDTVGPLSTRLSRYVLPLKSSATSWKWSVDDAPREMSAIDPRLKMKDRVYWGDYMASHPPFFGPVMTRLVALHPQWKRNLQYLRFEF

SEQ ID NO: 34023 - DNA, 751 bp, Muscodor strobelii
  misc_feature: SGI EST ID NO. CUFF.80486.0
  misc_feature: Variant of the nucleotide sequence at SEQ ID NO 34021
caagacgccaattttcaactttcattcttgctttcaatttagcttctcatcgcattacctcaataacaagagctacctttgtgcgggtcgtcatcgcttgtctagcctgactagcatcgatggaaccatggaacccggactgatctgggatagtaatatgcgaacctcgttacgccgcaagagcctcgctcagtatgacgacggtgtcacaacggcctatgctacggttcgcgacttcggctttcaccaccggtttcataagagaacccaggtcttctataaaaagatggaagtcacctctgtctctggcgtttgaaaaccagcagaagcagcacattgttaacgcaagaaacaaccagcgtaatcacatttgcgagctgcgaactagacattacacgaccgctcagcccgagaccatggagtccaccagcgcagcgccacaggcgaaagaaaaagtccagctcacaggcgtggaacagacgatgctaatgacgacattcctcaagtatcatgacgccaagagtgcaagtccaattctgggtgatcagtacgccgagcaactcctgggtcgctgtgacctaggtccggttgacgagggcttccgcagcttgtcggacaagagatatgtgcagcagatcgtcgggcgaaccaagcgcatagatgactggtgccaagacttccttgactctcactcacgtaccgggactcatgtcacggttgtacatgtcgcttgtggcatcgactgccgctt

SEQ ID NO: 34024 - DNA, 1659 bp, Muscodor strobelii
  misc_feature: SGI cDNA ID NO. 571747
  misc_feature: Encodes the peptide sequence at SEQ ID NO 34025
atgtatttcaaatttgccatatggttgcttcagctctttgtctttgctctgtcggtccattcctctccagcatgtcttagttccgcacgatcatatccagtggcaagtcaatctctacttgatatctccatcagtgagattacacagctacttaatgagggcaaaattaccagtcgcacgttagttgatctatatatacaacggacaaaagaagtgaacgaagagcttcacgccgtaattgaacttgatccggatgcgtctgccatcgccgccaagctagatgaagagcgcacccatggtcatctcagaggcccgctgcacggaatacccctgctggtgaaggacaacatcgcgacgtttggaggaacagggacagggtccgggagtacatgtcttgccgattcgcgacccaaacaagactctacagtcgtagagcgcctccgaaaagctggtgcaataatcctgggcaagaccaaccttagcgagtttgccggtgcccgaggagtgaaccctttggaaggttggagcgcacgcggttcacagacttttgctgcatatatcgaacatcagactccctgtggcagctctagcggaagcggtgttgctgcttcgcttggcctcgctgctggaactctgggcacggacaccgctggaagtatcacttgtccagctgcgtacagcaacgttgtcggaatcaagcccactgttggattaacttcaagaacgggcactgtaccagtgactcgaagacaagataccattgggcccctggcgcaaaatgtggcagacggagcactcatactcgaagtcattgccggtaaggatgcgaatgataattacacgtcggcacagccgtggtcgtctccacccagctacctcgcctctttgaacaagtcagcgcttaaagggaagcgcataggcgtcaccttcaccgaggagctagtcggagtccttgatcctgaaatagctcggccagtcttcgatgccgctgtgtctgatctggaaaaggccggagccgagatcattcctgtaccccttggcaccggaggcttcacgttagatgacctccacacctggatatatggcaatatctcggctttcgtgttctcagactatcgtaacgatatggcagcctacctcaatggaacggtttccggcaccaaaggcatccgcactttcgaagatctatatgagtgtttacaacaggatccggcggaacaataccctttctatgatgtcgatcttatagccgctgcagtgggcaatagtctcccagcagacggcccagttgcttggaatggctacgtgactgccatacggctggcagagaaggtaatcctacagcccattgaggacaacaaccttgacgctctggtcacgacaagtgacgttgctggattttacacagcgcctctgggatatcctgtagtgacggtgccaataggagcactcccagaaggcgcaaacacgacctttgactcgacaggtactttagcaaggagtggtccgggtttgccgctcgggatgagcttcattgccggccattggactgagcggcagttgattgggtatgcatacgcatacgaacaagtctctcttaagagacgcactttgacaccccttgtcaggccgacttctgacctcagttcagtgttgtaa

SEQ ID NO: 34025 - protein, 552 aa, Muscodor strobelii
  misc_feature: SGI Peptide ID NO. 571747
  misc_feature (60)..(522): Pfam Id: PF01425 Pfam Desc: Amidase
  misc_feature (191)..(346): Pfam Id: PF01425 Pfam Desc: Amidase
  misc_feature (60)..(164): Pfam Id: PF01425 Pfam Desc: Amidase
  misc_feature (8)..(552): NCBI GI: 70997715 Blast Desc: amidase [Aspergillus fumigatus Af293] gi|66851230|gb|EAL91556.1| amidase, [Aspergillus fumigatus Af293] gi|159126673|gb|EDP51789.1| amidase, [Aspergillus fumigatus
  misc_feature (3)..(552): NCBI GI: 121713462 Blast Desc: amidase, [Aspergillus clavatus NRRL 1] gi|119402495|gb|EAW12916.1| amidase, [Aspergillus clavatus NRRL 1]
  misc_feature (5)..(552): NCBI GI: 189201323 Blast Desc: glutamyl-tRNA(Gln) amidotransferase subunit A [Pyrenophora tritici-repentis Pt-1C-BFP] gi|187984097|gb|EDU49585.1| glutamyl-tRNA(Gln) amidotransferase A
  misc_feature (1)..(552): NCBI GI: 225555498 Blast Desc: amidase [Ajellomyces capsulatus G186AR]
  misc_feature (39)..(552): NCBI GI: 238837925 Blast Desc: amidase [Microsporum canis CBS 113480]
  misc_feature (1)..(552): NCBI GI: 240273757 Blast Desc: amidase [Ajellomyces capsulatus H143]
  misc_feature (65)..(552): NCBI GI: 261192964 Blast Desc: amidase [Ajellomyces dermatitidis SLH14081] gi|239589023|gb|EEQ71666.1| amidase [Ajellomyces dermatitidis SLH14081]
  misc_feature (65)..(552): NCBI GI: 239613606 Blast Desc: amidase [Ajellomyces dermatitidis ER-3]
  misc_feature (65)..(552): NCBI GI: 115401270 Blast Desc: [Aspergillus terreus NIH2624] gi|114190164|gb|EAU31864.1| [Aspergillus terreus NIH2624]
  misc_feature (38)..(548): NCBI GI: 258572490 Blast Desc: conserved [Uncinocarpus reesii 1704] gi|237905277|gb|EEP79678.1| conserved [Uncinocarpus reesii 1704]
  misc_feature (38)..(531): SWISSPROT Homolog: EC 3.5.1.4 Amidase
MYFKFAIWLLQLFVFALSVHSSPACLSSARSYPVASQSLLDISISEITQLLNEGKITSRTLVDLYIQRTKEVNEELHAVIELDPDASAIAAKLDEERTHGHLRGPLHGIPLLVKDNIATFGGTGTGSGSTCLADSRPKQDSTVVERLRKAGAIILGKTNLSEFAGARGVNPLEGWSARGSQTFAAYIEHQTPCGSSSGSGVAASLGLAAGTLGTDTAGSITCPAAYSNVVGIKPTVGLTSRTGTVPVTRRQDTIGPLAQNVADGALILEVIAGKDANDNYTSAQPWSSPPSYLASLNKSALKGKRIGVTFTEELVGVLDPEIARPVFDAAVSDLEKAGAEIIPVPLGTGGFTLDDLHTWIYGNISAFVFSDYRNDMAAYLNGTVSGTKGIRTFEDLYECLQQDPAEQYPFYDVDLIAAAVGNSLPADGPVAWNGYVTAIRLAEKVILQPIEDNNLDALVTTSDVAGFYTAPLGYPVVTVPIGALPEGANTTFDSTGTLARSGPGLPLGMSFIAGHWTERQLIGYAYAYEQVSLKRRTLTPLVRPTSDLSSVL

SEQ ID NO: 34026 - DNA, 846 bp, Muscodor strobelii
  misc_feature: SGI cDNA ID NO. 571748
  misc_feature: Encodes the peptide sequence at SEQ ID NO 34027
atgcctcgcgtcttcctcataacgggaacctcaaccggtttcggtaaatattatgcccaagaagtcatagatcgtggagattatgtggttgcaacagcgagaaatccggatgatctatcattccaaaacacaaatgagaagaattacctccccgttcgtctcgacgtaacggacaagaaatcgattcaagcagcattcgatcagacactcaagaaattcagcagagtagatgttgtttgcaataacgccggctacggtctcgctggttgcttcgaggagtatacagatgctcagatacgaacacagatggatatcaactttttcggacttatcgacgtgactagagttgcccttgagacgatgcgagatcgacaaagcccctctggtggcttaattcaacaggtcacaagcattgggggtcagagaggcgtgcctgtgttctctatttactgtgcaagtaaatgggccgtcgaaggtttcaccgaggcgctgtcgcaagagttgaagccggaatgggggatcaacgtccaatgtatcgaacccggcgggtttagaacagactgggccggaagaagtatgacgtttgcggatagacatccgaagtacgatcatatcgatgccaaagaccgcatgacgaagaggcacggcaaccaagccggcgaccctgtaaaaggtgctaaagctatgtacgagtttgcgattatgaaggatccaccgctgcgaagtgtgattggcaccgacgcttgggctgcgctcttggataagctgagcagctatgagaaaagccagaagagatttgaacaattggcgaatagcacggatgtggatggttatcaaaaaccgtaa

SEQ ID NO: 34027 - protein, 281 aa, Muscodor strobelii
  misc_feature: SGI Peptide ID NO. 571748
  misc_feature (3)..(169): Pfam Id: PF00106 Pfam Desc: short chain dehydrogenase
  misc_feature (52)..(169): Pfam Id: PF00106 Pfam Desc: short chain dehydrogenase
  misc_feature (1)..(276): NCBI GI: 154295360 Blast Desc: BC1G_13261 [Botryotinia fuckeliana B05.10] gi|150844128|gb|EDN19321.1| BC1G_13261 [Botryotinia fuckeliana B05.10]
  misc_feature (2)..(281): NCBI GI: 169606019 Blast Desc: SNOG_06042 [Phaeosphaeria nodorum SN15] gi|160706896|gb|EAT87106.2| SNOG_06042 [Phaeosphaeria nodorum SN15]
  misc_feature (2)..(281): NCBI GI: 189197875 Blast Desc: oxidoreductase domain containing protein [Pyrenophora tritici-repentis Pt-1C-BFP] gi|187981223|gb|EDU47849.1| oxidoreductase domain containing protein [Pyrenophora Pt-1C-BFP]
  misc_feature (1)..(276): NCBI GI: 255930733 Blast Desc: Pc12g00180 [Penicillium chrysogenum Wisconsin 54-1255] gi|211581542|emb|CAP79645.1| Pc12g00180 [Penicillium chrysogenum Wisconsin 54-1255]
  misc_feature (1)..(277): NCBI GI: 223937659 Blast Desc: short-chain dehydrogenase/reductase SDR [bacterium Ellin514] gi|223893631|gb|EEF60090.1| short-chain dehydrogenase/reductase SDR [bacterium Ellin514]
  misc_feature (4)..(278): NCBI GI: 213405173 Blast Desc: retinol dehydrogenase [Schizosaccharomyces japonicus yFS275] gi|212001405|gb|EEB07065.1| retinol dehydrogenase [Schizosaccharomyces japonicus yFS275]
  misc_feature (2)..(276): NCBI GI: 170735398 Blast Desc: short-chain dehydrogenase/reductase SDR [Burkholderia cenocepacia MC0-3] gi|169821436|gb|ACA96017.1| short-chain dehydrogenase/reductase SDR [Burkholderia cenocepacia MC0-3]
  misc_feature (4)..(276): NCBI GI: 209517996 Blast Desc: short-chain dehydrogenase/reductase SDR [Burkholderia sp. H160] gi|209501602|gb|EEA01626.1| short-chain dehydrogenase/reductase SDR [Burkholderia sp. H160]
  misc_feature (1)..(276): NCBI GI: 284039636 Blast Desc: short-chain dehydrogenase/reductase SDR [Spirosoma linguale DSM 74] gi|283818929|gb|ADB40767.1| short-chain dehydrogenase/reductase SDR [Spirosoma linguale DSM 74]
  misc_feature (1)..(274): NCBI GI: 146301737 Blast Desc: short-chain dehydrogenase/reductase SDR [Flavobacterium johnsoniae UW101] gi|146156155|gb|ABQ07009.1| short-chain dehydrogenase/reductase SDR [Flavobacterium UW101]
  misc_feature (2)..(188): SWISSPROT Homolog: EC 1.1.1.62 Estradiol 17-beta-dehydrogenase
MPRVFLITGTSTGFGKYYAQEVIDRGDYVVATARNPDDLSFQNTNEKNYLPVRLDVTDKKSIQAAFDQTLKKFSRVDVVCNNAGYGLAGCFEEYTDAQIRTQMDINFFGLIDVTRVALETMRDRQSPSGGLIQQVTSIGGQRGVPVFSIYCASKWAVEGFTEALSQELKPEWGINVQCIEPGGFRTDWAGRSMTFADRHPKYDHIDAKDRMTKRHGNQAGDPVKGAKAMYEFAIMKDPPLRSVIGTDAWAALLDKLSSYEKSQKRFEQLANSTDVDGYQKP

SEQ ID NO: 34028 - DNA, 1690 bp, Muscodor strobelii
  misc_feature: SGI EST ID NO. CUFF.80503.0
  misc_feature: Variant of the nucleotide sequence at SEQ ID NO 34026
ggcgataatggcatgacatgtaaactccaatgtccatcgcgaatggtgatagtgacattaagtccgtagggcgaagttagctctcatggcgataagatgtaagcgccgtttgttgtgacgacgtcaaagaccaatgtgcaacatataagttcgacatcccctctcacgccacaattttgccttactggaaaggttctatcctgtgtctactatattcaattctgacgaaaagggttcatcactaacaaaatgcctcgcgtcttcctcataacgggaacctcaaccggtttcggtaaatattatgcccaagaagtcatagatcgtggagattatgtggttgcaacagcgagaaatccggatgatctatcattccaaaacacaaatgagaagaattacctccccgttcgtctcgacgtaacggacaagaaatcgattcaagcagcattcgatcagacactcaagaaattcagcagagtagatgttgtttgcaataacgccggctacggtctcgctggttgcttcgaggagtatacagatgctcagatacgaacacagatggatatcaactttttcggacttatcgacgtgactagagttgcccttgagacgatgcgagatcgacaaagcccctctggtggcttaattcaacaggtcacaagcattgggggtcagagaggcgtgcctgtgttctctatttactgtgcaagtaaatgggccgtcgaaggtttcaccgaggcgctgtcgcaagagttgaagccggaatgggggatcaacgtccaatgtatcgaacccggcgggtttagaacagactgggccggaagaagtatgacgtttgcggatagacatccgaagtacgatcatatcgatgccaaagaccgcatgacgaagaggcacggcaaccaagccggcgaccctgtaaaaggtgctaaagctatgtacgagtttgcgattatgaaggatccaccgctgcgaagtgtgattggcaccgacgcttgggctgcgctcttggataagctgagcagctatgagaaaagccagaagagatttgaacaattggcgaatagcacggatgtggatggttatcaaaaaccgtaaggtagttgatggatgagtgagtgccgtggctgtcacgtcgtcgcgagcgggaagcgctctgagggcgatcggtcgggtggtgttgtcgggggatgatgatgttgtggtggtgtggaagaatggagctggctggtgcaggactgacagcagtggcagttggctggagccaagtgacgcctggaagacctagtggcaccgctatcaaaacctacccggcagcagtacatataatacacacatctcttgaatgtacctaacatatatcacttcgtacgcgtacagtgacgaccttccgtcaacctacactcccaccttcaccttgtttcactcaccaaccaccttgcctcctcagcctgaaatgatcatttgcgcgaaagcctcttgatttgcccccgcagcctgaaatgatcactttgtgcgaaagccatttgatctgtgtcgctaccagctttcgcgtcagggcgaacgctacgacggccacaggttgtgaggacgcatatctacctaggtagatatgctcttgactgatcatcagtaggtagctattgtgcgaaagcctttagctacccggtcatcccccgtcccttgcccctgc

SEQ ID NO: 34029 - DNA, 1266 bp, Muscodor strobelii
  misc_feature: SGI cDNA ID NO. 571749
  misc_feature: Reduced expression when VOC is produced
  misc_feature: Encodes the peptide sequence at SEQ ID NO 34030
atggcgccagatccgcggcattatcgccactatctacctgacctcagttcaccgcgctttacgacgatcgcgaagaatgatgccaggggccacgcgaaagagcttattgagaagcaaggtcccccgtggttatatggactatattcacactggaaaaagttactacaagagccctttaagggggtcacaaacgacggtgttgtacggccaaacctcttcaaagttagagacgagggtgttcccattgaggacattgtactcaaagcctcagcagttgtttcacaattaacaccagagcaaagcgccaagacattgctacacattgactctccggaatggcgtacatggtcaaacccggagttcctgataagtgacaaagggattcgactagatgagatcacgccctcactccgcgatgccgtcctcgccgttctggccgcaacgctgtcgccggagggctatgagaaagctctgggcgcgatgcgcatcaatcatttccttggtgaactcgtcaacgctccgcgtgtcatgaacgagtatagctacaattttgtgctcttctcgacgccttcgttaactagaccttggggtttctcattttatggacatcatctatgtctcagtgtgtttctttacaagacccagattgttgtttcaccgtggttcaccggtgcagaaccaaacgtcatcgattcggggccgtacgaggggactcggattcttgacgaagaggaacgacttgggttgcaactcatgcaaagcctggggcccgacgtgcgggagaaagtaaaggtattcgaactcatgaaagacccacaaatgccgaagggcagatggaatcatgacgaccaacggcatttatgtggtgcttatcgggataatcgcgtcgtgccgtatgaaggcatcgtcgtgtccgaattaagcaatgagcaacagaagctcgtagttaatattttggagcagtatttactttatctaccttcaaaggcgcgggagttgcgtctgagcgacgtgaaggctcatttcgatgagacatacttcagctggatcggcggccacggcgatgaagacccgttttactatcggattcagagccccgtcatcatcgttgagtttgatcatcattcaggcgtattcttgacgaatagcgagcctgccaagtttcatattcatacacttttaaggacaccgaatgcgggtgattacggttgggcattaaggagtcaggtcgagccactagagcaggattatgtatgggaagggtaa

SEQ ID NO: 34030 - protein, 421 aa, Muscodor strobelii
  misc_feature: SGI Peptide ID NO. 571749
  misc_feature (1)..(421): NCBI GI: 85110957 Blast Desc: NCU03057 [Neurospora crassa OR74A] gi|28925425|gb|EAA34473.1| conserved [Neurospora crassa OR74A]
  misc_feature (8)..(421): NCBI GI: 39968153 Blast Desc: MGG_02169 [Magnaporthe grisea 70-15] gi|145013058|gb|EDJ97699.1| MGG_02169 [Magnaporthe grisea 70-15]
  misc_feature (8)..(421): NCBI GI: 46116200 Blast Desc: FG03942.1 [Gibberella zeae PH-1]
  misc_feature (2)..(421): NCBI GI: 256730977 Blast Desc: NECHADRAFT_49265 [Nectria haematococca mpVI 77-13-4]
  misc_feature (8)..(421): NCBI GI: 261353546 Blast Desc: conserved [Verticillium albo-atrum VaMs.102]
  misc_feature (8)..(414): NCBI GI: 67527870 Blast Desc: AN4184.2 [Aspergillus nidulans FGSC A4] gi|40740093|gb|EAA59283.1| AN4184.2 [Aspergillus nidulans FGSC A4]
  misc_feature (8)..(421): NCBI GI: 256724056 Blast Desc: NECHADRAFT_51556 [Nectria haematococca mpVI 77-13-4]
  misc_feature (3)..(420): NCBI GI: 171687889 Blast Desc: protein product [Podospora anserina] gi|170943906|emb|CAP69558.1| protein product [Podospora anserina]
  misc_feature (8)..(414): NCBI GI: 259481215 Blast Desc: TPA: conserved [Aspergillus nidulans FGSC A4]
  misc_feature (8)..(420): NCBI GI: 119497949 Blast Desc: NFIA_034010 [Neosartorya fischeri NRRL 181] gi|119413896|gb|EAW23835.1| conserved [Neosartorya fischeri NRRL 181]
  misc_feature: Useful for introducing or modulating the production of volatile compounds
MAPDPRHYRHYLPDLSSPRFTTIAKNDARGHAKELIEKQGPPWLYGLYSHWKKLLQEPFKGVTNDGVVRPNLFKVRDEGVPIEDIVLKASAVVSQLTPEQSAKTLLHIDSPEWRTWSNPEFLISDKGIRLDEITPSLRDAVLAVLAATLSPEGYEKALGAMRINHFLGELVNAPRVMNEYSYNFVLFSTPSLTRPWGFSFYGHHLCLSVFLYKTQIVVSPWFTGAEPNVIDSGPYEGTRILDEEERLGLQLMQSLGPDVREKVKVFELMKDPQMPKGRWNHDDQRHLCGAYRDNRVVPYEGIVVSELSNEQQKLVVNILEQYLLYLPSKARELRLSDVKAHFDETYFSWIGGHGDEDPFYYRIQSPVIIVEFDHHSGVFLTNSEPAKFHIHTLLRTPNAGDYGWALRSQVEPLEQDYVWEG

SEQ ID NO: 34031 - DNA, 1795 bp, Muscodor strobelii
  misc_feature: SGI EST ID NO. CUFF.80512.0
  misc_feature: Variant of the nucleotide sequence at SEQ ID NO 34029
cacagccatcaatacaatatcgggtaacatagctgattcgtgttgtcgcaaataatgctctgacatttgatctcttcctaaagaatcgatctgggaatatgattatgtaccatcaatcagctaaaatcaattgaaaccacctttttcacttcgggccatctcgtacgattgaaaacctcactatggcgccagatccgcggcattatcgccactatctacctgacctcagttcaccgcgctttacgacgatcgcgaagaatgatgccaggggccacgcgaaagagcttattgagaagcaaggtcccccgtggttatatggactatattcacactggaaaaagttactacaagagccctttaagggggtcacaaacgacggtgttgtacggccaaacctcttcaaagttagagacgagggtgttcccattgaggacattgtactcaaagcctcagcagttgtttcacaattaacaccagagcaaagcgccaagacattgctacacattgactctccggaatggcgtacatggtcaaacccggagttcctgataagtgacaaagggattcgactagatgagatcacgccctcactccgcgatgccgtcctcgccgttctggccgcaacgctgtcgccggagggctatgagaaagctctgggcgcgatgcgcatcaatcatttccttggtgaactcgtcaacgctccgcgtgtcatgaacgagtatagctacaattttgtgctcttctcgacgccttcgttaactagaccttggggtttctcattttatggacatcatctatgtctcagtgtgtttctttacaagacccagattgttgtttcaccgtggttcaccggtgcagaaccaaacgtcatcgattcggggccgtacgaggggactcggattcttgacgaagaggaacgacttgggttgcaactcatgcaaagcctggggcccgacgtgcgggagaaagtaaaggtattcgaactcatgaaagacccacaaatgccgaagggcagatggaatcatgacgaccaacggcatttatgtggtgcttatcgggataatcgcgtcgtgccgtatgaaggcatcgtcgtgtccgaattaagcaatgagcaacagaagctcgtagttaatattttggagcagtatttactttatctaccttcaaaggcgcgggagttgcgtctgagcgacgtgaaggctcatttcgatgagacatacttcagctggatcggcggccacggcgatgaagacccgttttactatcggattcagagccccgtcatcatcgttgagtttgatcatcattcaggcgtattcttgacgaatagcgagcctgccaagtttcatattcatacacttttaaggacaccgaatgcgggtgattacggttgggcattaaggagtcaggtcgagccactagagcaggattatgtatgggaagggtaaaacatgattgaatgggcggcgatgacactatattccaatctgccatgcacaataggaagtcttgcgattgagcggagtctgcaatccttgtgctaagatgtccatgcatacgatgaaatagataagcaagagagaaatgacatgaagctgaacttgagcacccaagaacgaaattacttactggcaccagaacggagtcactcattcgcgtagctcgttctctaccaatgtaacctccggtgtttcacagtcgctaatgggcaaaaatgtagtcctatcacatatgttagagtagggggctttagtgctgttatatttgatccgaattaaatcacattgtatacagt

SEQ ID NO: 34032 - DNA, 798 bp, Muscodor strobelii
  misc_feature: SGI cDNA ID NO. 571750
  misc_feature: Encodes the peptide sequence at SEQ ID NO 34033
atggcgggcgacaagagaaagcacgcttggacggacgatgacaccgaagttaaggtcgctcttctttgcaacacgatcccctcagccagcgagactgaaatccgcgatactctcacaaacctgggaggtaaccctgtgtttgcgctgagactgctggaagggacacaaccctctgcccccttcattcaggcggagggctatcaccatgccggtcgccgctcctcctccccattcccccctcctcctccccattcccccctcctccctggcacagtcgcccctctttctctgcctcctcctccgcctcttcgacatcccaaccaacgaaaactgaaagatttaagcccatgggagcgtataaaggagcgctgggatcagattgaccacgcaagcaagtctcgcttgcctacagagtatgttgcagcagtgaatgagaatcggctatcgaatgtgtttggactccctccctcctatcagcatgcctatatcgagagagcctttgccagctttattggtcccggggagagttacacagtatggtggccagtggagccctctagacactcacgtatctgtcacatttctgtttcgtcgacagagaaaagagagttggtggcaaacgcctttgacggcaagaagattgatggccacaacattcacgtcaaagttgacgccaaaccggtcgcttccgtgttccgactcgttcccgacaaaagtgcaattaaggaagaggatctgaaagataatgtggaggccaaggccaaaaaggtgaagattgaggagactgatgatgagtga

SEQ ID NO: 34033 - protein, 265 aa, Muscodor strobelii
  misc_feature: SGI Peptide ID NO. 571750
MAGDKRKHAWTDDDTEVKVALLCNTIPSASETEIRDTLTNLGGNPVFALRLLEGTQPSAPFIQAEGYHHAGRRSSSPFPPPPPHSPLLPGTVAPLSLPPPPPLRHPNQRKLKDLSPWERIKERWDQIDHASKSRLPTEYVAAVNENRLSNVFGLPPSYQHAYIERAFASFIGPGESYTVWWPVEPSRHSRICHISVSSTEKRELVANAFDGKKIDGHNIHVKVDAKPVASVFRLVPDKSAIKEEDLKDNVEAKAKKVKIEETDDE

SEQ ID NO: 34034 - DNA, 1368 bp, Muscodor strobelii
  misc_feature: SGI cDNA ID NO. 571751
  misc_feature: Reduced expression when VOC is produced
  misc_feature: Encodes the peptide sequence at SEQ ID NO 34035
atggccaccacaccatctacccttacttcatcgagccaggaagccaaacatgccggcactggagatgctattctaccgttacccgtcgtcgacaatgagaaaagtctggcaagacaggctactgggtcactcaatgccccgtcacaggaggaccccgaagccggaaacggcctgaagcgaggtctcagcagttggcatcttcaattcattgcgataggaggaacgattggtacgggactgtttctcggcagtgactgggacgaaacgctgaataccgggattttcattgccgtcttctgggttgttttcactgccgtcaactttctgcccgtcaaatggttcggggaattcgaatcgtacttcgtctcaatcaaagtcatcacgattgtcgggttcgtaattttcgcaatcgcgatcaatgcaggagctggacagaatggatatctaggtttccagtactggcacacccctggtccatttgcagagtctatcttagatggtggcaagggtaagctcatcgggttctggtccgtgttagtgaccgcaggattctcatatcagggtgctgaactcgttggagttggagctggtgagattggtaatccctcgaagaacttaccctccgccatcaagtggaccttttggatgatcgtctcgctcttcgtggcaactatcttcttcatcggcataactgtaccctacgacaatgaccagctcctgagcggtactagtgatgcatccgcatctcctctagtcatcgctgcacagcttgctggtgtccccgtgctcccgcatattattaacgctgttctgttgactgcaatactctcagctgcgaacgcgaacgtgtattcaagcagccgtatccttctcgcgctcgcaaacgagggacatgcaccgcggatcttagcacgaacgaatcgattcggcactccccattacgccgtgggtgtctctgccgcaatcggcttgctcggatttctcaatttatccgaaagcggcgcccttgttttcaattggctactgaatatcgctagtatcgcgggtttcattggatgggctactatttcagtgtgccatcttcgattcatggacgctctacgctttcagggaatctcccgaaatagtcttctcatgaaggcgccctttcagccgtggctgactatatatggcctattcttttgcacattgatcgtcttgacgagcgggttcacggtcttcattaagtggagtaccagcggctttttcgctgcctacatcagcctcatccttttcgttgtgctcttcgcagggcataagatcatctttagaacaaggccaatcaagatacaagatattgatcttcgccaggaccacctcaacgaataa

SEQ ID NO: 34035 - protein, 455 aa, Muscodor strobelii
  misc_feature: SGI Peptide ID NO. 571751
  misc_feature (1)..(445): Pfam Id: PF00324 Pfam Desc: Amino acid permease
  misc_feature (90)..(445): Pfam Id: PF00324 Pfam Desc: Amino acid permease
  misc_feature (66)..(84): Pfam Id: PF00324 Pfam Desc: Amino acid permease
  misc_feature (86)..(450): NCBI GI: 46124261 Blast Desc: FG06508.1 [Gibberella zeae PH-1]
  misc_feature (78)..(454): NCBI GI: 238840078 Blast Desc: arginine permease [Microsporum canis CBS 113480]
  misc_feature (78)..(448): NCBI GI: 226277843 Blast Desc: arginine permease [Paracoccidioides brasiliensis Pb01]
  misc_feature (86)..(389): NCBI GI: 256723597 Blast Desc: NECHADRAFT_52243 [Nectria haematococca mpVI 77-13-4]
  misc_feature (86)..(447): NCBI GI: 169776621 Blast Desc: [Aspergillus oryzae RIB40] gi|83771512|dbj|BAE61644.1| protein product [Aspergillus oryzae]
  misc_feature (86)..(447): NCBI GI: 238503341 Blast Desc: arginine transporter, [Aspergillus flavus NRRL3357] gi|220691714|gb|EED48062.1| arginine transporter, [Aspergillus flavus NRRL3357]
  misc_feature (78)..(453): NCBI GI: 261189273 Blast Desc: arginine transporter [Ajellomyces dermatitidis SLH14081] gi|239591833|gb|EEQ74414.1| arginine transporter [Ajellomyces dermatitidis SLH14081]
  misc_feature (86)..(448): NCBI GI: 225683751 Blast Desc: histidine permease [Paracoccidioides brasiliensis Pb03]
  misc_feature (86)..(448): NCBI GI: 226293116 Blast Desc: arginine permease [Paracoccidioides brasiliensis Pb18]
  misc_feature (78)..(453): NCBI GI: 239614750 Blast Desc: arginine transporter [Ajellomyces dermatitidis ER-3]
  misc_feature: Useful for introducing or modulating the production of volatile compounds
MATTPSTLTSSSQEAKHAGTGDAILPLPVVDNEKSLARQATGSLNAPSQEDPEAGNGLKRGLSSWHLQFIAIGGTIGTGLFLGSDWDETLNTGIFIAVFWVVFTAVNFLPVKWFGEFESYFVSIKVITIVGFVIFAIAINAGAGQNGYLGFQYWHTPGPFAESILDGGKGKLIGFWSVLVTAGFSYQGAELVGVGAGEIGNPSKNLPSAIKWTFWMIVSLFVATIFFIGITVPYDNDQLLSGTSDASASPLVIAAQLAGVPVLPHIINAVLLTAILSAANANVYSSSRILLALANEGHAPRILARTNRFGTPHYAVGVSAAIGLLGFLNLSESGALVFNWLLNIASIAGFIGWATISVCHLRFMDALRFQGISRNSLLMKAPFQPWLTIYGLFFCTLIVLTSGFTVFIKWSTSGFFAAYISLILFVVLFAGHKIIFRTRPIKIQDIDLRQDHLNE

SEQ ID NO: 34036 - DNA, 2463 bp, Muscodor strobelii
  misc_feature: SGI EST ID NO. CUFF.80525.0
  misc_feature: Variant of the nucleotide sequence at SEQ ID NO 34034
gaaaaatcctaatcggaccataaatacaacgtcacggtgtatactttttcctccgttgcgatctaaacatcatcgcctgtgtcgggataagcgagatggatcctcgatgccctcttcaactggtctctggtttggaccgatgtggaaacttcgatgctcagggttttatacgataagaaaaaatggctcgcaacgccgccaacgggtcagtgcaattcctgctcaactcatggctagggataccgttatatcctgcttatgttgccctgctttgtgctccattcgattggcgtagtcctcttttttctaagtttttatgactcatcgtgtagctacagttcaacggctccgattcccttacctcatactatcctccgtctgtgaaccttccattgcatcgagctatcgacgacgagatggccaccacaccatctacccttacttcatcgagccaggaagccaaacatgccggcactggagatgctattctaccgttacccgtcgtcgacaatgagaaaagtctggcaagacaggctactgggtcactcaatgccccgtcacaggaggaccccgaagccggaaacggcctgaagcgaggtctcagcagttggcatcttcaattcattgcgataggaggaacgattggtacgggactgtttctcggcagtggtaaagcgcttgcgtccgcgggacctgttgggtgtctaatcgcatttctcttcgtgggaaccattgtctattcaatcatgacaagtttaggagaaatggcaacatatatgcccgtcaatggatccttcacagcttacgccgcaagattcgtcgatacatcactaagcttcgctgctggatggatttattggttcagctggtcaagcacgtatgcattggaacttgttggctcgggcctcgtaatccagtgtaagtgatataacctgtcaactatcagaaactagcactttgtcttaaaagcccgcggccccggaaaccccctgaaaaaaataactaacccgatacctttttggctaccagactgggacgaaacgctgaataccgggattttcattgccgtcttctgggttgttttcactgccgtcaactttctgcccgtcaaatggttcggggaattcgaatcgtacttcgtctcaatcaaagtcatcacgattgtcgggttcgtaattttcgcaatcgcgatcaatgcaggagctggacagaatggatatctaggtttccagtactggcacacccctggtccatttgcagagtctatcttagatggtggcaagggtaagctcatcgggttctggtccgtgttagtgaccgcaggattctcatatcagggtgctgaactcgttggagttggagctggtgagattggtaatccctcgaagaacttaccctccgccatcaagtggaccttttggatgatcgtctcgctcttcgtggcaactatcttcttcatcggcataactgtaccctacgacaatgaccagctcctgagcggtactagtgatgcatccgcatctcctctagtcatcgctgcacagcttgctggtgtccccgtgctcccgcatattattaacgctgttctgttgactgcaatactctcagctgcgaacgcgaacgtgtattcaagcagccgtatccttctcgcgctcgcaaacgagggacatgcaccgcggatcttagcacgaacgaatcgattcggcactccccattacgccgtgggtgtctctgccgcaatcggcttgctcggatttctcaatttatccgaaagcggcgcccttgttttcaattggctactgaatatcgctagtatcgcgggtttcattggatgggctactatttcagtgtgccatcttcgattcatggacgctctacgctttcagggaatctcccgaaatagtcttctcatgaaggcgccctttcagccgtggctgactatatatggcctattcttttgcacattgatcgtcttgacgagcgggttcacggtcttcattaagtggagtaccagcggctttttcgctgcctacatcagcctcatccttttcgttgtgctcttcgcagggcataagatcatctttagaacaaggccaatcaagatacaagatattgatcttcgccaggaccacctcaacgaataactcaagcctggcgagatcgataataaaggaggaccctccaaatcaaatttctctcagtattactttagcgctcgcgattgtacatattaacgctaaatgatttcatataccattaaaggcatagacttccacatgccattttagatataaatatcttggacttacgttgttaacgaccatagttaagagatagccacgattgttataagagtggggtcgaatgtgcacgcatgaaaaacaaggagcaagacactatgaccatagttagatatataccaagtgtattaaagatcaatttcaactgaaaatagtactgctc

SEQ ID NO: 34037 - DNA, 1209 bp, Muscodor strobelii
  misc_feature: SGI cDNA ID NO. 571752
  misc_feature: Encodes the peptide sequence at SEQ ID NO 34038
atgaccacgcttacccagtccactctcgagaatgccctaccgtcgggtttggagaagttccgatccgtgcaagtcgatacccaaaacgaaaccgtgaccttcggtggcggctcattgacgggagatcttcagtctgcagtgacggcgaaaggtttcttcaccggctgggccaatgtatcagtagtcggagcagttggcaatgtgcttggaggtggtattggccagtttcagggattgaagggccacaattgcgacaatctaatcagcgcaaggcttgttactggaaccggtgaaatcgttgaggtttcgaacacttcgaaagggacagaaaaagagttatttgaccagctcaagggcgcaggagccggattctgcgtagtcatctccatgacttcacgcatctacccgattgcagaactccgccttgccgaggataaaatgattcccgatacgatggcaatcttttcgcggggcaactttgaggcagcggggaagctattcgacgaggtcatggaattggcagaaggtcctgttgcctttgggtttgtgcttacagtgatgcccaactcaaagcctgcccagcctatcatcattgcgcaagctatctatgcaggaccacaagacgaagcagaaaagatctttcagaaatggaaagaccaccaacatgaagcgataaccgttaagaatggatcttcggaaattacaaaaatgaacgcgcaacgcgacgcgatgttcaaaaaggtgtcaaatatggatgtctataatgccttgatgtatgaggtgtcaggtgctcaagtcgtggaggcagctaaccggttcgcgagacttgtagatcaagaagggcagactggcgctacaacagttatccatcccatgcattcgaaggcactaatgaaggcagaccagggccaggagagtttcatgtgccatcgagggcgtgaatttatgattcaggtcgtgctttcgaatatggatggcgatgtcttggaagcaagtcgcacttatgctcaagaagcagtagagatcgcacgcagtctggataagacgaaaggtgtaccgaatgccatcctcgctgggaatgcgcgcatcgaggctgatatgagcgaaattttcacgctggaacgtatcaatcttctgaaagagcgcaagaagaaattggatccgaataacgtattttggtctccagcagtagacggttgggtattttga

SEQ ID NO: 34038 - protein, 402 aa, Muscodor strobelii
  misc_feature: SGI Peptide ID NO. 571752
  misc_feature (17)..(103): Pfam Id: PF01565 Pfam Desc: FAD binding domain
  misc_feature (17)..(395): NCBI GI: 256720686 Blast Desc: NECHADRAFT_85636 [Nectria haematococca mpVI 77-13-4]
  misc_feature (5)..(392): NCBI GI: 39944694 Blast Desc: MGG_10961 [Magnaporthe grisea 70-15] gi|145010945|gb|EDJ95601.1| MGG_10961 [Magnaporthe grisea 70-15]
  misc_feature (3)..(245): NCBI GI: 145241704 Blast Desc: An09g01830 [Aspergillus niger] gi|134078038|emb|CAK40121.1| protein product [Aspergillus niger]
  misc_feature (9)..(209): NCBI GI: 212526012 Blast Desc: FAD binding domain protein [Penicillium marneffei ATCC 18224] gi|210072561|gb|EEA26648.1| FAD binding domain protein [Penicillium marneffei ATCC 18224]
  misc_feature (8)..(392): NCBI GI: 239942924 Blast Desc: FAD linked oxidase-like protein [Streptomyces roseosporus NRRL 15998] gi|239989385|ref|ZP_04710049.1| FAD linked oxidase-like protein [Streptomyces roseosporus NRRL 11379]
  misc_feature (7)..(135): NCBI GI: 242779807 Blast Desc: FAD binding domain protein [Talaromyces stipitatus ATCC 10500] gi|218719610|gb|EED19029.1| FAD binding domain protein [Talaromyces stipitatus ATCC 10500]
  misc_feature (17)..(392): NCBI GI: 256735419 Blast Desc: NECHADRAFT_75243 [Nectria haematococca mpVI 77-13-4]
  misc_feature (17)..(392): NCBI GI: 46108026 Blast Desc: FG00895.1 [Gibberella zeae PH-1]
  misc_feature (17)..(392): NCBI GI: 145234713 Blast Desc: An03g01030 [Aspergillus niger] gi|134057678|emb|CAK38076.1| protein product [Aspergillus niger]
  misc_feature (10)..(400): NCBI GI: 171681431 Blast Desc: protein product [Podospora anserina] gi|170940674|emb|CAP65902.1| protein product [Podospora anserina]
MTTLTQSTLENALPSGLEKFRSVQVDTQNETVTFGGGSLTGDLQSAVTAKGFFTGWANVSVVGAVGNVLGGGIGQFQGLKGHNCDNLISARLVTGTGEIVEVSNTSKGTEKELFDQLKGAGAGFCVVISMTSRIYPIAELRLAEDKMIPDTMAIFSRGNFEAAGKLFDEVMELAEGPVAFGFVLTVMPNSKPAQPIIIAQAIYAGPQDEAEKIFQKWKDHQHEAITVKNGSSEITKMNAQRDAMFKKVSNMDVYNALMYEVSGAQVVEAANRFARLVDQEGQTGATTVIHPMHSKALMKADQGQESFMCHRGREFMIQVVLSNMDGDVLEASRTYAQEAVEIARSLDKTKGVPNAILAGNARIEADMSEIFTLERINLLKERKKKLDPNNVFWSPAVDGWVF

SEQ ID NO: 34039 - DNA, 1233 bp, Muscodor strobelii
  misc_feature: SGI cDNA ID NO. 571753
  misc_feature: Encodes the peptide sequence at SEQ ID NO 34040
atgaccacgcttacccagtccactctcgagaatgccctaccgtcgggttgtggggtctctttcccagacgaagtggagaagttccgatccgtgcaagtcgatacccaaaacgaaaccgtgaccttcggtggcggctcattgacgggagatcttcagtctgcagtgacggcgaaaggtttcttcaccggctgggccaatgtatcagtagtcggagcagttggcaatgtgcttggaggtggtattggccagtttcagggattgaagggccacaattgcgacaatctaatcagcgcaaggcttgttactggaaccggtgaaatcgttgaggtttcgaacacttcgaaagggacagaaaaagagttatttgaccagctcaagggcgcaggagccggattctgcgtagtcatctccatgacttcacgcatctacccgattgcagaactccgccttgccgaggataaaatgattcccgatacgatggcaatcttttcgcggggcaactttgaggcagcggggaagctattcgacgaggtcatggaattggcagaaggtcctgttgcctttgggtttgtgcttacagtgatgcccaactcaaagcctgcccagcctatcatcattgcgcaagctatctatgcaggaccacaagacgaagcagaaaagatctttcagaaatggaaagaccaccaacatgaagcgataaccgttaagaatggatcttcggaaattacaaaaatgaacgcgcaacgcgacgcgatgttcaaaaaggtgtcaaatatggatgtctataatgccttgatgtatgaggtgtcaggtgctcaagtcgtggaggcagctaaccggttcgcgagacttgtagatcaagaagggcagactggcgctacaacagttatccatcccatgcattcgaaggcactaatgaaggcagaccagggccaggagagtttcatgtgccatcgagggcgtgaatttatgattcaggtcgtgctttcgaatatggatggcgatgtcttggaagcaagtcgcacttatgctcaagaagcagtagagatcgcacgcagtctggataagacgaaaggtgtaccgaatgccatcctcgctgggaatgcgcgcatcgaggctgatatgagcgaaattttcacgctggaacgtatcaatcttctgaaagagcgcaagaagaaattggatccgaataacgtattttggtctccagcagtagacggttgggtattttga

SEQ ID NO: 34040 - protein, 410 aa, Muscodor strobelii
  misc_feature: SGI Peptide ID NO. 571753
  misc_feature (5)..(111): Pfam Id: PF01565 Pfam Desc: FAD binding domain
  misc_feature (31)..(111): Pfam Id: PF01565 Pfam Desc: FAD binding domain
  misc_feature (24)..(403): NCBI GI: 256720686 Blast Desc: NECHADRAFT_85636 [Nectria haematococca mpVI 77-13-4]
  misc_feature (33)..(400): NCBI GI: 39944694 Blast Desc: MGG_10961 [Magnaporthe grisea 70-15] gi|145010945|gb|EDJ95601.1| MGG_10961 [Magnaporthe grisea 70-15]
  misc_feature (24)..(253): NCBI GI: 145241704 Blast Desc: An09g01830 [Aspergillus niger] gi|134078038|emb|CAK40121.1| protein product [Aspergillus niger]
  misc_feature (24)..(400): NCBI GI: 239942924 Blast Desc: FAD linked oxidase-like protein [Streptomyces roseosporus NRRL 15998] gi|239989385|ref|ZP_04710049.1| FAD linked oxidase-like protein [Streptomyces roseosporus NRRL 11379]
  misc_feature (29)..(400): NCBI GI: 256735419 Blast Desc: NECHADRAFT_75243 [Nectria haematococca mpVI 77-13-4]
  misc_feature (24)..(217): NCBI GI: 212526012 Blast Desc: FAD binding domain protein [Penicillium marneffei ATCC 18224] gi|210072561|gb|EEA26648.1| FAD binding domain protein [Penicillium marneffei ATCC 18224]
  misc_feature (24)..(400): NCBI GI: 145234713 Blast Desc: An03g01030 [Aspergillus niger] gi|134057678|emb|CAK38076.1| protein product [Aspergillus niger]
  misc_feature (24)..(400): NCBI GI: 46108026 Blast Desc: FG00895.1 [Gibberella zeae PH-1]
  misc_feature (25)..(408): NCBI GI: 171681431 Blast Desc: protein product [Podospora anserina] gi|170940674|emb|CAP65902.1| protein product [Podospora anserina]
  misc_feature (24)..(143): NCBI GI: 242779807 Blast Desc: FAD binding domain protein [Talaromyces stipitatus ATCC 10500] gi|218719610|gb|EED19029.1| FAD binding domain protein [Talaromyces stipitatus ATCC 10500]
MTTLTQSTLENALPSGCGVSFPDEVEKFRSVQVDTQNETVTFGGGSLTGDLQSAVTAKGFFTGWANVSVVGAVGNVLGGGIGQFQGLKGHNCDNLISARLVTGTGEIVEVSNTSKGTEKELFDQLKGAGAGFCVVISMTSRIYPIAELRLAEDKMIPDTMAIFSRGNFEAAGKLFDEVMELAEGPVAFGFVLTVMPNSKPAQPIIIAQAIYAGPQDEAEKIFQKWKDHQHEAITVKNGSSEITKMNAQRDAMFKKVSNMDVYNALMYEVSGAQVVEAANRFARLVDQEGQTGATTVIHPMHSKALMKADQGQESFMCHRGREFMIQVVLSNMDGDVLEASRTYAQEAVEIARSLDKTKGVPNAILAGNARIEADMSEIFTLERINLLKERKKKLDPNNVFWSPAVDGWVF

SEQ ID NO: 34041 - DNA, 1269 bp, Muscodor strobelii
  misc_feature: SGI cDNA ID NO. 571754
  misc_feature: Elevated expression when VOC is produced
  misc_feature: Encodes the peptide sequence at SEQ ID NO 34042
atggacaaacgtttcgagcttgctctaaggcttttcggccaccatgataattccgacgacaagaataaaactgtctgcccagtcgtatcattggctgaagatgccaagcaaccattattcggagatacgaccttctatgaattcaacaagattctctcaggtgccagtgctttgttcacggttgttgtaatcggggttctcttagtcctccatgcaactcacgcgtcgaagccaaatgaacagctaaagattatgaaaattgcgctgtttctgccgtttactgcctttttcagcttcctgcaggttgcttttccggataaggcagtctatatagagccctggtctacttatatcgaagccatcgcattgggctcgttcttccttctcttgtgcgagttcattgcaccaagcacggagcagagagatgtgttctttgccgcaatgccccccaagtcaaacaagagtggcctagaatggtttcgcctcaaatggatttttatctttcaatttcctcccgttgccctctttgcggcagttctaacggccatcacgcaagctgcgggcgtttactgtgaattcaagaccagcatccattttgcaaaattatggatacaagttatcacatatgcatccacattctttgcactggctggtattttgcgattctatatgagactcaagcaagaactggcaccatacaatacattcaagaagcttctggctttcaaggcggttgttttcctcaccttcgtccaaaatattctattcctcattttggatggggctggagtgttgaaaccaaccgacgtcctgacagaagccgatctgagacacggaatccccaaactgctcgaatgtcttgagctggtccctctgtccttatttttcttctacgcatactcacacagaccatacactctcaagaacattcaacaacgcgacgaagaatcagcgaagaacatcacagcttataaaggaggcttgatgctgctgatcaagatatggagtcctgtcgagacaatcaaagcaattggatttatctttacgatgaaatcccaacgcaatcaacgaatagctggcccctacagctcaaccgcctacgaagcacaaaattacagcaatcagagctatactcctctgactcacgagatggacaaccgacctccatatccacaagcatatggacaaggaccccaagattacccacaggaacacccaggctatggtcctcagggttatggtcagggacctcccagctacacccattga

SEQ ID NO: 34042 - protein, 422 aa, Muscodor strobelii
  misc_feature: SGI Peptide ID NO. 571754
  misc_feature (176)..(318): Pfam Id: PF03619 Pfam Desc: Domain of function
  misc_feature (19)..(378): NCBI GI: 46114434 Blast Desc: FG03059.1 [Gibberella zeae PH-1]
  misc_feature (34)..(374): NCBI GI: 256722176 Blast Desc: NECHADRAFT_52448 [Nectria haematococca mpVI 77-13-4]
  misc_feature (45)..(355): NCBI GI: 238837535 Blast Desc: conserved [Microsporum canis CBS 113480]
  misc_feature (32)..(345): NCBI GI: 212530560 Blast Desc: DUF300 domain protein, [Penicillium marneffei ATCC 18224] gi|210074835|gb|EEA28922.1| DUF300 domain protein, [Penicillium marneffei ATCC 18224]
  misc_feature (24)..(345): NCBI GI: 242818353 Blast Desc: DUF300 domain protein, [Talaromyces stipitatus ATCC 10500] gi|218713565|gb|EED12989.1| DUF300 domain protein, [Talaromyces stipitatus ATCC 10500]
  misc_feature (41)..(374): NCBI GI: 121712878 Blast Desc: DUF300 domain protein, [Aspergillus clavatus NRRL 1] gi|119402203|gb|EAW12624.1| DUF300 domain protein, [Aspergillus clavatus NRRL 1]
  misc_feature (41)..(354): NCBI GI: 255956117 Blast Desc: Pc21g18160 [Penicillium chrysogenum Wisconsin 54-1255] gi|211590522|emb|CAP96713.1| Pc21g18160 [Penicillium chrysogenum Wisconsin 54-1255]
  misc_feature (25)..(355): NCBI GI: 240109133 Blast Desc: CPC735_026380 [Coccidioides posadasii C735 delta SOWgp]
  misc_feature (35)..(343): NCBI GI: 154319638 Blast Desc: BC1G_02300 [Botryotinia fuckeliana B05.10] gi|150855958|gb|EDN31150.1| BC1G_02300 [Botryotinia fuckeliana B05.10]
  misc_feature (44)..(369): NCBI GI: 115438022 Blast Desc: conserved [Aspergillus terreus NIH2624] gi|114188774|gb|EAU30474.1| conserved [Aspergillus terreus NIH2624]
  misc_feature: Useful for introducing or modulating the production of volatile compounds
MDKRFELALRLFGHHDNSDDKNKTVCPVVSLAEDAKQPLFGDTTFYEFNKILSGASALFTVVVIGVLLVLHATHASKPNEQLKIMKIALFLPFTAFFSFLQVAFPDKAVYIEPWSTYIEAIALGSFFLLLCEFIAPSTEQRDVFFAAMPPKSNKSGLEWFRLKWIFIFQFPPVALFAAVLTAITQAAGVYCEFKTSIHFAKLWIQVITYASTFFALAGILRFYMRLKQELAPYNTFKKLLAFKAVVFLTFVQNILFLILDGAGVLKPTDVLTEADLRHGIPKLLECLELVPLSLFFFYAYSHRPYTLKNIQQRDEESAKNITAYKGGLMLLIKIWSPVETIKAIGFIFTMKSQRNQRIAGPYSSTAYEAQNYSNQSYTPLTHEMDNRPPYPQAYGQGPQDYPQEHPGYGPQGYGQGPPSYTH

SEQ ID NO: 34043 - DNA, 1836 bp, Muscodor strobelii
  misc_feature: SGI EST ID NO. CUFF.80534.0
  misc_feature: Variant of the nucleotide sequence at SEQ ID NO 34041
ctgatcggcagtcctagcctcagtgatagtagtcaaactccgtgtagatagtccaatcaaacagtataaatcgtcccgcgccgcctccttgcattgacatacacgttggtggctttctttgaacacaggcttactccgcccaatatcgtcttttatatatatcaagtctgtcaaaacacatccttcaattcttgaattccagcttcttcacatttccgcaatcactaaagtctcacttccgcgcaatatggacaaacgtttcgagcttgctctaaggcttttcggccaccatgataattccgacgacaagaataaaactgtctgcccagtcgtatcattggctgaagatgccaagcaaccattattcggagatacgaccttctatgaattcaacaagattctctcaggtgccagtgctttgttcacggttgttgtaatcggggttctcttagtcctccatgcaactcacgcgtcgaagccaaatgaacagctaaagattatgaaaattgcgctgtttctgccgtttactgcctttttcagcttcctgcaggttgcttttccggataaggcagtctatatagagccctggtctacttatatcgaagccatcgcattgggctcgttcttccttctcttgtgcgagttcattgcaccaagcacggagcagagagatgtgttctttgccgcaatgccccccaagtcaaacaagagtggcctagaatggtttcgcctcaaatggatttttatctttcaatttcctcccgttgccctctttgcggcagttctaacggccatcacgcaagctgcgggcgtttactgtgaattcaagaccagcatccattttgcaaaattatggatacaagttatcacatatgcatccacattctttgcactggctggtattttgcgattctatatgagactcaagcaagaactggcaccatacaatacattcaagaagcttctggctttcaaggcggttgttttcctcaccttcgtccaaaatattctattcctcattttggatggggctggagtgttgaaaccaaccgacgtcctgacagaagccgatctgagacacggaatccccaaactgctcgaatgtcttgagctggtccctctgtccttatttttcttctacgcatactcacacagaccatacactctcaagaacattcaacaacgcgacgaagaatcagcgaagaacatcacagcttataaaggaggcttgatgctgctgatcaagatatggagtcctgtcgagacaatcaaagcaattggatttatctttacgatgaaatcccaacgcaatcaacgaatagctggcccctacagctcaaccgcctacgaagcacaaaattacagcaatcagagctatactcctctgactcacgagatggacaaccgacctccatatccacaagcatatggacaaggaccccaagattacccacaggaacacccaggctatggtcctcagggttatggtcagggacctcccagctacacccattgatctcgtcaaacacgaactatctcaacctttgagtagaggaatgtatagagtgtaggaaaactgtcttttgagggtatccgaatcgtatgcttgtttctccgtgctggtattctagaggctatttcaggcggcatggcgttttggaagattataggcgttgtccatgaggactactgagagtactcggtttaatccagttttgaaggatagaaaagtaggcgacttgcttcttgaattgtacgatatacaattcaaaatttccatacgagataccaaagtctttttacacatatatgcaaatgaataatttgatacccgaa

SEQ ID NO: 34044 - DNA, 1497 bp, Muscodor strobelii
  misc_feature: SGI cDNA ID NO. 571755
  misc_feature: Encodes the peptide sequence at SEQ ID NO 34045
atgcctaacacgggccagaaaagtcccaattgccatctgtgccgccaacgaagggtcaagtgcgacctcactcaaccagcttgtctccgttgcaccaagtatggagttccttgtcctgggtataggaaggagggcgacgttgttttcaagaaccagatcggtgtaattgcaaagaagtctacaagagtttctgctaccaagcggaacaagtccaagaccccggaattgttaatgaatggctctatcggcaatgactttcctctctcgcctctgcctttgcctacttcgtcggctgcttttgtgttgcggcgtttcgcctttttgagccgcgggtttctgcattatggcgaaatatgggatttcctccccggtctgtacaacgacgagaaaaacaactcttgtcttatgacttgttccgacgcattcaaagaaacttgtgtagccaatgagcaaggcttgtctaatgacagagaatcacttgtgcgctccgcaagagttataggagcggcaaaccaagctattcaacatcatgagtccagagctgcagattctaccgttttaagtatatggctcttggcggtgtatgaactcctgcttggcaacaaagaaaacgaatcgatgcctgctcctgctgcatggcatacccatgttgagggtctcgccagtattattagactacgtggacctgctcaatttgcccgcaaacgaggacgcgctctgttcttcatgtcattcggcacggtccaaatacgatcgctcatgctaaatatcgagtgtccgcccgagtctaaagaatggctgcaactgctcaaggcccactcgtcaaatgacgatgtcttcatcttcacttgtgatatacaagagttcatctgcgacgtctgtaccctcttgccgcagatcagggcacttgcaacaacaaaccatgatccttccgtaccacccatcgcagagctgatagcactgttcaatagagccgaagagctcgagcagccaatgttgtctcggatctctaaagcatcgccttcaccgtgtagctgccccatagccgagcttaatcttcgaaatttataccgctcagctcgatgcaaattgtggcactggtttctttttgcctgcgacatcgtcatcgaccaagatacgaaacctgaggacttagcattcctcaatgaacagcgacgtcgcggttcgtcaatcatttctgcattggcagagggtatactcgaagatgcggctactgttctaaaagacgaaagaccagttgatacacccgaacacgatcaatgcggttcgaacaatagtaatctgaattcaaaagcatgttggatggacgcgattcggttgctgtggcccttgagtttcaccgcacgcagttggacagtccctccagaacagagaaaaagagcgagacagctcctgggcgtagttggtgggaacctcggcatatttgaagctcgaaagtacagtggtttggcaaaacctagcttttgtgtattctga

SEQ ID NO: 34045 - protein, 498 aa, Muscodor strobelii
  misc_feature: SGI Peptide ID NO. 571755
  misc_feature (11)..(48): Pfam Id: PF00172 Pfam Desc: Fungal Zn(2)-Cys(6) binuclear cluster domain
  misc_feature (11)..(43): Pfam Id: PF00172 Pfam Desc: Fungal Zn(2)-Cys(6) binuclear cluster domain
  misc_feature (1)..(486): NCBI GI: 261357848 Blast Desc: conserved [Verticillium albo-atrum VaMs.102]
  misc_feature (1)..(484): NCBI GI: 256735113 Blast Desc: NECHADRAFT_31630 [Nectria haematococca mpVI 77-13-4]
  misc_feature (1)..(486): NCBI GI: 46108530 Blast Desc: FG01147.1 [Gibberella zeae PH-1]
  misc_feature (1)..(253): NCBI GI: 242776211 Blast Desc: conserved [Talaromyces stipitatus ATCC 10500] gi|218722419|gb|EED21837.1| conserved [Talaromyces stipitatus ATCC 10500]
  misc_feature (1)..(287): NCBI GI: 212532687 Blast Desc: PMAA_070410 [Penicillium marneffei ATCC 18224] gi|210071864|gb|EEA25953.1| PMAA_070410 [Penicillium marneffei ATCC 18224]
  misc_feature (1)..(481): NCBI GI: 256724394 Blast Desc: NECHADRAFT_88163 [Nectria haematococca mpVI 77-13-4]
  misc_feature (1)..(241): NCBI GI: 145239237 Blast Desc: An08g01460 [Aspergillus niger] gi|134076771|emb|CAK39826.1| protein product [Aspergillus niger]
  misc_feature (1)..(481): NCBI GI: 121715760 Blast Desc: C6 zinc finger domain protein [Aspergillus clavatus NRRL 1] gi|119403646|gb|EAW14063.1| C6 zinc finger domain protein [Aspergillus clavatus NRRL 1]
  misc_feature (1)..(266): NCBI GI: 256732886 Blast Desc: [Nectria haematococca mpVI 77-13-4]
  misc_feature (1)..(290): NCBI GI: 169613524 Blast Desc: SNOG_09893 [Phaeosphaeria nodorum SN15] gi|160702745|gb|EAT83158.2| SNOG_09893 [Phaeosphaeria nodorum SN15]
MPNTGQKSPNCHLCRQRRVKCDLTQPACLRCTKYGVPCPGYRKEGDVVFKNQIGVIAKKSTRVSATKRNKSKTPELLMNGSIGNDFPLSPLPLPTSSAAFVLRRFAFLSRGFLHYGEIWDFLPGLYNDEKNNSCLMTCSDAFKETCVANEQGLSNDRESLVRSARVIGAANQAIQHHESRAADSTVLSIWLLAVYELLLGNKENESMPAPAAWHTHVEGLASIIRLRGPAQFARKRGRALFFMSFGTVQIRSLMLNIECPPESKEWLQLLKAHSSNDDVFIFTCDIQEFICDVCTLLPQIRALATTNHDPSVPPIAELIALFNRAEELEQPMLSRISKASPSPCSCPIAELNLRNLYRSARCKLWHWFLFACDIVIDQDTKPEDLAFLNEQRRRGSSIISALAEGILEDAATVLKDERPVDTPEHDQCGSNNSNLNSKACWMDAIRLLWPLSFTARSWTVPPEQRKRARQLLGVVGGNLGIFEARKYSGLAKPSFCVF

SEQ ID NO: 34046 - DNA, 1800 bp, Muscodor strobelii
  misc_feature: SGI EST ID NO. CUFF.80560.1
  misc_feature: Variant of the nucleotide sequence at SEQ ID NO 34044
cgagaacttcagatcgtcaccgacgtcgcaaggagccaacatgcctaacacgggccagaaaagtcccaattgccatctgtgccgccaacgaagggtcaagtgcgacctcactcaaccagcttgtctccgttgcaccaagtatggagttccttgtcctgggtataggaaggagggcgacgttgttttcaagaaccagatcggtgtaattgcaaagaagtctacaagagtttctgctaccaagcggaacaagtccaagaccccggaattgttaatgaatggctctatcggcaatgactttcctctctcgcctctgcctttgcctacttcgtcggctgcttttgtgttgcggcgtttcgcctttttgagccgcgggtttctgcattatggcgaaatatgggatttcctccccggtctgtacaacgacgagaaaaacaactcttgtcttatgacttgttccgacgcattcaaagaaacttgtgtagccaatgagcaaggcttgtctaatgacagagaatcacttgtgcgctccgcaagagttataggagcggcaaaccaagctattcaacatcatgagtccagagctgcagattctaccgttttaagtatatggctcttggcggtgtatgaactcctgcttggcaacaaagaaaacgaatcgatgcctgctcctgctgcatggcatacccatgttgagggtctcgccagtattattagactacgtggacctgctcaatttgcccgcaaacgaggacgcgctctgttcttcatgtcattcggcacggtccaaatacgatcgctcatgctaaatatcgagtgtccgcccgagtctaaagaatggctgcaactgctcaaggcccactcgtcaaatgacgatgtcttcatcttcacttgtgatatacaagagttcatctgcgacgtctgtaccctcttgccgcagatcagggcacttgcaacaacaaaccatgatccttccgtaccacccatcgcagagctgatagcactgttcaatagagccgaagagctcgagcagccaatgttgtctcggatctctaaagcatcgccttcaccgtgtagctgccccatagccgagcttaatcttcgaaatttataccgctcagctcgatgcaaattgtggcactggtttctttttgcctgcgacatcgtcatcgaccaagatacgaaacctgaggacttagcattcctcaatgaacagcgacgtcgcggttcgtcaatcatttctgcattggcagagggtatactcgaagatgcggctactgttctaaaagacgaaagaccagttgatacacccgaacacgatcaatgcggttcgaacaatagtaatctgaattcaaaagcatgttggatggacgcgattcggttgctgtggcccttgagtttcaccgcacgcagttggacagtccctccagaacagagaaaaagagcgagacagctcctgggcgtagttggtgggaacctcggcatatttgaagctcgaaagtacagtggtttggcaaaacctagcttttgtgtattctgagcttttgtcttctcaaatcagcaaagacctgtcgaatggatcggcggcacctcctcatatgattcatgttgcaggcgacatgtttttataaactgctcacgctatcatagtctaatatctacttgttctaagtgagcgccagcgctcctgtcagctaatacgtgacgtgcttaagccacgtggatgatgacgagattctatgcgtccaatatcctcccgtattctcatctcctctaggcgcttctattgccagcgcaccctcg

SEQ ID NO: 34047 - DNA, 552 bp, Muscodor strobelii
  misc_feature: SGI cDNA ID NO. 571756
  misc_feature: Encodes the peptide sequence at SEQ ID NO 34048
atgatatccttcaagtctatcttagcgaccagtttcgcatgtttgacagcagccttgccggcagatgttccatgtcagggaggagattgccttcccggatgtggagagcttgatcttttctacaccggactccctgcctatcatccgctcgtgatagctgcaggattcaacccagacctagtcaacaggacaatccacctcgatgcccagagtctcatcaatgctggctataacctccgagtggtcttaggaggtccagaagttcccatctcagtattcaaggacgagatggagcggggccaggcgggcaattcctggagcgcaacgggcatcggcttcgggcttcgagcgtaccctcgacaggatacgacggtcgagttcaccgatctgatctcactgttccgcagtgaggctccagagtccccggttctcttcaactacaacaccacgaccttcctgtgggcgactcagcactacctcccgctgtcgagcgactgcgctaatgcggctggtaccaacctcggctttaccgtggtttgcgatatctgctga

SEQ ID NO: 34048 - protein, 183 aa, Muscodor strobelii
  misc_feature: SGI Peptide ID NO. 571756
  misc_feature (33)..(181): NCBI GI: 46109866 Blast Desc: FG01815.1 [Gibberella zeae PH-1]
  misc_feature (34)..(168): NCBI GI: 171690162 Blast Desc: protein product [Podospora anserina] gi|170945029|emb|CAP71140.1| protein product [Podospora anserina]
  misc_feature (33)..(141): NCBI GI: 46126403 Blast Desc: FG07579.1 [Gibberella zeae PH-1]
MISFKSILATSFACLTAALPADVPCQGGDCLPGCGELDLFYTGLPAYHPLVIAAGFNPDLVNRTIHLDAQSLINAGYNLRVVLGGPEVPISVFKDEMERGQAGNSWSATGIGFGLRAYPRQDTTVEFTDLISLFRSEAPESPVLFNYNTTTFLWATQHYLPLSSDCANAAGTNLGFTVVCDIC

SEQ ID NO: 34049 - DNA, 1014 bp, Muscodor strobelii
  misc_feature: SGI EST ID NO. CUFF.80542.0
  misc_feature: Variant of the nucleotide sequence at SEQ ID NO 34047
ctagcatagtcttcacagtggacaaagaatcgattagatgctgtcacttgctcggcaagacaatattcgacaatttttgagtttcggcattggtagcgtaacggcatggcgctctagatctgtttcgtgacaaccgccgcatctcacggctatgcatgccaatagccgactccttgcatcctacggcccccagaatctcgaaatcctttgacttgcattaaatgaagctttgagaaagccttcgtttccgaaaatcttttagcactagctgagaattgagaatacaaaattttccgttataaacgaagcctacaaaccaatatgatatccttcaagtctatcttagcgaccagtttcgcatgtttgacagcagccttgccggcagatgttccatgtcagggaggagattgccttcccggatgtggagagcttgatcttttctacaccggactccctgcctatcatccgctcgtgatagctgcaggattcaacccagacctagtcaacaggacaatccacctcgatgcccagagtctcatcaatgctggctataacctccgagtggtcttaggaggtccagaagttcccatctcagtattcaaggacgagatggagcggggccaggcgggcaattcctggagcgcaacgggcatcggcttcgggcttcgagcgtaccctcgacaggatacgacggtcgagttcaccgatctgatctcactgttccgcagtgaggctccagagtccccggttctcttcaactacaacaccacgaccttcctgtgggcgactcagcactacctcccgctgtcgagcgactgcgctaatgcggctggtaccaacctcggctttaccgtggtttgcgatatctgctgaagaagcacggggattgggagtagcatagctctacttcacgccttacgggactataaatgtgattcggagagtcataaagagctcgacttagttatagtatgtacgagcataataattagttgttagatgttcactttctgg

SEQ ID NO: 34050 - DNA, 393 bp, Muscodor strobelii
  misc_feature: SGI cDNA ID NO. 571757
  misc_feature: Encodes the peptide sequence at SEQ ID NO 34051
atgcaattcctcaccatcatcctcgcactctctagtacctccttaggggccatccttcctcgtcaaaatcaagacgacaacgcagccgacaacgcaaacgcagcagcggacttcggccaatgcacgccgacgatggacttccagctcggtcgtcccgggcgaaaagcagacgaggggactttcctacccactgatccgctcgtcgcggagggtcagcaagacgcgctcaaccccaatattatcacgaataggatttgtgatcagcttacgaatgtgtgtgaggctaatgatgccgctgtgagtgcttgtgaggcggcacaggcgatggttgaggggcttggtactaaggatgagacgactgctgatgcttttaattctgcgcttgggttttga

SEQ ID NO: 34051 - protein, 130 aa, Muscodor strobelii
  misc_feature: SGI Peptide ID NO. 571757
  misc_feature (37)..(130): NCBI GI: 171678543 Blast Desc: protein product [Podospora anserina] gi|170937341|emb|CAP61999.1| protein product [Podospora anserina]
  misc_feature (1)..(130): NCBI GI: 116205934 Blast Desc: CHGG_02260 [Chaetomium globosum CBS 148.51] gi|88182857|gb|EAQ90325.1| CHGG_02260 [Chaetomium globosum CBS 148.51]
  misc_feature (37)..(130): NCBI GI: 261358798 Blast Desc: conserved [Verticillium albo-atrum VaMs.102]
  misc_feature (34)..(130): NCBI GI: 85092508 Blast Desc: NCU06079 [Neurospora crassa OR74A] gi|28920845|gb|EAA30191.1| conserved [Neurospora crassa OR74A]
  misc_feature (37)..(130): NCBI GI: 39943026 Blast Desc: MGG_03593 [Magnaporthe grisea 70-15] gi|145009839|gb|EDJ94495.1| MGG_03593 [Magnaporthe grisea 70-15]
  misc_feature (33)..(130): NCBI GI: 256734836 Blast Desc: NECHADRAFT_75503 [Nectria haematococca mpVI 77-13-4]
  misc_feature (36)..(130): NCBI GI: 145609820 Blast Desc: MGG_12551 [Magnaporthe grisea 70-15] gi|145017205|gb|EDK01568.1| MGG_12551 [Magnaporthe grisea 70-15]
  misc_feature (37)..(130): NCBI GI: 46135749 Blast Desc: FG09390.1 [Gibberella zeae PH-1]
  misc_feature (37)..(130): NCBI GI: 156035821 Blast Desc: SS1G_13115 [Sclerotinia sclerotiorum 1980] gi|154698519|gb|EDN98257.1| SS1G_13115 [Sclerotinia sclerotiorum 1980]
  misc_feature (43)..(130): NCBI GI: 149210527 Blast Desc: MGCH7_ch7g738 [Magnaporthe grisea 70-15] gi|86196693|gb|EAQ71331.1| MGCH7_ch7g738 [Magnaporthe grisea 70-15]
MQFLTIILALSSTSLGAILPRQNQDDNAADNANAAADFGQCTPTMDFQLGRPGRKADEGTFLPTDPLVAEGQQDALNPNIITNRICDQLTNVCEANDAAVSACEAAQAMVEGLGTKDETTADAFNSALGF

SEQ ID NO: 34052 - DNA, 656 bp, Muscodor strobelii
  misc_feature: SGI EST ID NO. CUFF.80545.0
  misc_feature: Variant of the nucleotide sequence at SEQ ID NO 34050
tgactctccacgccaaccactttcggtcattaccaggagtagatctctgtcattatcatcataataagttctgcgaacttttcaattcttgtacacacacttccatatcaaacagctagcctgtcttaatccccttcaacaaacaaactcacccccttcaaaaagtcacaatgcaattcctcaccatcatcctcgcactctctagtacctccttaggggccatccttcctcgtcaaaatcaagacgacaacgcagccgacaacgcaaacgcagcagcggacttcggccaatgcacgccgacgatggacttccagctcggtcgtcccgggcgaaaagcagacgaggggactttcctacccactgatccgctcgtcgcggagggtcagcaagacgcgctcaaccccaatattatcacgaataggatttgtgatcagcttacgaatgtgtgtgaggctaatgatgccgctgtgagtgcttgtgaggcggcacaggcgatggttgaggggcttggtactaaggatgagacgactgctgatgcttttaattctgcgcttgggttttgagttagggttggtgaggtgggatgggaaggggttgggagggggagggatgaggttgagggggttcactgagttggaagattttgcaacgccaag

SEQ ID NO: 34053 - DNA, 1851 bp, Muscodor strobelii
  misc_feature: SGI cDNA ID NO. 571758
  misc_feature: Encodes the peptide sequence at SEQ ID NO 34054
atgcgatacgaagactgggatgtcttgttgttccccaaggactccaaagttcccatcaaggagttcaagaccaactgtcatgtggtccatgatggggagtttgcctactcgcacgggtccttcggcctccctactatgacatgtttcatgccgggcctcgcccctgccacccctttcaacatctctcttcattcctggaagacccccgaagtcagccagttcacccgcaactacagcaagcatgtggaacacgtcaagttcgaggcccgcgtcctgattgatggccgtctagtggccacttcgtcgttcaaccgcaccggaccatggcctcagctgatcaaccatagcttcggtgaggttgatcctgacccagcagtgcccagacggtctgaacctgagctgactgccagctcagagttcaccaagaatggtgatctagagatcctcaagtttcccatgtttcgcaaggagctcctccagcagagttattggagccctgccgacgaacttggtcggatcaagattgtcattagtgaaggattcccgcgagattccctgacggtccccatggaacgcgtcaagaacattgttgcattctccttccagcatgcccctatcgatatcctcgagacctcgggcattgcctggccgaacccggccatgtggcgccggggtccttacaatccaaccatgcctgtgccagcacagcagcatgaagatggcccagaggcacacattcattccccacgtcgacgctcgattagcatgaaggcatcatcaacctctggacaggtcccaacgaatgtggttccttcacagatgaatacaaacacatttcttggaaacatgcccaacacgcagggcctcctgcaacgcggcgcggatggctccaatgttggatgtatggatcctttcgaccagcccaaggcagatgcacccacattctttgattgggctgcgaactttggtcccgccggatgcccgaacccagttgacaccaccaagggcaaattcgcttcacgcaagatgaacggcggcaatcgagtctcggcctctgataccagtatgccagactacagctcgggttgctccgagggtgctaatatcatgatgactgattttcagccgatgaatttcaccatgcctaatgttgaagacgcagacatcagtaacagcaacctagcgcccaaagcgcctaccaacaccccaacggcattgactgctatcaacttttctgatgattttagtatgggtaccaataaagcaggcacaccagggaatactccacctaccaacgagttcttcgccgtcaacaacggtaccttttcgaccgagatggccaccaccctcactcactcccttttgaatcaaccacttccacttccggttcaaccagccaacatacctttgcccgcagatgagatcaagtcacgaaaggagaaccgaatgcacgaaaccatcaatccgagcacgtctcttctagatcatatagacatgcgcaaggtatcgcagacgaccttcagccaattggggaagctaagccgtgataccagtaccagcaataattcgccttcgagccagaatgcattatctgcctattccaatcggtccctttccggatttgaattcggacaagacttgaccaacaccgcgcctctcgcctcctatgtcactaatgacatgagcgcagccactgaaactcgcgttggtagtggctccgacagaaacatcaaacgcacacgccagttcactccagccagtgcaaaggctatcgacgacgaagatgagccccgtcgcagtagccctcgggtccgaatcggctcaggcgatcaagctcctgaagtcaattaa

SEQ ID NO: 34054 - protein, 616 aa, Muscodor strobelii
  misc_feature: SGI Peptide ID NO. 571758
  misc_feature (1)..(607): NCBI GI: 171679751 Blast Desc: protein product [Podospora anserina] gi|170939501|emb|CAP64729.1| protein product [Podospora anserina]
  misc_feature (1)..(510): NCBI GI: 85089775 Blast Desc: NCU09459 [Neurospora crassa OR74A] gi|28919426|gb|EAA28868.1| [Neurospora crassa OR74A]
  misc_feature (1)..(231): NCBI GI: 256727275 Blast Desc: NECHADRAFT_33434 [Nectria haematococca mpVI 77-13-4]
  misc_feature (1)..(251): NCBI GI: 154297602 Blast Desc: BC1G_12646 [Botryotinia fuckeliana B05.10] gi|150858469|gb|EDN33661.1| BC1G_12646 [Botryotinia fuckeliana B05.10]
  misc_feature (1)..(251): NCBI GI: 156030979 Blast Desc: SS1G_14270 [Sclerotinia sclerotiorum 1980] gi|154700661|gb|EDO00400.1| SS1G_14270 [Sclerotinia sclerotiorum 1980]
  misc_feature (133)..(605): NCBI GI: 145605224 Blast Desc: MGG_13735 [Magnaporthe grisea 70-15] gi|145013066|gb|EDJ97707.1| MGG_13735 [Magnaporthe grisea 70-15]
  misc_feature (1)..(370): NCBI GI: 115385348 Blast Desc: [Aspergillus terreus NIH2624] gi|114196913|gb|EAU38613.1| [Aspergillus terreus NIH2624]
  misc_feature (1)..(267): NCBI GI: 240280988 Blast Desc: conserved [Ajellomyces capsulatus H143]
  misc_feature (1)..(267): NCBI GI: 239609780 Blast Desc: conserved [Ajellomyces dermatitidis ER-3]
  misc_feature (1)..(267): NCBI GI: 261199115 Blast Desc: conserved [Ajellomyces dermatitidis SLH14081] gi|239595111|gb|EEQ77692.1| conserved [Ajellomyces dermatitidis SLH14081]
MRYEDWDVLLFPKDSKVPIKEFKTNCHVVHDGEFAYSHGSFGLPTMTCFMPGLAPATPFNISLHSWKTPEVSQFTRNYSKHVEHVKFEARVLIDGRLVATSSFNRTGPWPQLINHSFGEVDPDPAVPRRSEPELTASSEFTKNGDLEILKFPMFRKELLQQSYWSPADELGRIKIVISEGFPRDSLTVPMERVKNIVAFSFQHAPIDILETSGIAWPNPAMWRRGPYNPTMPVPAQQHEDGPEAHIHSPRRRSISMKASSTSGQVPTNVVPSQMNTNTFLGNMPNTQGLLQRGADGSNVGCMDPFDQPKADAPTFFDWAANFGPAGCPNPVDTTKGKFASRKMNGGNRVSASDTSMPDYSSGCSEGANIMMTDFQPMNFTMPNVEDADISNSNLAPKAPTNTPTALTAINFSDDFSMGTNKAGTPGNTPPTNEFFAVNNGTFSTEMATTLTHSLLNQPLPLPVQPANIPLPADEIKSRKENRMHETINPSTSLLDHIDMRKVSQTTFSQLGKLSRDTSTSNNSPSSQNALSAYSNRSLSGFEFGQDLTNTAPLASYVTNDMSAATETRVGSGSDRNIKRTRQFTPASAKAIDDEDEPRRSSPRVRIGSGDQAPEVN

SEQ ID NO: 34055 - DNA, 555 bp, Muscodor strobelii
  misc_feature: SGI cDNA ID NO. 571759
  misc_feature: Encodes the peptide sequence at SEQ ID NO 34056
atgaactccacgatgctccctcaacgaatcgtccgggcctcagccctgcgcacagcttccatggctgcgtcacgaagactgcccatcctccagcgccgtgcctttctaccctcccacctcaacgacaagaaggacatagaggagagatatcccgataatcccaccctcaccgaggccgaagacccccttcagaatggaggctacatcaaccccccgcgcgtcaagcgacagttccgcgatccccacgccgactggtgggacaagcaggagcgcaggaactttggtgagccggtccacgaggaccacgacatcctcggcatgttcagtccctacgagtacacctgggtcagcaacaagaccgcctttgcccagctcggcatcttcattgccacctttgtcagtgtctgctgggttgtgggaaggctatatcccgacaagccatccttccctcgggagtttgacggagggttagagagagaactgggaggagccggtgccgtgcgggcgagaatggaaggagacccggaaccattccaggctgaagaggttgattag

SEQ ID NO: 34056 - protein, 184 aa, Muscodor strobelii
  misc_feature: SGI Peptide ID NO. 571759
  misc_feature (1)..(177): NCBI GI: 46122745 Blast Desc: FG05750.1 [Gibberella zeae PH-1]
  misc_feature (5)..(177): NCBI GI: 256727276 Blast Desc: [Nectria haematococca mpVI 77-13-4]
  misc_feature (3)..(177): NCBI GI: 171679749 Blast Desc: protein product [Podospora anserina] gi|170939500|emb|CAP64728.1| protein product [Podospora anserina]
  misc_feature (5)..(177): NCBI GI: 85089777 Blast Desc: NADH:ubiquinone oxidoreductase 20.1kD subunit [Neurospora crassa OR74A] gi|28919427|gb|EAA28869.1| NADH:ubiquinone oxidoreductase 20.1kD subunit [Neurospora crassa
  misc_feature (5)..(177): NCBI GI: 261353929 Blast Desc: NADH:ubiquinone oxidoreductase 20.1kD subunit [Verticillium albo-atrum VaMs.102]
  misc_feature (5)..(181): NCBI GI: 39968183 Blast Desc: MGG_02184 [Magnaporthe grisea 70-15] gi|145013064|gb|EDJ97705.1| MGG_02184 [Magnaporthe grisea 70-15]
  misc_feature (5)..(172): NCBI GI: 116214439 Blast Desc: CHGG_11060 [Chaetomium globosum CBS 148.51] gi|88175415|gb|EAQ82884.1| CHGG_11060 [Chaetomium globosum CBS 148.51]
  misc_feature (16)..(175): NCBI GI: 156030977 Blast Desc: SS1G_14269 [Sclerotinia sclerotiorum 1980] gi|154700660|gb|EDO00399.1| SS1G_14269 [Sclerotinia sclerotiorum 1980]
  misc_feature (5)..(175): NCBI GI: 154297604 Blast Desc: BC1G_12647 [Botryotinia fuckeliana B05.10] gi|150858470|gb|EDN33662.1| BC1G_12647 [Botryotinia fuckeliana B05.10]
  misc_feature (55)..(174): NCBI GI: 119489241 Blast Desc: NFIA_115110 [Neosartorya fischeri NRRL 181] gi|119411030|gb|EAW20975.1| conserved [Neosartorya fischeri NRRL 181]
MNSTMLPQRIVRASALRTASMAASRRLPILQRRAFLPSHLNDKKDIEERYPDNPTLTEAEDPLQNGGYINPPRVKRQFRDPHADWWDKQERRNFGEPVHEDHDILGMFSPYEYTWVSNKTAFAQLGIFIATFVSVCWVVGRLYPDKPSFPREFDGGLERELGGAGAVRARMEGDPEPFQAEEVD

SEQ ID NO: 34057 - DNA, 1355 bp, Muscodor strobelii
  misc_feature: SGI EST ID NO. CUFF.80606.0
  misc_feature: Variant of the nucleotide sequence at SEQ ID NO 34055
gtaagctccaatgggaagccactcaattcactcctagtgagtgagtgtgtttgtctgccatatcccatacgacaaccacccaattgacatcaccgctgagggcattgtggtctctatgaactccacgatgctccctcaacgaatcgtccgggcctcagccctgcgcacagcttccatggctgcgtcacgaagactgcccatcctccagcgccgtgcctttctaccctcccacctcaacgacaagaaggacatagaggagagatatcccgataatcccaccctcaccgaggccgaagacccccttcagaatggaggctacatcaaccccccgcgcgtcaagcgacagttccgcgatccccacgccgactggtgggacaagcaggagcgcaggaactttggtgagccggtccacgaggaccacgacatcctcggcatgttcagtccctacgagtacacctgggtcagcaacaagaccgcctttgcccagctcggcatcttcattgccacctttgtcagtgtctgctgggttgtgggaaggctatatcccgacaagccatccttccctcgggagtttgacggagggttagagagagaactgggaggagccggtgccgtgcgggcgagaatggaaggagacccggaaccattccaggctgaagaggttgattagactgtttactgttcccatgtaccaatagctaaagcttctgtcatggaccacagaagcagtacatacccaatgggatttggccgagcatgagggcttctatgaatcaatagacggttgcaagtccccgcagctgaactctgagaataccatgtttcctttgttcaaatatatctcatgaaatgtttcttcatactatggatcaagtgtcttattctcatctcaccctcctctttgtgagcaatgcacttaccgagaccgagagcactgataagctcatttcagcacgctttcctgttgctttccctccgcctgccttcatcgatatctcgatggcacagcactacgatggtctcatcgtattattgcttcactctttccattggacgattgaattgccaatagagacaagcagtaggcagagccaaaacagagcgggagagaagccgcggttgttccttacttgtatagactcaagtgaacgaactttgtgtgcagattggaagcatatgtgactagctcattggtggacgaggtgggcaagaaaaggtaagactgtgaggttaccgggtgtcgggcagatgtggtgtcatttgtggtctagaaaaggggaagtcgtgagggactctgtggcccatatctaactgcagaggcagtcgcgagctctccaaactcccctacggaatcc

SEQ ID NO: 34058 - DNA, 5094 bp, Muscodor strobelii
  misc_feature: SGI cDNA ID NO. 571760
  misc_feature: Encodes the peptide sequence at SEQ ID NO 34059
atgacgggcaccgcgtcgtccacccaagagccagcacacgaccgcgccgaacccgactccaacccgccgcaaacgacacacatccccgacgacaccacggattctcagacaaagaaagaggacgataccaatgacgatgataagcataactcctccataacaaacggccatgtcgatgttgccgtcgctacgaatggcaccgtctcagccgatgcaagccaagacaagcccaacggcactcacgacgatgaacggccttccaaacgtcgtcgcgtcgaagagacaacccccaagaagccgtctaaaaaggccaaagtcgagtcgccgccatggaagaagatcgaggccgatgggccgaccactttcaccgagaacggcatgcgcagatcgggccggaccaacacggtgcctctggagctgcagccccaaggcagcaagaggatgactagaggtcacgcgtccaacacgccgaagagcgcatctacctccaagagcgcggccgcctctcgggcagcccccgccaagcctgcacctccgcccaaacacaacaccagaaactcttcaataagttttcccgccctcaggccgccccccaagacacgaaggcggtcgccgtcaccaccgccgccgccgacaggtcctcctccgaagcgctccgaacgtattcgccgaagctctagaacacaacgcgaaagcctcggtacccctagccgtcctgtagatacgcctgaaagccccaacacacgtcccaccagaatccgactgcgactgcgagagccaaccatccccatcgtaaatcctacccaaatcaatgtattacccggccagacggtcgcacgcccgaaagttgccccctctttcgcggaatatgttgcacaagcaccagccttggatctccagagcggtggctggtatgatgccgtcgatgatggtccttcatacacagatgagatggcccagaaagatgcccagatcatcttgcgcatcgaggctgagaccgaacccggcgggttgctgagtcaggggcattcctcccttttcgtgccagagcccgtggaagaaccgcctcggcaatgggctcgcatggaccatctcgtcaagcagatgaccaattttcgtaagctgatggtgatggagcatcaacgacacaaggccgccgccaagagactggcagaggcatgcaaggacgagtggctccgtcgtcaacccaaatctgctgaacagatcgaggccgaggcgcgtgctgtctgcattgtgcagtatagggccgtcgtcaaggcgcttcaaggcacatgggagaatgtcaaggtggaaatcaatcggcgtcgcgtagaagaatggcaggctgccgaacagaagcgcatcaaaaccgccctcaatgaagctgtgagcatgtcagaactcaagctacaggcccgccaagctcgccccgattctgaagcattgtccgacgaggaggaagaagaagacgacgacgatgatctagactctctggctgactctggaaaagaattggatcaagatgacatggagcttgattctgattcggacgctatagaagccgaaccacataatgcgtctgataagggcgaggacgacatgtcatcctccgacgatgaagacgacctgaagtctactgcctccgacgacggtctcacgggcgatcagcttcgtgagaagtatgccaatataccggaccttccaaaatcaacggacaccgaccccgatgatgctaatggggagggaggcgatgagggcctgacatcacaggcgaacgatttagatgatacaagtgacgagtccgtagacatggatgatgacatgacttcgagcgacgaaggttcagacaacgatgaagacgatgactcggatgaggaatccgacgatggacaaccagccggcctactcggactgttcttcggtaagaaagagctagaaaagctgaaagaagatgcaccagcagaggaacaggaagcaacagcaaacgggatcaaacctgaaggcgcccagctgcctacagaccagaatggtatctctatcaacgggaccacggcgcttgaccagtccgagccatatgagcagacaaatggtaccacaaatgtcgttaaagagcctgaagatgtagccacccaatccaaggctaaagcgcaaccagcgtctacaccggacgacacactcgcgcaaggaatcatctcaagcgtcgagacgccatcggcaccagcacagcgaaaaacatcagctccggacacggatgttatcatgaaagaccccaatcaagaccaaaatcatacctcaacgccatcggagagcacgcttcctgatgccgagataggctcttccgtcacgaagctcgatcacagcagatcagacacgcctcattcacaagtggtgcccaaaacagaagtgccgtttctattgcgagggactctccgtgaataccagcattacggtctggattggcttgcaggtctctacatgaatcagaccaacggcatactggctgatgagatgggcttaggcaagaccattcaaacgatcgctctactagctcaccttgcttctcagcacgaagtctggggcccacatcttgtcatcgtcccgaccagtgtgatgctcaactgggagatggagttcaaaaagtggtgtcccgggttcaaagttctctcttattacggcagtattgaagagagaaggcggaagcggcagggctggaagacagatgatatgtggaatgtgtgtatcacgtcctaccagattgtgcttgcagatcagcaggtcttcaaacgccgccagtggcattacatgattctcgatgaggctcataacatcaagaacttcaagtcgaaaagatggcaaacactgctcggcttcaacacacaagcccgacttctacttacagggacacctttacagaataacttgaccgaactctggtcgttgttgtttttcttgatgccgtccgagaatggcgtgggaggctttgcagatctcgccgaattccaggattggttccacaagccagaatcgcaaattctagaaagtggtcgggagcagatggatgacgaagcacgtgccattattgccaaattgcacaaagtgttgcgcccatatctattgcgtcgtctcaaagccgacgtcgaaaaacaaatgccagccaaatatgaacatgttgaattttgccggttatcgcggcgtcaacgtgagttatacgacggcttcctagctcggactgatacgagagaagctttggcgtctggaaactacatatcggtcatcaactgtctcatgcaactgcgcaaagtgtgcaatcatcctgacttatttgtcgaacgccctattatgacttcattccgccagcccagatctgttgtcgcagaattcgaatcaacggatcgacttctacgagacaagcttttggccataagcccagagaatactgtcagcctcgacttcctcaacctcgtccctgctcgtcacgaaactcaatcggctactgtctgtgagcgtgtttctcagctcagctcgcaccatattctgctcgaactgcgggatacccagaaagaccgtgcccagaccggccaatcagacctagatccctccactgtggaatccaatatcacgtatcttgacagtgctggtcgttggggtcgatttgaagagcttcagcattgtgcctatgtgaacactctcagacgccaacaacaccccgtatatggcaaacggctaaccgacttcctgactctggacactcaccggcgccctcataaacctcgacctaggataccacacaagattatgagttggtttgaggaggattccgcctttcttcgcacggcagtgcccagtctagatgaacgcgctgcgacgatgaagaccacaatctccaagtttgcttgcgtcacgcctacggttgtcacccgagatcttgatcgctttgttcttgggtctcgaggcatagaggagtttgatgatatgaatcttaggttatctgccccaatccggcgaatcccgtttatgccgaaagagtcaccattggacccgtggcatgagtcacgaatgagattgagtatccagtttccggataaacgtctcctccagtatgactgtggcaaacttcaagcattggatagactattacgcaagctacaagctggtggtcaccgagctctcatcttcacccagatgactaaggttcttgatatcttagaacaattcctcaacatccatggacacaagtaccttcgtcttgatggtgctaccaaggtggaacagcgtcagatcctcactgaccgttttaacaatgatcctcgtattctttgcttcatcctttctacccgctctggtggattgggaatcaatctcacaggcgccgatacagtcatcttctacgaccaagactggaatccagccatggataagcaatgtcaagacagatgtcaccgtattggtcagacaagagatgttcacatttacagactggtcagcgaacacaccattgaagcaaatatcctccgaaaagcaagtcagaaacagatgctcgatgacattgtcatccaagagggaggcttcacaaccgactacttcaacaagctttctgtccgtgacgttatggccgaagcggcagatgaggccgatgttgttggtgacgctatggatcgtgtccttggtggtgtggaaagtactgatcagcggaacgttggtcgcgtgctcgagcaagcagaggatcgtgaggacgttgccgcggcgcatgtggccgagcaagaaatccaagaagacgaagctgacttcgcagagaagccgccaacgacaagtgcgtccggagcatctacgacaagacaaggcacgcctgccacacaggatggcctgtcagctactccgattggtcgttcgaacctgggtctcttctcggaaacggcgaacgctgaggaagcgccacaagagatcgagatgaatgcatggggcgaaatcgtacacaatatcgatgagtacatgcttacaacgatgggcaagcaactagaaggcacgccactggagcttccgaaagacaaaaagaagagcaagagtaagaaggggaaagacacgaggaagcgttag

SEQ ID NO: 34059 - protein, 1697 aa, Muscodor strobelii
  misc_feature: SGI Peptide ID NO. 571760
  misc_feature (1405)..(1483): Pfam Id: PF00271 Pfam Desc: Helicase conserved C-terminal domain
  misc_feature (813)..(1108): Pfam Id: PF00176 Pfam Desc: SNF2 family N-terminal domain
  misc_feature (30)..(1680): NCBI GI: 256726704 Blast Desc: NECHADRAFT_34187 [Nectria haematococca mpVI 77-13-4]
  misc_feature (38)..(1680): NCBI GI: 46122747 Blast Desc: FG05751.1 [Gibberella zeae PH-1] gi|84029506|sp|Q4IAK7.1|SWR1_GIBZE RecName: Full=Helicase SWR1
  misc_feature (78)..(1665): NCBI GI: 116214441 Blast Desc: CHGG_11061 [Chaetomium globosum CBS 148.51] gi|88175416|gb|EAQ82885.1| CHGG_11061 [Chaetomium globosum CBS 148.51]
  misc_feature (25)..(1697): NCBI GI: 85090195 Blast Desc: helicase SWR1 [Neurospora crassa OR74A] gi|74696276|sp|Q7S133.1|SWR1_NEUCR RecName: Full=Helicase swr-1 gi|28919649|gb|EAA29066.1| helicase SWR1 [Neurospora crassa
  misc_feature (6)..(1500): NCBI GI: 171679747 Blast Desc: protein product [Podospora anserina] gi|170939499|emb|CAP64727.1| protein product [Podospora anserina]
  misc_feature (86)..(1682): NCBI GI: 156030975 Blast Desc: SS1G_14268 [Sclerotinia sclerotiorum 1980] gi|154700659|gb|EDO00398.1| SS1G_14268 [Sclerotinia sclerotiorum 1980]
  misc_feature (744)..(1680): NCBI GI: 39968181 Blast Desc: MGG_02183 [Magnaporthe grisea 70-15] gi|145013063|gb|EDJ97704.1| MGG_02183 [Magnaporthe grisea 70-15]
  misc_feature (537)..(1680): NCBI GI: 154297606 Blast Desc: BC1G_12648 [Botryotinia fuckeliana B05.10] gi|150858471|gb|EDN33663.1| BC1G_12648 [Botryotinia fuckeliana B05.10]
  misc_feature (44)..(1695): NCBI GI: 226283023 Blast Desc: helicase swr1 [Paracoccidioides brasiliensis Pb01]
  misc_feature (78)..(1695): NCBI GI: 239611425 Blast Desc: helicase swr1 [Ajellomyces dermatitidis ER-3]
MTGTASSTQEPAHDRAEPDSNPPQTTHIPDDTTDSQTKKEDDTNDDDKHNSSITNGHVDVAVATNGTVSADASQDKPNGTHDDERPSKRRRVEETTPKKPSKKAKVESPPWKKIEADGPTTFTENGMRRSGRTNTVPLELQPQGSKRMTRGHASNTPKSASTSKSAAASRAAPAKPAPPPKHNTRNSSISFPALRPPPKTRRRSPSPPPPPTGPPPKRSERIRRSSRTQRESLGTPSRPVDTPESPNTRPTRIRLRLREPTIPIVNPTQINVLPGQTVARPKVAPSFAEYVAQAPALDLQSGGWYDAVDDGPSYTDEMAQKDAQIILRIEAETEPGGLLSQGHSSLFVPEPVEEPPRQWARMDHLVKQMTNFRKLMVMEHQRHKAAAKRLAEACKDEWLRRQPKSAEQIEAEARAVCIVQYRAVVKALQGTWENVKVEINRRRVEEWQAAEQKRIKTALNEAVSMSELKLQARQARPDSEALSDEEEEEDDDDDLDSLADSGKELDQDDMELDSDSDAIEAEPHNASDKGEDDMSSSDDEDDLKSTASDDGLTGDQLREKYANIPDLPKSTDTDPDDANGEGGDEGLTSQANDLDDTSDESVDMDDDMTSSDEGSDNDEDDDSDEESDDGQPAGLLGLFFGKKELEKLKEDAPAEEQEATANGIKPEGAQLPTDQNGISINGTTALDQSEPYEQTNGTTNVVKEPEDVATQSKAKAQPASTPDDTLAQGIISSVETPSAPAQRKTSAPDTDVIMKDPNQDQNHTSTPSESTLPDAEIGSSVTKLDHSRSDTPHSQVVPKTEVPFLLRGTLREYQHYGLDWLAGLYMNQTNGILADEMGLGKTIQTIALLAHLASQHEVWGPHLVIVPTSVMLNWEMEFKKWCPGFKVLSYYGSIEERRRKRQGWKTDDMWNVCITSYQIVLADQQVFKRRQWHYMILDEAHNIKNFKSKRWQTLLGFNTQARLLLTGTPLQNNLTELWSLLFFLMPSENGVGGFADLAEFQDWFHKPESQILESGREQMDDEARAIIAKLHKVLRPYLLRRLKADVEKQMPAKYEHVEFCRLSRRQRELYDGFLARTDTREALASGNYISVINCLMQLRKVCNHPDLFVERPIMTSFRQPRSVVAEFESTDRLLRDKLLAISPENTVSLDFLNLVPARHETQSATVCERVSQLSSHHILLELRDTQKDRAQTGQSDLDPSTVESNITYLDSAGRWGRFEELQHCAYVNTLRRQQHPVYGKRLTDFLTLDTHRRPHKPRPRIPHKIMSWFEEDSAFLRTAVPSLDERAATMKTTISKFACVTPTVVTRDLDRFVLGSRGIEEFDDMNLRLSAPIRRIPFMPKESPLDPWHESRMRLSIQFPDKRLLQYDCGKLQALDRLLRKLQAGGHRALIFTQMTKVLDILEQFLNIHGHKYLRLDGATKVEQRQILTDRFNNDPRILCFILSTRSGGLGINLTGADTVIFYDQDWNPAMDKQCQDRCHRIGQTRDVHIYRLVSEHTIEANILRKASQKQMLDDIVIQEGGFTTDYFNKLSVRDVMAEAADEADVVGDAMDRVLGGVESTDQRNVGRVLEQAEDREDVAAAHVAEQEIQEDEADFAEKPPTTSASGASTTRQGTPATQDGLSATPIGRSNLGLFSETANAEEAPQEIEMNAWGEIVHNIDEYMLTTMGKQLEGTPLELPKDKKKSKSKKGKDTRKR

SEQ ID NO: 34060 - DNA, 678 bp, Muscodor strobelii
  misc_feature: SGI cDNA ID NO. 571761
  misc_feature: Encodes the peptide sequence at SEQ ID NO 34061
atgtcttcttcgaagcgcgtggctgtcgacgacgatggcgatgacgccgccccgactccaaagagggctcgggtcgatgtagactcgaatccggcagatggcgaggtcaagagcatgtgtcttcgctctttcttcaagaatacagcagcatctcctcaagcaattgacagagcactggacgcctttggtggcaacatcgttcacgcgtggcgagcgctcatgcaattccccgattccgaacaacagaagagtcacactgtctcgacgcagaccgacgctacttcgcctacttctctcactcaatctcctgcgatacaagacgaaaatgcgaacacattcattggcgacgccgatctgccgaaggagtatgtacaagctgcccgtgaaggcagactatggcaatgcgaccacattcctactagtgtttcgcgcgagacagtcgaggcgaggtttcgggcgtgcgtgggtaggccagacgcatacatcgtctggtggccgaaagccctcacatcgatcgaacagacgcatcactctggcttatgccacattacgatctcgaagaactccgataccgatgctgtcgcagtcatacacggtttatgtatcagtggtcatcgtgtccaattgagattacagaagtggctcagcccttcagtattccgtctaaaggccaaatga

SEQ ID NO: 34061 - protein, 225 aa, Muscodor strobelii
  misc_feature: SGI Peptide ID NO. 571761
MSSSKRVAVDDDGDDAAPTPKRARVDVDSNPADGEVKSMCLRSFFKNTAASPQAIDRALDAFGGNIVHAWRALMQFPDSEQQKSHTVSTQTDATSPTSLTQSPAIQDENANTFIGDADLPKEYVQAAREGRLWQCDHIPTSVSRETVEARFRACVGRPDAYIVWWPKALTSIEQTHHSGLCHITISKNSDTDAVAVIHGLCISGHRVQLRLQKWLSPSVFRLKAK

SEQ ID NO: 34062 - DNA, 348 bp, Muscodor strobelii
  misc_feature: SGI EST ID NO. CUFF.80566.0
  misc_feature: Variant of the nucleotide sequence at SEQ ID NO 34060
tcgggcgtgcgtgggtaggccagacgcatacatcgtctggtggccgaaagccctcacatcgatcgaacagacgcatcactctggcttatgccacattacgatctcgaagaactccgataccgatgctgtcgcagtcatacacggtttatgtatcagtggtcatcgtgtccaattgagattacagaagtggctcagcccttcagtattccgtctaaaggccaaatgatgtgatgataccaggcaacaaatgttggcacaaaggcctagtagactaaggagactactcactacttgctggatagcatatcagtctgtcagtaaaccacaatgcattctatatgagacgta

SEQ ID NO: 34063 - DNA, 1929 bp, Muscodor strobelii
  misc_feature: SGI cDNA ID NO. 571763
  misc_feature: Encodes the peptide sequence at SEQ ID NO 34064
atgtggctcatcaacacagaaacgggtgatttggaaagcatctcagatccaataagagggtcctattgcgtattatctcacacgtgggaagatgacgagatctcgtttcaacaatacaacaacaatcgctccctagcgatgagctacaccaaggtagctaagacattggaactggcccgttcttggggtcttatgtatgcgtgggtcgacacatgctgtatcgataaatcaagcagcgctgagctttcagaggcgatcaactctatgttcaattggtattcacatgcggccgtttgtttcgctttcctatctgacctcaacctcgttgagccgaacattttccaagaacacaaaggctattaccgcatagaagagtggcaagacgtcagggacggttgggaaaagcaatgcgcagaaactctttctaattgtcggtggttcacaaggggctggacgctacaagaattaatagcccctgaaatcgttgaattctatgatgcgcagtggaacttgattggaaacaagaccgactttagaatttctcgtgcgatcagccaagtcacacagattcctattattttactggagaagaggaaatctgtaagatcattcaccgttgcccaacgaatgtcgtgggcagcgggtcggaagacaacgagaatagaggatgttgcatactcactcttaggtattttcgatgtcaatatgcctcttctgtacggggagggtcggaaagcttttgttcgtcttcaggaggagatctgcaagcaatcgaatgatctctccatcttcgcctggagatcctgcggtggcgccgaatctccagactcgccgctataccgagagatctttgccagctcaccttctgaatatcgagactgtcataatctaatgctttcccgaaagaaatttttcgacggagagatcagaataaccagcaggggagtctgccttgatccagggcagctgtatcgactagatgggcgaaatcgtcgcgtactcattctagactgcgtagataggcccagtgggcagttagtcgcaattgcgctaacaaaagggcgaaatggattcgctaagttcgatttcggattatcaacacctcgcaatgtgtttgtttcacctcagtctggctatgatccagtggaaaaaatagtgttccctgacgatcgcgaagagtatatttgggcaatgttgattgacccggcgcctctgcgaaacactgaagtaggcggtgataggtttcttgtgattgggatcagccgatactatgatcatttcggatcattcttttgccatatctcgtcgtttgacagcaacacttgggagaatactatcggccttaagatcgacaatgtggaagatgcaatcatctccgataggatcggctcgcttgagccgggcgaactctttgactggatacacggccctgatcatcaaaagttcggattttacgaggcagacaccgaacgtgtcaccatgcgagcggcaggaacgaaatatgcatgctacgtgagaatggcactgataccgggctcgcacgggatggcaggagacttccacatatctctaatcgatctggactcgttggtcggcatgagtctttacgaaggacttgatgaagcaacgaagcgcccggagtcagaaccaatattagtacgaccaagatttagcttacggaactaccggaattcgatgcctcaacacccgaacccagttagacaggaccggagtcagcttgctagaagtgagatagtcgatcacgattatctctttatggagaccgagaagttcgaagagcccagcgcgtcgcgtgtcaccgcagcacgctacctcacgagccagaagctagatggtgaatcagcgacttttacctgccagccaaatatgaccagtgacagaatgggattgctgaacagcttcggataa

SEQ ID NO: 34064 - protein, 642 aa, Muscodor strobelii
  misc_feature: SGI Peptide ID NO. 571763
  misc_feature (22)..(155): Pfam Id: PF06985 Pfam Desc: Heterokaryon incompatibility protein (HET)
  misc_feature (1)..(465): NCBI GI: 46126619 Blast Desc: FG07687.1 [Gibberella zeae PH-1]
  misc_feature (1)..(360): NCBI GI: 256720984 Blast Desc: NECHADRAFT_82249 [Nectria haematococca mpVI 77-13-4]
  misc_feature (1)..(316): NCBI GI: 256722404 Blast Desc: NECHADRAFT_44368 [Nectria haematococca mpVI 77-13-4]
  misc_feature (1)..(291): NCBI GI: 256726184 Blast Desc: NECHADRAFT_94537 [Nectria haematococca mpVI 77-13-4]
  misc_feature (1)..(316): NCBI GI: 145605569 Blast Desc: MGG_09177 [Magnaporthe grisea 70-15] gi|145013388|gb|EDJ98029.1| MGG_09177 [Magnaporthe grisea 70-15]
  misc_feature (1)..(316): NCBI GI: 256721662 Blast Desc: NECHADRAFT_18017 [Nectria haematococca mpVI 77-13-4]
  misc_feature (1)..(292): NCBI GI: 164425178 Blast Desc: NCU06304 [Neurospora crassa OR74A] gi|157070820|gb|EAA33330.2| conserved [Neurospora crassa OR74A]
  misc_feature (1)..(319): NCBI GI: 256722255 Blast Desc: NECHADRAFT_52327 [Nectria haematococca mpVI 77-13-4]
  misc_feature (1)..(297): NCBI GI: 256722053 Blast Desc: NECHADRAFT_16940 [Nectria haematococca mpVI 77-13-4]
  misc_feature (1)..(319): NCBI GI: 121715886 Blast Desc: HET domain protein [Aspergillus clavatus NRRL 1] gi|119403709|gb|EAW14126.1| HET domain protein [Aspergillus clavatus NRRL 1]
MWLINTETGDLESISDPIRGSYCVLSHTWEDDEISFQQYNNNRSLAMSYTKVAKTLELARSWGLMYAWVDTCCIDKSSSAELSEAINSMFNWYSHAAVCFAFLSDLNLVEPNIFQEHKGYYRIEEWQDVRDGWEKQCAETLSNCRWFTRGWTLQELIAPEIVEFYDAQWNLIGNKTDFRISRAISQVTQIPIILLEKRKSVRSFTVAQRMSWAAGRKTTRIEDVAYSLLGIFDVNMPLLYGEGRKAFVRLQEEICKQSNDLSIFAWRSCGGAESPDSPLYREIFASSPSEYRDCHNLMLSRKKFFDGEIRITSRGVCLDPGQLYRLDGRNRRVLILDCVDRPSGQLVAIALTKGRNGFAKFDFGLSTPRNVFVSPQSGYDPVEKIVFPDDREEYIWAMLIDPAPLRNTEVGGDRFLVIGISRYYDHFGSFFCHISSFDSNTWENTIGLKIDNVEDAIISDRIGSLEPGELFDWIHGPDHQKFGFYEADTERVTMRAAGTKYACYVRMALIPGSHGMAGDFHISLIDLDSLVGMSLYEGLDEATKRPESEPILVRPRFSLRNYRNSMPQHPNPVRQDRSQLARSEIVDHDYLFMETEKFEEPSASRVTAARYLTSQKLDGESATFTCQPNMTSDRMGLLNSFG

SEQ ID NO: 34065 - DNA, 495 bp, Muscodor strobelii
  misc_feature: SGI cDNA ID NO. 571764
  misc_feature: Elevated expression when VOC is produced
  misc_feature: Encodes the peptide sequence at SEQ ID NO 34066
atgcagttcggaacctttctccttgccctcgccgctggcgcttcgactgttgttgctaccccttttggtcgtccgggccagggtgggaacagcaacaagtgcgtcaagctttcttccaatgaacctatcatggttttggagcgtcacaccaagatcgattacgaacaggaaacccggatgactttcagcggcctgaagagccactcgcgcgacatttgcgagctcgttgccgacttcgaagctaagcacccacgcttcttgtccggcggaaatgaccagatcgaggtctatcgaaaggttggaaagcgggagactgtcatcggcagcttcgagcacaccaatggcaagaagacgaagaagagcattgccactttcccttgctcccaagccgaggacggacttcacttccgcatcaataccaagaccagggatggacgtgccgcttggacccagctacctaccagcggtatcttcttacagaccggcagatgctag

SEQ ID NO: 34066 - protein, 164 aa, Muscodor strobelii
  misc_feature: SGI Peptide ID NO. 571764
  misc_feature: Useful for introducing or modulating the production of volatile compounds
MQFGTFLLALAAGASTVVATPFGRPGQGGNSNKCVKLSSNEPIMVLERHTKIDYEQETRMTFSGLKSHSRDICELVADFEAKHPRFLSGGNDQIEVYRKVGKRETVIGSFEHTNGKKTKKSIATFPCSQAEDGLHFRINTKTRDGRAAWTQLPTSGIFLQTGRC

SEQ ID NO: 34067 - DNA, 1205 bp, Muscodor strobelii
  misc_feature: SGI EST ID NO. CUFF.80584.0
  misc_feature: Variant of the nucleotide sequence at SEQ ID NO 34065
caaatttggacggccagtgaaggaaggaccttgctagttatataaacatgattcccaggccattcgctccatcgtcgttcatctaatctacgccctgcttcattcattcggttgcctctgccgacttggaccctgttcatagacttgatcctcctcaaccgtaattgataatatcgccatttcacggttcgaaatgcagttcggaacctttctccttgccctcgccgctggcgcttcgactgttgttgctaccccttttggtcgtccgggccagggtgggaacagcaacaagtgcgtcaagctttcttccaatgaacctatcatggttttggagcgtcacaccaagatcgattacgaacaggaaacccggatgactttcagcggcctgaagagccactcgcgcgacatttgcgagctcgttgccgacttcgaagctaagcacccacgcttcttgtccggcggaaatgaccagatcgaggtctatcgaaaggttggaaagcgggagactgtcatcggcagcttcgagcacaccaatggcaagaagacgaagaagagcattgccactttcccttgctcccaagccgaggacggacttcacttccgcatcaataccaagaccagggatggacgtgccgcttggacccagctacctaccagcggtatcttcttacagaccggcagatgctagacctagccctcccatcatcactttcttccatatgctcttatgataccactatacgttctcgacactcattcatcctggatgcgacccgtctcttgtcgtcgtttttgatcaactacaacacaggagctcaatttggctcccaatacatcacagcagacgtattattcatttctggactgggcgaaaaagaaggtccgatacggaaccaagtcgacagagtattcattttgtttcgacacactctctgaacctggttttcagctccggcttgcaactttgatactttacgtatcacttcttctcacaaatcatgcattggatggcgttaagcgtgggtcttctgtctgactttcttctaccaacaaacatctataacgtttcttgtatatattgcctcacttatttgcacataaatctaaagcaacttatcttcataagttctcatttgatgaaatgcgtgatctcattgcggagccacgatgtgtatatatcaaatgagacactgggctgctcttat

SEQ ID NO: 34068 - DNA, 846 bp, Muscodor strobelii
  misc_feature: SGI cDNA ID NO. 571765
  misc_feature: Encodes the peptide sequence at SEQ ID NO 34069
atggcgtctgtaatcgagcatgacccgacgacatatgagcctcctcagccggagcacaaagttgcaccaggtctaagcgtcatacatggttctctgtttcgaatgggcaccaaaagcatgacagctgcttaccgtatcctcggataccgcgtggaccacggcatggacaccctcgaacagccatgggaagcactagaagccgctgcagaggctacgtttccacaggtccctggagcagtctctcgaccaccatatactcgcaaagagtgggatgagctatggggtaaccgcgtcgacatcgtcacagacatgggctcagtatattgtcccgaattcgtcaaggcatatccggatgcgaaactagtgatcgttcaacgggatttcaactcgtggtataagagtctctccgacggccctctccacgctctgtttgggcctgtaacaccagtgcttgcattcctggctcttaacgtactcaacaatcgtgcgttcgtcgcaatgcacaagactttcctcggattcttcaacgcaaggaatagagccgaaatagacgtgacagctcgagatacatacgatcgatacttcgccgaacttcgcgctgcggtgccaccggagaatactctcgaatataagctaggcgatggttgggagccgctttgcgagtttctcggaagaccagttccggacatacccttccctcggctcaacgacgccgtgtctcatagcaatcacactaagttcagatatatgagggttatcaagaaatcggccaagagcgttgggccgtacgccgccgcagtcgttggtataggtgctgcaatgtacgcatcttccaacttgcgatga

SEQ ID NO: 34069 - protein, 281 aa, Muscodor strobelii
  misc_feature: SGI Peptide ID NO. 571765
  misc_feature (17)..(270): NCBI GI: 46116006 Blast Desc: FG03845.1 [Gibberella zeae PH-1]
  misc_feature (25)..(275): NCBI GI: 46120546 Blast Desc: FG04920.1 [Gibberella zeae PH-1]
  misc_feature (25)..(238): NCBI GI: 154304931 Blast Desc: BC1G_09051 [Botryotinia fuckeliana B05.10] gi|150853913|gb|EDN29105.1| BC1G_09051 [Botryotinia fuckeliana B05.10]
  misc_feature (25)..(237): NCBI GI: 238837557 Blast Desc: conserved [Microsporum canis CBS 113480]
  misc_feature (1)..(272): NCBI GI: 145607804 Blast Desc: MGG_10067 [Magnaporthe grisea 70-15] gi|145015300|gb|EDJ99836.1| MGG_10067 [Magnaporthe grisea 70-15]
  misc_feature (15)..(238): NCBI GI: 256728993 Blast Desc: NECHADRAFT_93184 [Nectria haematococca mpVI 77-13-4]
  misc_feature (14)..(271): NCBI GI: 116198675 Blast Desc: CHGG_07493 [Chaetomium globosum CBS 148.51] gi|88178772|gb|EAQ86240.1| CHGG_07493 [Chaetomium globosum CBS 148.51]
  misc_feature (86)..(269): NCBI GI: 116179296 Blast Desc: CHGG_00276 [Chaetomium globosum CBS 148.51] gi|88184573|gb|EAQ92041.1| CHGG_00276 [Chaetomium globosum CBS 148.51]
  misc_feature (25)..(279): NCBI GI: 189196286 Blast Desc: conserved [Pyrenophora tritici-repentis Pt-1C-BFP] gi|187980360|gb|EDU46986.1| conserved [Pyrenophora tritici-repentis Pt-1C-BFP]
  misc_feature (46)..(277): NCBI GI: 169605543 Blast Desc: SNOG_05797 [Phaeosphaeria nodorum SN15] gi|160706786|gb|EAT86861.2| SNOG_05797 [Phaeosphaeria nodorum SN15]
MASVIEHDPTTYEPPQPEHKVAPGLSVIHGSLFRMGTKSMTAAYRILGYRVDHGMDTLEQPWEALEAAAEATFPQVPGAVSRPPYTRKEWDELWGNRVDIVTDMGSVYCPEFVKAYPDAKLVIVQRDFNSWYKSLSDGPLHALFGPVTPVLAFLALNVLNNRAFVAMHKTFLGFFNARNRAEIDVTARDTYDRYFAELRAAVPPENTLEYKLGDGWEPLCEFLGRPVPDIPFPRLNDAVSHSNHTKFRYMRVIKKSAKSVGPYAAAVVGIGAAMYASSNLR

SEQ ID NO: 34070 - DNA, 2404 bp, Muscodor strobelii
  misc_feature: SGI EST ID NO. CUFF.80597.0
  misc_feature: Variant of the nucleotide sequence at SEQ ID NO 34068
acgagatgatcgacattcagccccaacgagctggaagtcagcgaccgaggagttctgtatcaacttcgatgcccgctgacaatgactccaaattagccatcatgcttattatactcatggatgttaaacaagcactgcgccgatgaagttgcagacagtgttacgcaagaagcggggcaggcacgttgtcgtccagcttccgttctttgagtagttggtttcggcattagtaagactgatttgcatgtccatgagaacagagcgaccggactaaagacttgcctcgagggcgtcagccaaatgagccagcccatgtccccccgtctgttcataaatgagcagtcaccccaccgtagcaaatcggcatgctcgtacttttgagacccgggtaacgacacagatccgagaccgcagactatctttcaacaatacttgcgaatcataacttctctttcgactactctccgagcctctctgccacaccacatccaggagcaagacaatggcgtctgtaatcgagcatgacccgacgacatatgagcctcctcagccggagcacaaagttgcaccaggtctaagcgtcatacatggttctctgtttcgaatgggcaccaaaagcatgacagctgcttaccgtatcctcggataccgcgtggaccacggcatggacaccctcgaacagccatgggaagcactagaagccgctgcagaggctacgtttccacaggtccctggagcagtctctcgaccaccatatactcgcaaagagtgggatgagctatggggtaaccgcgtcgacatcgtcacagacatgggctcagtatattgtcccgaattcgtcaaggcatatccggatgcgaaactagtgatcgttcaacgggatttcaactcgtggtataagagtctctccgacggccctctccacgctctgtttgggcctgtaacaccagtgcttgcattcctggctcttaacgtactcaacaatcgtgcgttcgtcgcaatgcacaagactttcctcggattcttcaacgcaaggaatagagccgaaatagacgtgacagctcgagatacatacgatcgatacttcgccgaacttcgcgctgcggtgccaccggagaatactctcgaatataagctaggcgatggttgggagccgctttgcgagtttctcggaagaccagttccggacatacccttccctcggctcaacgacgccgtgtctcatagcaatcacactaagttcagatatatgagggttatcaagaaatcggccaagagcgttgggccgtacgccgccgcagtcgttggtataggtgctgcaatgtacgcatcttccaacttgcgatgagcgcgagatctggtttgagaggattggcgttggtaaatcgttttcgaactgggaggcaagcgaaactggttgtgtcatttcctaggttattagcgacatgaagcatcgggctacgagagcacggcgatatcaatcttgataccctttagaagcgggttcatggagttccaggagtgtatagaatgtttgggagtttagggattggtcaacaaaacaatgatagtgctagcacgcaatcaggttgacacaatgcttgcggaaagcaaatcatgcttgcacgttcatttgatccatgataatcggccaattgatcatctggaaggcgggacatagattgtactgctgcgaagttgtgaaacagcgcaatgcaataatatctttgcctccacaaagcccgtctcgtcggctgctatgggagacagaactcgatgaaagccggcacagcactcggggcgagagaattcagaaatagcatagacttggttttccgtaggacatgaaactcttcacatgtagttgagcggccgcttgtgtgatgacccaccacgatggcgacatcttcgtacccgagcctaccttagtaaccaagcggctagcccccaaactcaaaattgatgtctaccttaggtacttaccattgaacttattccttttcgatatttccgactgctagggtagcacatcaaatctggacgaaatgaatagatcgatgaattctttggctctgcaccagccattcaggattgattcgctctcgtttagcatcgacgaattgttcaaaacgaatgcgattactcatatcgcagttaaagattgaatcttttctttgactagtccgactatttgtcgcaccgcttcgacttctttaaggttgcttcaaataatatgaaaagcataatgtcgccatgaaataagataagccgcatccctacctcttgacaaaccatcacatgcatcgatttgagggtaaagggtccctgtcgcctgcggcacatgagtaaaccccggcagggagagatctgcatcatcagagtcttatcaagtagacaacacaga

SEQ ID NO: 34071 - DNA, 6414 bp, Muscodor strobelii
  misc_feature: SGI cDNA ID NO. 571766
  misc_feature: Encodes the peptide sequence at SEQ ID NO 34072
atgggggaccacatacgtgacgacgaacaagcattcaaccattttatcgaaaggcactcagaattgaatgctgatgacaagaacgtgtccccgagagttttcaggaaattagttgacaattactacataccgacattcgatactcgaaaggacttagtacgccaactaaccgaaaaatggaaagttttcgaaaagccgggaaccggtgatgccgaccaaaatgaccgagcccagttgtacacctcaaataatgagcttgtcgaaataagatctgcctacgataatcttttgaaacggattatggaagttgtgcaaaagtcgagatcccgagttgattggggaaagcacactagtaaaaagagcgcgtctgacaatatggaatggctgaaggagaaagaggtctatcttgccgctgctatcggagacaacacttcaaacagtatcaagcacgatctcatgtcagtgcggaagaccatgggtatagccatgcaggcagtggcacaatcagggttgcagacaccgccagatgatcagtcgaacacgcaagacaagcgttctgcaacggcgagtaatgggaagctcctcgcgggtacttggtggggagagaataactcgagactgatttcaagtcgagggttccagcaagtaatccaggagtcgaaggcctacgtgaaggcgaatgaacaacttgtcggcaccgatgattataacaaaaccatgcacaatcacctccagagagcttttggtcaactcaatatggatggtggcgatggaatcgtcctcttaaggccagaatggcaatttaacgatcctgaagctcattaccatagaacaccaacattcgtgaacccgtcgcgctcagagaacgaatggagagtaggtgatcaacttcgtgctaatggcaagacgggcacccctcacctcggcttcaatgattttaaggtgatgctcggtggtggcttgagtgcacaagaactactgaaacaagacactccaggcggggcgatctacatgggaattcctatgaagtcgttgaatgccggcgactcgccaagcaacatgaggctacgcggtggtatggcaactactaaaaccgcgggacactcttcaggatcaccagacgccagactgagagagcgagaaaagttaggaaatcgtataccctggcgacatcctgataacctatacgcgcagctcttggaggatataagtcttcctgctggcacgtttcgagcgagagttgaagctctccgacctccaatgcaagatccacgacgtatcggacctttaccatgggcaatttacgaagagacaattcaagcggtagttgatagaaaagaatggcgtcgtatccaagaactgttagaaggacaagaccttaacgagatcgaaaggctatatgagacctatggcgaaagtcagcgcgcggatctcggccgtgctcacgacttcattaacaataacccagatcatttctttccagagagacccaaattagatgaggagggtggtcgaacagcccgaaagcgacgatatgatggcacccgcgaccgaggctttgctgacccggtcgcccagcttttccgggctaggatgtttgcaatatttcgtctgtcgatggtgttgaaccaatatgtacatggccattgcgacttatcggatttgttattggtcgaacaagcgcacctcgagacctggattcaacatgaagagatgtatatggaatgggagaataatcgtttctttgaactctcaaatgcggaggagatccgccacctggagacgcgatacaaggcacggcgggacattttatgcgccacttggaaacgcgaagtgggtgaaattaaaagctggatggaagaacaacgcgcggactcctcacaccgtagagctaggaacagatctgggggcggtgatagaccactgtcaccgccatctgatgatgaagatcccccgaagcccccgaagcccccgaagcccccgaagcccccgaagcccccgaagcctccgaaacctccgaagtctgagaaaaaatcgaagacatctaagcgcgtcagacgcgagggaaaacccgaggagaagggagaaggagagaagaatggggggaaggacgtacaagataagggtcgatcttcccagcaacgatcccatcagaaacagtcttccggaaagcatggttcggagcccagaaaagggaaagacacagttgactcgggctcactggacagcttcgtgacgcacctgtttaagaatcccgagatgaacaagttctttaatgcggatggcgttctcacagagacgtcacaattcgaggaattcctgaagcgtactgcgcggaatgagagtacagcaataggtcattttgcggcagtactccttgaggtgctgcagagtggcagctctgagacaactcgaatagtcagagatgtcctcacctccctaaatcaaagcagtgacgaaagtcttgaagtggtacagaagttgattgactttctgcaccttgtcgctgtgcaaccaccccgcaggaaccaggaagagaatcatcgaggtacaacaactcagccaggtatcaggcgagatgttggcattcaaacatctcaagtagtcaaagaaaaagggcgctctgataacgtaactcaagcaggtatgggagggcttgcaggaacacctgggccactcgtctcacagggtgctccgagacctccggagccaccgcgtcctgcatcgacagatctgaaagatttagagaagaagatagacttgatcttgatgcactcaatgcagaataacacgggatcgtcaacgagaaagccggaaccagatgtggaagaaggctcagacgaggagatggaagatattgatgccgtccagcaggaacaagttgaggatgagtcacgtagcctagagatcctccgcacgatgcgtgaggcgtacgataaagcgctcaaccaagcaataaatgagaacaacaatttagacgccgaagacccaggaaacgaggcgaagatccaccggaacaatattgacatcatgacaaagaaccaaatgctatggtcactcgacacggaaatcaccaatctccagcgtagtcttgatcctcttgctgagaatgtcgctggtctcggtgcgaatcgcagatgggagctgccaacgaaagaggcgttttccaggtacacaacaccgtcggccaaaaagccaatgccaccgctcggagtgacaagtctaggacccggtcctgtacccggcgagaaaccactcccaggcaacccgagaatcctcgttggtgcgccaccaaagttcggcaaggatgctcccgacggagactctcatcacaagttagatcctacgccaagtgatcagatgactgccggcgacgacaaagccgggcgtaagcgacacacgcatttcgagaacctccctaaacactgggatgatttcctggcgtacttttttgcatcatggaataataccgaacgtgtagattctgcccgcctcaggtatgaagactggattgaagctgtgtctgtggccttgaccgagacgcttcaacaatatgtaacttcaaaacacctcgccgccgatagtatcttgggcttagactcagaaactatgcgcatccatatcgctgaggtgtatgcaaaggtgttcggtgaaggcgaagtggatgtgacaaaacacaatactatgccttggcgggagcgggaaatgtatagacataagatcctgaagaccttgtacgacgaggtcagagaggctgcagacattgcagagagccacgtgaggctcaatgacccaggaatgctaggtccagctccgaagtctggccatgagactgttgagccggccgagttgtctcctgaatctcaattagcacgtgtgaccatcgccaaattacagactctttatcaagagcatttggatcgcgatactcaatgccggtcattggctagggtcaagagtgcaaaccgcgctaaatggaccgccaaagaacaacatgcactgagcgagttgttgcgagatcgcaaagaaagatgggatctctatgtaaacattaagaatcaggcagacccgaccatccggcggaaagccagaatcatggaggagaacatgaaggaagcggcaagatcgagggagaagtctgacattcagcagcacgaacaggtcatgaagaacaccagagcgaagaatgaggcacagatgcgcaaatctgcagcgcaagataaaatcctgcgaacggagctcgcgctcgccaaggcgcagaacgcactggaaaccaaggaaaaggcgcgggagagggctgagacactagctggtcaagttggcttggccgcggcgatgaagcaacagtatgatcacgatttggtggtagcgatgaaggaagagaagcaagcgatgacggagttgaaaaaagctgaagttgattttgatgcagcacaccataagttgtccacagcccggaatgcgcctacggatccaaatgatgaaaccgaagacgaggtacagcagaccgtgaggcatggtcaccatcctgaccatcaccaccacgatcatcgtcaacacggccgtcacgatcaaacaacgacgagggaatcacatcgggccacatcagaggagcaaaagaagagaaaaacctatgaaactgaggatgcccaaacacccaaccggagcacaatagacgaagtccttgaggatatacaggatcgaatctttgagagatcaggaaggcgcacgaagaaggcgaagacagaagaggcgggtccgccgccggccgttgaggaagagagcaggttgcaaatgttgcaaagattggcccgagaaacggctgagatgcagaagcgtgctgcaaagaaagcaaaggaggcaggggaggacgactatttggactggggtcacgaggcagcaagacagcaagcgatagctgacgttcttagacggatggttgacgccgaagcacgtatcgcacaacggcaggctgacactgatgccgctgcggcgaaaaaagaggctgacgaggctgctatggctgcgaaaaggaaagctgacgatactgctgctgctgctattgcagcacggcagcaagcggcagcggcagcaaagaaggaggctgacagactagaagcagcaaagaaggaggctgacagactagcagcagcaaagaaggaggctgacagactagcagcggcaacaaaaaagaaggctgatgacgatgctgctaaagcaaaaaaggaggctgacaggcgagcagcagcagcgaaaaggaaagccgacgacgatgcagctgctgcaaaaagggaggcagacagggctgctgctgctaaaaaacgaagggctgacgagactgctgctgcgatacttgccagacgacaggctgcagctgccgccgctgagcaacgcaaggcggacgcgcaaaagaaccagaacaccagcagaacgcaacaagcgacacaaacccaaaccccgccctactcgtctcccggagacatcgaggacgtaaacatgggcggcacgacagaggcagatgctgccgaagctaaaaggttgcaggaagaagaagatgctaaagcagcacaaatcatctccgaccaaatcaacgcacaagcgctcagcgacgagcttaactcgaacctcaagaaatcatcctcaaccacaagctcgactcgaaagaaatatacaccgcaggagctgcgcgaacgattgacgctactcgcagacgactttgatgtctggcggctttcaatgggtttcgacggcatcgatgacgatgtgaccctttcaacctggagagggcaagtagtggaggtcctatccgatgcctacgtcattattggtaacccaattagtgactatgacacgtgggagagggatatggagaaatactggttcgacctaggaagctacctgggcggcaatgcctcgcaggccgatcaccggcgagagttcctgtctggtatcgtccagacgttgaacagttcggcggttaatcatggtttcaagggcccctttttcccagaccccaaagctgccgcaaccccgacggatacctcgggaagccgaggtttgatccaacaaggtttagactatatcagccagaataatcccttccgaggccgaagaacacgaagtaccaagaatcaagacaacaagaaaaccacgaccgatgggcaacgaccggcaggttattccgcggtgaggagtgaggtggataggttgaggaaacctgcggacgggcaggctgtcgcaggtattccggacagcgatgcctggccagatttgagagatttgatacaagtcacgtggatcagcaaaatcgcacaccaggcccagagacagcatacttcgtcgagagtggcgcaaggaggaagaggtgagggttggcctgcgccgcgtcgcaagggagagttctttgaattgtga

SEQ ID NO: 34072 - protein, 2137 aa, Muscodor strobelii
  misc_feature: SGI Peptide ID NO. 571766
MGDHIRDDEQAFNHFIERHSELNADDKNVSPRVFRKLVDNYYIPTFDTRKDLVRQLTEKWKVFEKPGTGDADQNDRAQLYTSNNELVEIRSAYDNLLKRIMEVVQKSRSRVDWGKHTSKKSASDNMEWLKEKEVYLAAAIGDNTSNSIKHDLMSVRKTMGIAMQAVAQSGLQTPPDDQSNTQDKRSATASNGKLLAGTWWGENNSRLISSRGFQQVIQESKAYVKANEQLVGTDDYNKTMHNHLQRAFGQLNMDGGDGIVLLRPEWQFNDPEAHYHRTPTFVNPSRSENEWRVGDQLRANGKTGTPHLGFNDFKVMLGGGLSAQELLKQDTPGGAIYMGIPMKSLNAGDSPSNMRLRGGMATTKTAGHSSGSPDARLREREKLGNRIPWRHPDNLYAQLLEDISLPAGTFRARVEALRPPMQDPRRIGPLPWAIYEETIQAVVDRKEWRRIQELLEGQDLNEIERLYETYGESQRADLGRAHDFINNNPDHFFPERPKLDEEGGRTARKRRYDGTRDRGFADPVAQLFRARMFAIFRLSMVLNQYVHGHCDLSDLLLVEQAHLETWIQHEEMYMEWENNRFFELSNAEEIRHLETRYKARRDILCATWKREVGEIKSWMEEQRADSSHRRARNRSGGGDRPLSPPSDDEDPPKPPKPPKPPKPPKPPKPPKPPKSEKKSKTSKRVRREGKPEEKGEGEKNGGKDVQDKGRSSQQRSHQKQSSGKHGSEPRKGKDTVDSGSLDSFVTHLFKNPEMNKFFNADGVLTETSQFEEFLKRTARNESTAIGHFAAVLLEVLQSGSSETTRIVRDVLTSLNQSSDESLEVVQKLIDFLHLVAVQPPRRNQEENHRGTTTQPGIRRDVGIQTSQVVKEKGRSDNVTQAGMGGLAGTPGPLVSQGAPRPPEPPRPASTDLKDLEKKIDLILMHSMQNNTGSSTRKPEPDVEEGSDEEMEDIDAVQQEQVEDESRSLEILRTMREAYDKALNQAINENNNLDAEDPGNEAKIHRNNIDIMTKNQMLWSLDTEITNLQRSLDPLAENVAGLGANRRWELPTKEAFSRYTTPSAKKPMPPLGVTSLGPGPVPGEKPLPGNPRILVGAPPKFGKDAPDGDSHHKLDPTPSDQMTAGDDKAGRKRHTHFENLPKHWDDFLAYFFASWNNTERVDSARLRYEDWIEAVSVALTETLQQYVTSKHLAADSILGLDSETMRIHIAEVYAKVFGEGEVDVTKHNTMPWREREMYRHKILKTLYDEVREAADIAESHVRLNDPGMLGPAPKSGHETVEPAELSPESQLARVTIAKLQTLYQEHLDRDTQCRSLARVKSANRAKWTAKEQHALSELLRDRKERWDLYVNIKNQADPTIRRKARIMEENMKEAARSREKSDIQQHEQVMKNTRAKNEAQMRKSAAQDKILRTELALAKAQNALETKEKARERAETLAGQVGLAAAMKQQYDHDLVVAMKEEKQAMTELKKAEVDFDAAHHKLSTARNAPTDPNDETEDEVQQTVRHGHHPDHHHHDHRQHGRHDQTTTRESHRATSEEQKKRKTYETEDAQTPNRSTIDEVLEDIQDRIFERSGRRTKKAKTEEAGPPPAVEEESRLQMLQRLARETAEMQKRAAKKAKEAGEDDYLDWGHEAARQQAIADVLRRMVDAEARIAQRQADTDAAAAKKEADEAAMAAKRKADDTAAAAIAARQQAAAAAKKEADRLEAAKKEADRLAAAKKEADRLAAATKKKADDDAAKAKKEADRRAAAAKRKADDDAAAAKREADRAAAAKKRRADETAAAILARRQAAAAAAEQRKADAQKNQNTSRTQQATQTQTPPYSSPGDIEDVNMGGTTEADAAEAKRLQEEEDAKAAQIISDQINAQALSDELNSNLKKSSSTTSSTRKKYTPQELRERLTLLADDFDVWRLSMGFDGIDDDVTLSTWRGQVVEVLSDAYVIIGNPISDYDTWERDMEKYWFDLGSYLGGNASQADHRREFLSGIVQTLNSSAVNHGFKGPFFPDPKAAATPTDTSGSRGLIQQGLDYISQNNPFRGRRTRSTKNQDNKKTTTDGQRPAGYSAVRSEVDRLRKPADGQAVAGIPDSDAWPDLRDLIQVTWISKIAHQAQRQHTSSRVAQGGRGEGWPAPRRKGEFFEL

SEQ ID NO: 34073 - DNA, 1372 bp, Muscodor strobelii
  misc_feature: SGI EST ID NO. CUFF.80620.0
  misc_feature: Variant of the nucleotide sequence at SEQ ID NO 34071
aaagaatggcgtcgtatccaagaactgttagaaggacaagaccttaacgagatcgaaaggctatatgagacctatggcgaaagtcagcgcgcggatctcggccgtgctcacgacttcattaacaataacccagatcatttctttccagagagacccaaattagatgaggagggtggtcgaacagcccgaaagcgacgatatgatggcacccgcgaccgaggctttgctgacccggtcgcccagcttttccgggctaggatgtttgcaatatttcgtctgtcgatggtgttgaaccaatatgtacatggccattgcgacttatcggatttgttattggtcgaacaagcgcacctcgagacctggattcaacatgaagagatgtatatggaatgggagaataatcgtttctttgaactctcaaatgcggaggagatccgccacctggagacgcgatacaaggcacggcgggacattttatgcgccacttggaaacgcgaagtgggtgaaattaaaagctggatggaagaacaacgcgcggactcctcacaccgtagagctaggaacagatctgggggcggtgatagaccactgtcaccgccatctgatgatgaagatcccccgaagcccccgaagcccccgaagcccccgaagcccccgaagcccccgaagcctccgaaacctccgaagtctgagaaaaaatcgaagacatctaagcgcgtcagacgcgagggaaaacccgaggagaagggagaaggagagaagaatggggggaaggacgtacaagataagggtcgatcttcccagcaacgatcccatcagaaacagtcttccggaaagcatggttcggagcccagaaaagggaaagacacagttgactcgggctcactggacagcttcgtgacgcacctgtttaagaatcccgagatgaacaagttctttaatgcggatggcgttctcacagagacgtcacaattcgaggaattcctgaagcgtactgcgcggaatgagagtacagcaataggtcattttgcggcagtactccttgaggtgctgcagagtggcagctctgagacaactcgaatagtcagagatgtcctcacctccctaaatcaaagcagtgacgaaagtcttgaagtggtacagaagttgattgactttctgcaccttgtcgctgtgcaaccaccccgcaggaaccaggaagagaatcatcgaggtacaacaactcagccaggtatcaggcgagatgttggcattcaaacatctcaagtagtcaaagaaaaagggcgctctgataacgtaactcaagcaggtatgggagggcttgcaggaacacctgggccactcgtctcacagggtgctccgagacctccgg

SEQ ID NO: 34074 - DNA, 1245 bp, Muscodor strobelii
  misc_feature: SGI cDNA ID NO. 571767
  misc_feature: Reduced expression when VOC is produced
  misc_feature: Encodes the peptide sequence at SEQ ID NO 34075
atgagtgaccttgacagagctattgcgcagttgagggcttgccgacccatccccgaagcccaggtccgcgaggtctgccacaaggcacgtgagctgctgatcgaggaggcaaacgtcgtcaccgtcacagcaccagttacaatatgtggcgacatacacggccagttccatgacctgatggagctcttccgcgtcggaggcgaaccacccgacactaactacctctttatgggagactttgtcgatcgcgggttctacagtatagagtcattccttcttctcctgtgcctcaaagtgcgatatcccgaccgtatgactctgatccgcggaaaccacgagtcccgccagatcaccaccgtctacggcttctacgacgagtgcttgcgaaagtacggcagtcccaatgtctggcgctactgctgcgatgtattcgactacctcgccttgggcgccatagtcctcggcgcctccaactccctcgaacccgcccaaggctcgccaacaaccaacgaagacgtcgaaatagaagtttgcaacgccagcggccagattatgagtcagttcccccggcaaggcagcggcagcgatggtgggcagagaagccctaacggaaccacaggacggactggtcctcccggctcgggcgcatctggatccagtggtgggacgatcggcaaccctggcggcgccgtgctatgtgtgcacggcggtctctcgcccttgattgacacggtggataagatccgtctgctcgatcgcaagcaggaggtgcctcatgagggtgctatgtgcgatcttctgtggtcagatccggacgagattgacggttggggtttgtcaccgcgcggtgcaggtttcctgtttggagccgacatagtgaaggtgttcaaccacagaaatgatctgtcgctcattgcgcgcgcacatcagctagtcatggaaggctttaaggaaatgttcgatgcaagcatagtcaccgtatggtccgcaccaaattactgctaccgctgcggaaacgtggcggccgttctcgagttgtcagaagacccaagtggcatggggtcgttcgcccgcagtaatggagatgtgggcagaagtgatgggggcgtgtccagaggcgtgctcatggataacgacggaatcgccaggaacggcccagctaggagatatcgtgtctttcaggccgcgccgcaggattctaggggaatgcctgctaagaagcctgttgccgattatttcctatga

SEQ ID NO: 34075 - protein, 414 aa, Muscodor strobelii
  misc_feature: SGI Peptide ID NO. 571767
  misc_feature (44)..(313): Pfam Id: PF00149 Pfam Desc: Calcineurin-like phosphoesterase
  misc_feature (7)..(414): NCBI GI: 171688642 Blast Desc: protein product [Podospora anserina] gi|170944283|emb|CAP70393.1| protein product [Podospora anserina]
  misc_feature (1)..(414): NCBI GI: 256727037 Blast Desc: [Nectria haematococca mpVI 77-13-4]
  misc_feature (1)..(414): NCBI GI: 156049427 Blast Desc: conserved [Sclerotinia sclerotiorum 1980] gi|154692819|gb|EDN92557.1| conserved [Sclerotinia sclerotiorum 1980]
  misc_feature (1)..(414): NCBI GI: 145613572 Blast Desc: conserved [Magnaporthe grisea 70-15] gi|145020629|gb|EDK04758.1| conserved [Magnaporthe grisea 70-15]
  misc_feature (1)..(414): NCBI GI: 261191099 Blast Desc: serine/threonine protein phosphatase [Ajellomyces dermatitidis SLH14081] gi|239591002|gb|EEQ73583.1| serine/threonine protein phosphatase [Ajellomyces dermatitidis
  misc_feature (1)..(414): NCBI GI: 239613086 Blast Desc: serine/threonine protein phosphatase [Ajellomyces dermatitidis ER-3]
  misc_feature (1)..(414): NCBI GI: 225561797 Blast Desc: serine/threonine phosphatase PP-X isozyme 2 [Ajellomyces capsulatus G186AR]
  misc_feature (1)..(414): NCBI GI: 261352336 Blast Desc: serine/threonine-protein phosphatase PP-X isozyme 1 [Verticillium albo-atrum VaMs.102]
  misc_feature (1)..(414): NCBI GI: 212529332 Blast Desc: serine/threonine protein phosphatase, [Penicillium marneffei ATCC 18224] gi|210074221|gb|EEA28308.1| serine/threonine protein phosphatase, [Penicillium marneffei ATCC
  misc_feature (1)..(414): NCBI GI: 242763762 Blast Desc: serine/threonine protein phosphatase, [Talaromyces stipitatus ATCC 10500] gi|218723835|gb|EED23252.1| serine/threonine protein phosphatase, [Talaromyces stipitatus
  misc_feature: Useful for introducing or modulating the production of volatile compounds
MSDLDRAIAQLRACRPIPEAQVREVCHKARELLIEEANVVTVTAPVTICGDIHGQFHDLMELFRVGGEPPDTNYLFMGDFVDRGFYSIESFLLLLCLKVRYPDRMTLIRGNHESRQITTVYGFYDECLRKYGSPNVWRYCCDVFDYLALGAIVLGASNSLEPAQGSPTTNEDVEIEVCNASGQIMSQFPRQGSGSDGGQRSPNGTTGRTGPPGSGASGSSGGTIGNPGGAVLCVHGGLSPLIDTVDKIRLLDRKQEVPHEGAMCDLLWSDPDEIDGWGLSPRGAGFLFGADIVKVFNHRNDLSLIARAHQLVMEGFKEMFDASIVTVWSAPNYCYRCGNVAAVLELSEDPSGMGSFARSNGDVGRSDGGVSRGVLMDNDGIARNGPARRYRVFQAAPQDSRGMPAKKPVADYFL

SEQ ID NO: 34076 - DNA, 2276 bp, Muscodor strobelii
  misc_feature: SGI EST ID NO. CUFF.80832.1
  misc_feature: Variant of the nucleotide sequence at SEQ ID NO 34074
cgcatcccaccttcatctcaactcactctgtcaacgtcccgcatcgacaccgaccaagacactaagcatctgctcattgagtgccgtattaaactcagatatacctgcatatctcatctgtctcttgcctgtgcttaccagaccactgagcgggacgagcatggtgtagacactgatccgcagcatcagtggcacaatcccggcctctcgcgcctgcccttcctttgcgccaacccgtctccagcgtcgcaaacatgagtgaccttgacagagctattgcgcagttgagggcttgccgacccatccccgaagcccaggtccgcgaggtctgccacaaggcacgtgagctgctgatcgaggaggcaaacgtcgtcaccgtcacagcaccagttacaatatgtggcgacatacacggccagttccatgacctgatggagctcttccgcgtcggaggcgaaccacccgacactaactacctctttatgggagactttgtcgatcgcgggttctacagtatagagtcattccttcttctcctgtgcctcaaagtgcgatatcccgaccgtatgactctgatccgcggaaaccacgagtcccgccagatcaccaccgtctacggcttctacgacgagtgcttgcgaaagtacggcagtcccaatgtctggcgctactgctgcgatgtattcgactacctcgccttgggcgccatagtcctcggcgcctccaactccctcgaacccgcccaaggctcgccaacaaccaacgaagacgtcgaaatagaagtttgcaacgccagcggccagattatgagtcagttcccccggcaaggcagcggcagcgatggtgggcagagaagccctaacggaaccacaggacggactggtcctcccggctcgggcgcatctggatccagtggtgggacgatcggcaaccctggcggcgccgtgctatgtgtgcacggcggtctctcgcccttgattgacacggtggataagatccgtctgctcgatcgcaagcaggaggtgcctcatgagggtgctatgtgcgatcttctgtggtcagatccggacgagattgacggttggggtttgtcaccgcgcggtgcaggtttcctgtttggagccgacatagtgaaggtgttcaaccacagaaatgatctgtcgctcattgcgcgcgcacatcagctagtcatggaaggctttaaggaaatgttcgatgcaagcatagtcaccgtatggtccgcaccaaattactgctaccgctgcggaaacgtggcggccgttctcgagttgtcagaagacccaagtggcatggggtcgttcgcccgcagtaatggagatgtgggcagaagtgatgggggcgtgtccagaggcgtgctcatggataacgacggaatcgccaggaacggcccagctaggagatatcgtgtctttcaggccgcgccgcaggattctaggggaatgcctgctaagaagcctgttgccgattatttcctatgatcgatcggttctgacgcgagtttagccaactggggggcgattttcgcctttttgcacaggagggctagactatgtcacttcaccgagagcgacatgtaagatttgacgaagatggattgatggtttcacagtggttccgatttgccgactggatcgtcctcagcatttgatcgatacctggcatagaatgacgatgcatggagttaggggaatagggattatagcctgtcaggtgcttcactggacggagtgttttgatatggcatgcctactggcgcaatataaaaaaaatcacttgctaccaacggccaaatctaggctcttcgtttcgcgacggaactcatgtgaagtttgtgtattgggacaaaagaaacagtatctgtctggtgtgtgggtgaatcaagatctgcataagaaaataccagctattgacaaagtcttccacactgtaagcctacccccctctcctgcgctctggccccttttgcatcatgaacccaagtttgtcacccaatgtatgataatctctatctcatcctagagcctcgctaccacctcacaattcaaagaactctcccttgcgacgcggcgcaggccaaccctcacctcttcctccttgcgccactctcgacgaagtatgctgtctctgggcctggtgtgcgattttgctgatccacgtgacttgtatcaaatctctcaaatctggccaggcatcgctgtccggaatacctgcgacagcctgcccgtccgcaggtttcctcaacctatccacctcac

SEQ ID NO: 34077 - DNA, 453 bp, Muscodor strobelii
  misc_feature: SGI cDNA ID NO. 571768
  misc_feature: Encodes the peptide sequence at SEQ ID NO 34078
atgccgccacatctccatcctcgctctcgcatgacttcatctctcttcgccaccgttgtcgctagcagctttctcgtggtgggcttaccacatttattgccctgcccagcaccgcgagcagcatttgccgactctgcgtctccggacggtagtcgcaagcgcacgaggaggaggtctccacagcacacgactgaggttaccgacggcatagcacagttcaacggtgtcaatacagaagcagagaaagacgcgttgaacgcaactgcgccaagagggaagagagaatgtcccgttcccaaacccaaaggcgtgatcggcgagttgatggggttcaaggatgaacaggatgatacacgcagatcggcaacccagagccaaagtgtgacaaaacgaccgtatatacaagatcccagcaggagaatcaacgtcatcaccacattctctacactctag

SEQ ID NO: 34078 - protein, 150 aa, Muscodor strobelii
  misc_feature: SGI Peptide ID NO. 571768
  misc_feature (1)..(121): NCBI GI: 261352335 Blast Desc: conserved [Verticillium albo-atrum VaMs.102]
  misc_feature (2)..(116): NCBI GI: 85108148 Blast Desc: NCU08302 [Neurospora crassa OR74A] gi|28924123|gb|EAA33279.1| conserved [Neurospora crassa OR74A]
  misc_feature (2)..(118): NCBI GI: 171688640 Blast Desc: protein product [Podospora anserina] gi|170944282|emb|CAP70392.1| protein product [Podospora anserina]
  misc_feature (1)..(101): NCBI GI: 46136205 Blast Desc: FG09618.1 [Gibberella zeae PH-1]
  misc_feature (1)..(128): NCBI GI: 225684443 Blast Desc: conserved [Paracoccidioides brasiliensis Pb03]
  misc_feature (1)..(128): NCBI GI: 226294096 Blast Desc: conserved [Paracoccidioides brasiliensis Pb18]
  misc_feature (1)..(129): NCBI GI: 70997407 Blast Desc: AFUA_5G12000 [Aspergillus fumigatus Af293] gi|66851087|gb|EAL91413.1| AFUA_5G12000 [Aspergillus fumigatus Af293] gi|159126821|gb|EDP51937.1| AFUB_059580 [Aspergillus
  misc_feature (1)..(119): NCBI GI: 226284824 Blast Desc: conserved [Paracoccidioides brasiliensis Pb01]
  misc_feature (1)..(119): NCBI GI: 261191101 Blast Desc: conserved [Ajellomyces dermatitidis SLH14081] gi|239591003|gb|EEQ73584.1| conserved [Ajellomyces dermatitidis SLH14081] gi|239613085|gb|EEQ90072.1| conserved [Ajellomyces
  misc_feature (1)..(116): NCBI GI: 258567640 Blast Desc: [Uncinocarpus reesii 1704] gi|237906010|gb|EEP80411.1| [Uncinocarpus reesii 1704]
MPPHLHPRSRMTSSLFATVVASSFLVVGLPHLLPCPAPRAAFADSASPDGSRKRTRRRSPQHTTEVTDGIAQFNGVNTEAEKDALNATAPRGKRECPVPKPKGVIGELMGFKDEQDDTRRSATQSQSVTKRPYIQDPSRRINVITTFSTL

SEQ ID NO: 34079 - DNA, 1431 bp, Muscodor strobelii
  misc_feature: SGI cDNA ID NO. 571769
  misc_feature: Reduced expression when VOC is produced
  misc_feature: Encodes the peptide sequence at SEQ ID NO 34080
atggaagaagggcaggctataacgcctatggcggcgcctcaagtcgagccgttgtcgcgaccggactcggctgcatcaacacgagactcggccaccatcgaccaactccccgttcttgcagccatcgctgcgtccgtgacaaactcgccacagttgaaagacgagatacccagtcagattcctgccggtactcccacaccaccaatcattcctatccaagaccaacctccgccagagcagactcaacacgagcagcctcagcaagaacaatcatttcaggagcagagctacgcagatccagcaccagcaccggcggcagaaccgattccgactgccgcgccggtaccagcgatgacttccacacccgtcccggcccccgtaatggccccggcgcctgcaccggccgctcccactgccgtcatgactccagctccagtccatgctcctgcatctatgcctgtgaaccaccaaatgacacctacggctccgcccgcacaacattcaccggctgctcatgcgccgactccatcaggtagcttgccaacctgccagaactgcagcacctctacgacgccactatggcgacgcgacgagatgggctctgtcctctgcaacgcctgtggtcttttcctcaagctgcatggccgtccccgaccgatctctctcaagacagacgtcatcaagagccgcaatcgcgtcaagaccctgcgaccagacatgcagaagaaaaagcagagcctcccggccacggccaacgccaatggcaacttccagagccacgacgctgtcaacgctgctgcgaccgccgctgcgcttgctgccgttagagctacccaggcgaaaggcgcaaatggccacggcaccgacgccagcatcgcccgcaccggaagccccagcgtctacgacccaagtctctccgctttccaagctatggaccacttccagcacgacaacctccactatcctctcactggtgcatcgccagaccaggccgtcgcagccgccaacggagaccagcagtccctcgatgcgcctctgagcaacgagcaacttatcgccgccaactcgagccttaagacccgcgtgagcgagctagacctgatcaacgagctgtatcgcgaccgtcttcagcagtttgagcaggagggccagaacgccgacaactttcgtcacgccgccgagatgtctgccaaggaggctgccaatgagcgtgcgcatcgtgaggagattcagcgccagctggacgactgccaccgccgagagaataccctcaaacgacgtctagacgaaatggaacaggagctgacggagctcaagaactccaagctcgagtccgagtcggagcaccaaggcaagcgacccaaactcgaggaggcacaacccgaacccgaggaaaccgagcagcccctcgccatccagcctgatctctag

SEQ ID NO: 34080 - protein, 476 aa, Muscodor strobelii
  misc_feature: SGI Peptide ID NO. 571769
  misc_feature (183)..(217): Pfam Id: PF00320 Pfam Desc: GATA zinc finger
  misc_feature (179)..(460): NCBI GI: 256727481 Blast Desc: NECHADRAFT_90976 [Nectria haematococca mpVI 77-13-4]
  misc_feature (98)..(465): NCBI GI: 116194446 Blast Desc: CHGG_03821 [Chaetomium globosum CBS 148.51] gi|88179734|gb|EAQ87202.1| CHGG_03821 [Chaetomium globosum CBS 148.51]
  misc_feature (158)..(435): NCBI GI: 46121389 Blast Desc: FG05073.1 [Gibberella zeae PH-1]
  misc_feature (164)..(458): NCBI GI: 121488865 Blast Desc: GATA transcription factor AreB [Gibberella fujikuroi]
  misc_feature (181)..(458): NCBI GI: 14285349 Blast Desc: ASD4_NEUCR RecName: Full=GATA type zinc finger protein asd-4; AltName: Full=Ascus development protein 4 gi|12007402|gb|AAG45180.1|AF319953_1 GATA type zinc finger ASD4
  misc_feature (161)..(440): NCBI GI: 156045191 Blast Desc: SS1G_09784 [Sclerotinia sclerotiorum 1980] gi|154694179|gb|EDN93917.1| SS1G_09784 [Sclerotinia sclerotiorum 1980]
  misc_feature (113)..(458): NCBI GI: 171683571 Blast Desc: protein product [Podospora anserina] gi|170941745|emb|CAP67399.1| protein product [Podospora anserina]
  misc_feature (181)..(440): NCBI GI: 154290223 Blast Desc: BC1G_15788 [Botryotinia fuckeliana B05.10] gi|150847844|gb|EDN23037.1| BC1G_15788 [Botryotinia fuckeliana B05.10]
  misc_feature (2)..(465): NCBI GI: 59802873 Blast Desc: GATA type zinc finger protein-like protein [Magnaporthe grisea]
  misc_feature (181)..(465): NCBI GI: 145603440 Blast Desc: conserved [Magnaporthe grisea 70-15] gi|145011671|gb|EDJ96327.1| conserved [Magnaporthe grisea 70-15]
  misc_feature: Useful for introducing or modulating the production of volatile compounds
MEEGQAITPMAAPQVEPLSRPDSAASTRDSATIDQLPVLAAIAASVTNSPQLKDEIPSQIPAGTPTPPIIPIQDQPPPEQTQHEQPQQEQSFQEQSYADPAPAPAAEPIPTAAPVPAMTSTPVPAPVMAPAPAPAAPTAVMTPAPVHAPASMPVNHQMTPTAPPAQHSPAAHAPTPSGSLPTCQNCSTSTTPLWRRDEMGSVLCNACGLFLKLHGRPRPISLKTDVIKSRNRVKTLRPDMQKKKQSLPATANANGNFQSHDAVNAAATAAALAAVRATQAKGANGHGTDASIARTGSPSVYDPSLSAFQAMDHFQHDNLHYPLTGASPDQAVAAANGDQQSLDAPLSNEQLIAANSSLKTRVSELDLINELYRDRLQQFEQEGQNADNFRHAAEMSAKEAANERAHREEIQRQLDDCHRRENTLKRRLDEMEQELTELKNSKLESESEHQGKRPKLEEAQPEPEETEQPLAIQPDL

SEQ ID NO: 34081 - DNA, 3317 bp, Muscodor strobelii
  misc_feature: SGI EST ID NO. CUFF.80834.1
  misc_feature: Variant of the nucleotide sequence at SEQ ID NO 34079
tttcgatctcttttcccccaatccaacctttcgcattgttcgataccctcttgcgcgaagcaactcaccctttctgtcgttcttttcgcacacctctgtgcagattgtgcagtacaccgaggttatcatcacgcgaattgctgtctctaattccctccacccacttggccctggtccaagagtacatctccctggttatcgagccgatcgacctctgcacaagccgcgatcgcgattcgataacccgataacacaccctcagcgcgtccctcccacctttcggcatcccgtcgcaacctctactcccaaagctctctcccagcattgaggccagtcgttggtcgattgctttcggccactttgcaacagattctcctcgcgcttgcgaccgagtatatccccagtccagtgccattgtcggcctgtcaggggcaacggtcgcgccgcaaagtttccttgctgccgacgtcttgccgccagcatcttgccatcctgacagttataccaccggcctccgcgttcgctattcctagccgccgcaatggaagaagggcaggctataacgcctatggcggcgcctcaagtcgagccgttgtcgcgaccggactcggctgcatcaacacgagactcggccaccatcgaccaactccccgttcttgcagccatcgctgcgtccgtgacaaactcgccacagttgaaagacgagatacccagtcagattcctgccggtactcccacaccaccaatcattcctatccaagaccaacctccgccagagcagactcaacacgagcagcctcagcaagaacaatcatttcaggagcagagctacgcagatccagcaccagcaccggcggcagaaccgattccgactgccgcgccggtaccagcgatgacttccacacccgtcccggcccccgtaatggccccggcgcctgcaccggccgctcccactgccgtcatgactccagctccagtccatgctcctgcatctatgcctgtgaaccaccaaatgacacctacggctccgcccgcacaacattcaccggctgctcatgcgccgactccatcaggtagcttggtaagtccaaagttttcttccatcgtgctctatacacaatccctatgcattcagtcttgcatgccatggtcgtctgcggggctccaggtactatgaccagtcctttggcctacatgtggtggatatttggcatctactcgcggagctgttgggatttcgtctgcatcaagcccattcacagccgtacacctcatttcaattagtgtgccgtgcaaaaccaatggcttttcacacgcattcggtcttacccgatcagtctgtctgtttcccctacatactgctcaccgccggagtcgtgtgagatttctcatatctcctgcgagggatctccttttgcaataagctgcaaccttatctagaactggagcagagcaggataaagtaacttccaagtgtggagacgctctcatgcagtgagccaatcaaatggcatgtattgtgctctagagctgcttatcagcaaacaagcccatccccccagtcggtggcccagaaatttttttcccgccgcctacctgtcgcaactccccaaattttcattatcagcgatctaatcttgctatcgatttatatcgatttactatttccccttcccatttcatcatcccgtcgccgatagtccgcatcgctctgctatcagccctatcagcccgcgatagtactgtctatcgcaatcgcatagcctatcgcaacattgtcactgtcgcatatagtctatcaagatgatggcctcacaccccgccgtctcggcggcacctgccactgggcccgatgctaacagtgtgcctccacaacagccaacctgccagaactgcagcacctctacgacgccactatggcgacgcgacgagatgggctctgtcctctgcaacgcctgtggtcttttcctcaagctgcatggccgtccccgaccgatctctctcaagacagacgtcatcaagagccgcaatcgcgtcaagaccctgcgaccagacatgcagaagaaaaagcagagcctcccggccacggccaacgccaatggcaacttccagagccacgacgctgtcaacgctgctgcgaccgccgctgcgcttgctgccgttagagctacccaggcgaaaggcgcaaatggccacggcaccgacgccagcatcgcccgcaccggaagccccagcgtctacgacccaagtctctccgctttccaagctatggaccacttccagcacgacaacctccactatcctctcactggtgcatcgccagaccaggccgtcgcagccgccaacggagaccagcagtccctcgatgcgcctctgagcaacgagcaacttatcgccgccaactcgagccttaagacccgcgtgagcgagctagacctgatcaacgagctgtatcgcgaccgtcttcagcagtttgagcaggagggccagaacgccgacaactttcgtcacgccgccgagatgtctgccaaggaggctgccaatgagcgtgcgcatcgtgaggagattcagcgccagctggacgactgccaccgccgagagaataccctcaaacgacgtctagacgaaatggaacaggagctgacggagctcaagaactccaagctcgagtccgagtcggagcaccaaggcaagcgacccaaactcgaggaggcacaacccgaacccgaggaaaccgagcagcccctcgccatccagcctgatctctaggagggtcaccatggctacttgtggtagttcaatacgctcaacatcttcgttctggcgcctatagctgcactgcgcaggagatctggagcatcgagtggcaactaattcctgtaacatcactactttgccctgtgctcatttcgttactgttgattcctctgcgtactagatccggtgaacagggatagataccccttttcgatcggcccctggatgggatttttctgtcatttcattttctccgtaatcaaaaggacggggaaacggtgaaaaatgctggcaacaagccacaaaatttggtatgatggcgtcagttgtagactggctaaggaggacgcttttacttcgcctcgtcttttcatgatgatgcacgagatgattctgcatggcataggtcttgcaaggaggaaatgcgaccaatgaatatggagttccggaatgcttcatggtgtgcgaaaaatacctttctttcgagtagcacgacgaacaacaaaataaagatagtccaatcaaaatttggaaaaataatcatttgtcccatctcagtg

SEQ ID NO: 34082 - DNA, 1515 bp, Muscodor strobelii
  misc_feature: SGI cDNA ID NO. 571770
  misc_feature: Reduced expression when VOC is produced
  misc_feature: Encodes the peptide sequence at SEQ ID NO 34083
atggaagaagggcaggctataacgcctatggcggcgcctcaagtcgagccgttgtcgcgaccggactcggctgcatcaacacgagactcggccaccatcgaccaactccccgttcttgcagccatcgctgcgtccgtgacaaactcgccacagttgaaagacgagatacccagtcagattcctgccggtactcccacaccaccaatcattcctatccaagaccaacctccgccagagcagactcaacacgagcagcctcagcaagaacaatcatttcaggagcagagctacgcagatccagcaccagcaccggcggcagaaccgattccgactgccgcgccggtaccagcgatgacttccacacccgtcccggcccccgtaatggccccggcgcctgcaccggccgctcccactgccgtcatgactccagctccagtccatgctcctgcatctatgcctgtgaaccaccaaatgacacctacggctccgcccgcacaacattcaccggctgctcatgcgccgactccatcaggtagcttgtctatcaagatgatggcctcacaccccgccgtctcggcggcacctgccactgggcccgatgctaacagtgtgcctccacaacagccaacctgccagaactgcagcacctctacgacgccactatggcgacgcgacgagatgggctctgtcctctgcaacgcctgtggtcttttcctcaagctgcatggccgtccccgaccgatctctctcaagacagacgtcatcaagagccgcaatcgcgtcaagaccctgcgaccagacatgcagaagaaaaagcagagcctcccggccacggccaacgccaatggcaacttccagagccacgacgctgtcaacgctgctgcgaccgccgctgcgcttgctgccgttagagctacccaggcgaaaggcgcaaatggccacggcaccgacgccagcatcgcccgcaccggaagccccagcgtctacgacccaagtctctccgctttccaagctatggaccacttccagcacgacaacctccactatcctctcactggtgcatcgccagaccaggccgtcgcagccgccaacggagaccagcagtccctcgatgcgcctctgagcaacgagcaacttatcgccgccaactcgagccttaagacccgcgtgagcgagctagacctgatcaacgagctgtatcgcgaccgtcttcagcagtttgagcaggagggccagaacgccgacaactttcgtcacgccgccgagatgtctgccaaggaggctgccaatgagcgtgcgcatcgtgaggagattcagcgccagctggacgactgccaccgccgagagaataccctcaaacgacgtctagacgaaatggaacaggagctgacggagctcaagaactccaagctcgagtccgagtcggagcaccaaggcaagcgacccaaactcgaggaggcacaacccgaacccgaggaaaccgagcagcccctcgccatccagcctgatctctag

SEQ ID NO: 34083 - protein, 504 aa, Muscodor strobelii
  misc_feature: SGI Peptide ID NO. 571770
  misc_feature (211)..(245): Pfam Id: PF00320 Pfam Desc: GATA zinc finger
  misc_feature (196)..(488): NCBI GI: 256727481 Blast Desc: NECHADRAFT_90976 [Nectria haematococca mpVI 77-13-4]
  misc_feature (186)..(493): NCBI GI: 116194446 Blast Desc: CHGG_03821 [Chaetomium globosum CBS 148.51] gi|88179734|gb|EAQ87202.1| CHGG_03821 [Chaetomium globosum CBS 148.51]
  misc_feature (208)..(486): NCBI GI: 14285349 Blast Desc: ASD4_NEUCR RecName: Full=GATA type zinc finger protein asd-4; AltName: Full=Ascus development protein 4 gi|12007402|gb|AAG45180.1|AF319953_1 GATA type zinc finger ASD4
  misc_feature (186)..(463): NCBI GI: 46121389 Blast Desc: FG05073.1 [Gibberella zeae PH-1]
  misc_feature (209)..(486): NCBI GI: 121488865 Blast Desc: GATA transcription factor AreB [Gibberella fujikuroi]
  misc_feature (113)..(501): NCBI GI: 171683571 Blast Desc: protein product [Podospora anserina] gi|170941745|emb|CAP67399.1| protein product [Podospora anserina]
  misc_feature (128)..(468): NCBI GI: 156045191 Blast Desc: SS1G_09784 [Sclerotinia sclerotiorum 1980] gi|154694179|gb|EDN93917.1| SS1G_09784 [Sclerotinia sclerotiorum 1980]
  misc_feature (128)..(468): NCBI GI: 154290223 Blast Desc: BC1G_15788 [Botryotinia fuckeliana B05.10] gi|150847844|gb|EDN23037.1| BC1G_15788 [Botryotinia fuckeliana B05.10]
  misc_feature (2)..(493): NCBI GI: 59802873 Blast Desc: GATA type zinc finger protein-like protein [Magnaporthe grisea]
  misc_feature (150)..(493): NCBI GI: 145603440 Blast Desc: conserved [Magnaporthe grisea 70-15] gi|145011671|gb|EDJ96327.1| conserved [Magnaporthe grisea 70-15]
  misc_feature: Useful for introducing or modulating the production of volatile compounds
MEEGQAITPMAAPQVEPLSRPDSAASTRDSATIDQLPVLAAIAASVTNSPQLKDEIPSQIPAGTPTPPIIPIQDQPPPEQTQHEQPQQEQSFQEQSYADPAPAPAAEPIPTAAPVPAMTSTPVPAPVMAPAPAPAAPTAVMTPAPVHAPASMPVNHQMTPTAPPAQHSPAAHAPTPSGSLSIKMMASHPAVSAAPATGPDANSVPPQQPTCQNCSTSTTPLWRRDEMGSVLCNACGLFLKLHGRPRPISLKTDVIKSRNRVKTLRPDMQKKKQSLPATANANGNFQSHDAVNAAATAAALAAVRATQAKGANGHGTDASIARTGSPSVYDPSLSAFQAMDHFQHDNLHYPLTGASPDQAVAAANGDQQSLDAPLSNEQLIAANSSLKTRVSELDLINELYRDRLQQFEQEGQNADNFRHAAEMSAKEAANERAHREEIQRQLDDCHRRENTLKRRLDEMEQELTELKNSKLESESEHQGKRPKLEEAQPEPEETEQPLAIQPDL

SEQ ID NO: 34084 - DNA, 3317 bp, Muscodor strobelii; identical to SEQ ID NO: 34081
  misc_feature: SGI EST ID NO. CUFF.80834.1
  misc_feature: Variant of the nucleotide sequence at SEQ ID NO 34082

SEQ ID NO: 34085 - DNA, 972 bp, Muscodor strobelii
  misc_feature: SGI cDNA ID NO. 571771
  misc_feature: Reduced expression when VOC is produced
  misc_feature: Encodes the peptide sequence at SEQ ID NO 34086
atgccttcaacgcagaaccgcgataaaccgtgggatacggaggacatcgataaatggaagatcgatactttcaagcccgaggacaacgtctctggcacactcgcagaagaatcaagtttcgtcgtattgttcccgaagtatagggagacgtatctcagagaggcatgggcgggtgtcacgagagcgctcaagaatctggggattgcgtgtcagcttgatttggtgctcggtcagatggaggtcaagactacgaagaagacttgggatccggctgctattttgaaagcgagagatcttataaaacttctcgcgagaagtgtaccggcgcctgaggcgttgaagattctggatgatgagacggcttgtgatatcattaaaatccgcaacctagtaaacggcaaagaaaaattcgtaaagcgacgccagcggctcctcggtcccaacgggcaaaccctcaaagccctccaactcctaacaaacacctacctccaagtgcaaggaaacaccgtctccgcaatcggggggtacaaaggtcttaaagaagtgcgccgcgtagtcgaagacacaatgcacaacgtccacccaatctatcaaatcaaagaactaatggtaaaacgcgagctcgccaaagatcccctcctggcaaacgaatcttgggatcgtttcctaccgaattacaaaaagaggtcactatccaagcggaaagtcccgttcaagattaccgagaagaagacgtatacacccttccccccggcccaagaacagagtaaagttgataagcagctggaggcgggtgagtaccatattgggaaagaggcgaagaaacgtatggtaaaggaggagaggatggataggcagaaggaggctaaggagcttaagaagcgcgagagagaggcggaatttgttgcccccgctgaggaggagagcagtagtaagaagaggaagaggaaggggaagaaggatgaggagtga

SEQ ID NO: 34086 - protein, 323 aa, Muscodor strobelii
  misc_feature: SGI Peptide ID NO. 571771
  misc_feature (1)..(307): NCBI GI: 240104709 Blast Desc: KH domain containing protein [Coccidioides posadasii C735 delta SOWgp]
  misc_feature (1)..(307): NCBI GI: 119178764 Blast Desc: conserved [Coccidioides immitis RS]
  misc_feature (1)..(306): NCBI GI: 256727430 Blast Desc: [Nectria haematococca mpVI 77-13-4]
  misc_feature (1)..(306): NCBI GI: 121715638 Blast Desc: rRNA assembly protein Mis3, [Aspergillus clavatus NRRL 1] gi|119403585|gb|EAW14002.1| rRNA assembly protein Mis3, [Aspergillus clavatus NRRL 1]
  misc_feature (1)..(307): NCBI GI: 212543805 Blast Desc: rRNA assembly protein Mis3, [Penicillium marneffei ATCC 18224] gi|210066964|gb|EEA21057.1| rRNA assembly protein Mis3, [Penicillium marneffei ATCC 18224]
  misc_feature (1)..(304): NCBI GI: 71001580 Blast Desc: rRNA assembly protein Mis3 [Aspergillus fumigatus Af293] gi|66853109|gb|EAL93433.1| rRNA assembly protein Mis3, [Aspergillus fumigatus Af293] gi|159129540|gb|EDP54654.1| rRNA
  misc_feature (1)..(304): NCBI GI: 67539410 Blast Desc: AN5875.2 [Aspergillus nidulans FGSC A4] gi|40739194|gb|EAA58384.1| AN5875.2 [Aspergillus nidulans FGSC A4]
  misc_feature (1)..(304): NCBI GI: 259479960 Blast Desc: TPA: rRNA assembly protein Mis3, (AFU_orthologue; AFUA_2G11380) [Aspergillus nidulans FGSC A4]
  misc_feature (1)..(307): NCBI GI: 238839756 Blast Desc: ribosomal RNA assembly protein mis3 [Microsporum canis CBS 113480]
  misc_feature (1)..(306): NCBI GI: 145232010 Blast Desc: An02g03350 [Aspergillus niger] gi|134056381|emb|CAK47615.1| protein product [Aspergillus niger]
  misc_feature: Useful for introducing or modulating the production of volatile compounds
MPSTQNRDKPWDTEDIDKWKIDTFKPEDNVSGTLAEESSFVVLFPKYRETYLREAWAGVTRALKNLGIACQLDLVLGQMEVKTTKKTWDPAAILKARDLIKLLARSVPAPEALKILDDETACDIIKIRNLVNGKEKFVKRRQRLLGPNGQTLKALQLLTNTYLQVQGNTVSAIGGYKGLKEVRRVVEDTMHNVHPIYQIKELMVKRELAKDPLLANESWDRFLPNYKKRSLSKRKVPFKITEKKTYTPFPPAQEQSKVDKQLEAGEYHIGKEAKKRMVKEERMDRQKEAKELKKREREAEFVAPAEEESSSKKRKRKGKKDEE

SEQ ID NO: 34087 - DNA, 524 bp, Muscodor strobelii
  misc_feature: SGI EST ID NO. CUFF.80649.0
  misc_feature: Variant of the nucleotide sequence at SEQ ID NO 34085
cctggcttcacattaactgtcgcctcaatcagttcaccactgctactcatcgtgtgtgcggtgcatatatcaatctcacacctgctaccactatctgaaggcgatttcacttgaatatttgcgcatcgaaaatcttgtttgcggaggacgagatgccttcaacgcagaaccgcgataaaccgtgggatacggaggacatcgataaatggaagatcgatactttcaagcccgaggacaacgtctctggcacactcgcagaagaatcaagtttcgtcgtattgttcccgaagtatagggagacgtatctcagagaggcatgggcgggtgtcacgagagcgctcaagaatctggggattgcgtgtcagcttgatttggtgctcggtcagatggaggtcaagactacgaagaagacttgggatccggctgctattttgaaagcgagagatcttataaaacttctcgcgagaagtgtaccggcgcctgaggcgttgaagattctggatgatgagacggcttgtgatatc

SEQ ID NO: 34088 - DNA, 1437 bp, Muscodor strobelii
  misc_feature: SGI cDNA ID NO. 571772
  misc_feature: Encodes the peptide sequence at SEQ ID NO 34089
atgcccaaagcaacaacgcccaaagcggctcggcgggcgctcgaagacgagtaccttgcgggcgccgctccggtgcgcaaccgccagccaaagcggaagtctaaagacaacgatgagaatgaaaagtcagactacattgattccagatcatcccaaaagatcctacaaatagggcgagaactggccgaagaagacgccgccaatgccccgcgaccaccccccgcagaccccagcgcagcgttcggtttcgattcgagattcgaagaagaagacacatacgagggtggattggaagacgaagtctgggcagatgaagatgaggagatcgaagagatcgacgtagagccggatgaccttgacacattcaaccgctttctccccaccgacgaagatcccttagtcaagaacggtccctggggtgaggcagcagaggaagaaaaaggcggcacgagcacgaatcttgcggatctaatattagcgcgtatcgctgcacatgaggctggtcaagatagacagggtgctgttgggcctgtagacgaggagtatgagctcccgcctaaggtcgtagaagtatacacgaaaatcggcctcttcctctcccgctacaagtccggcaagctgcctaaacccttcaagatccttcccacgataccaaactgggagtccatcctccagctcaccaagcccgaatcctggacgcccaacgccgtgctagcagcgacccgaatcttcatatcctccaccccgctcgtcgcccgcacattcctcgagatggtcctcctcgaccgcgtgcgagacgatatccaagagaccaagaagttaaacgtgcatctcttcgacgccttacgaaaggctctgtacaaacccgcagcattcttcaaggctattctcttcccgcttgtggaaagtggcgcaacgcttagggaggcacatatcatcagcgcggtactgacgagagtcagtatacccgtgctgcactctggagctgcgcttaaggctctgtgtgatattgcggcgagggaggcgagtgctatgggcgctgaggctagtggtgcgacaaatgtctttattaaggcgctgttggataagaaatatgctttaccgtaccaagtcgtggatagtctcgtcttccacttcttgcgcttcagggcgcagaacaaagatgaggatacgatgatgcacagtgagagggcggcgagagaggctaagctgcctgttatttggcatcagtgtttactttcgtttgcaacgaggtataagaatgagatcacagaggaccaaagagagatgttgcttgatttgttgctttctgtcgggcatcatcagatcggacccgtaatccgacgtgagttactagctggccgtggcagaggtgtgctagccgagccccagggtccggcgctggacggtgatgataccatggttattgatggatga

SEQ ID NO: 34089 - protein, 478 aa, Muscodor strobelii
  misc_feature: SGI Peptide ID NO. 571772
  misc_feature (133)..(467): Pfam Id: PF05291 Pfam Desc: Bystin
  misc_feature (1)..(477): NCBI GI: 46121701 Blast Desc: FG05229.1 [Gibberella zeae PH-1]
  misc_feature (1)..(474): NCBI GI: 169778582 Blast Desc: [Aspergillus oryzae RIB40] gi|238499025|ref|XP_002380747.1| rRNA processing protein Bystin, [Aspergillus flavus NRRL3357] gi|83772494|dbj|BAE62623.1| protein
  misc_feature (59)..(477): NCBI GI: 154321784 Blast Desc: BC1G_01039 [Botryotinia fuckeliana B05.10] gi|150850286|gb|EDN25479.1| BC1G_01039 [Botryotinia fuckeliana B05.10]
  misc_feature (1)..(474): NCBI GI: 115394868 Blast Desc: bystin [Aspergillus terreus NIH2624] gi|114193014|gb|EAU34714.1| bystin [Aspergillus terreus NIH2624]
  misc_feature (1)..(477): NCBI GI: 212545156 Blast Desc: rRNA processing protein Bystin, [Penicillium marneffei ATCC 18224] gi|210065701|gb|EEA19795.1| rRNA processing protein Bystin, [Penicillium marneffei ATCC 18224]
  misc_feature (1)..(477): NCBI GI: 242814798 Blast Desc: rRNA processing protein Bystin, [Talaromyces stipitatus ATCC 10500] gi|218714783|gb|EED14206.1| rRNA processing protein Bystin, [Talaromyces stipitatus ATCC 10500]
  misc_feature (1)..(474): NCBI GI: 121711846 Blast Desc: rRNA processing protein Bystin, [Aspergillus clavatus NRRL 1] gi|119401690|gb|EAW12112.1| rRNA processing protein Bystin, [Aspergillus clavatus NRRL 1]
  misc_feature (27)..(474): NCBI GI: 159128100 Blast Desc: rRNA processing protein Bystin, [Aspergillus fumigatus A1163]
  misc_feature (1)..(474): NCBI GI: 145228317 Blast Desc: An01g00150 [Aspergillus niger] gi|134054553|emb|CAK36866.1| protein product [Aspergillus niger]
  misc_feature (1)..(474): NCBI GI: 67904822 Blast Desc: AN9398.2 [Aspergillus nidulans FGSC A4] gi|40747309|gb|EAA66465.1| AN9398.2 [Aspergillus nidulans FGSC A4] gi|259488240|tpe|CBF87537.1| TPA: rRNA processing protein A4]
MPKATTPKAARRALEDEYLAGAAPVRNRQPKRKSKDNDENEKSDYIDSRSSQKILQIGRELAEEDAANAPRPPPADPSAAFGFDSRFEEEDTYEGGLEDEVWADEDEEIEEIDVEPDDLDTFNRFLPTDEDPLVKNGPWGEAAEEEKGGTSTNLADLILARIAAHEAGQDRQGAVGPVDEEYELPPKVVEVYTKIGLFLSRYKSGKLPKPFKILPTIPNWESILQLTKPESWTPNAVLAATRIFISSTPLVARTFLEMVLLDRVRDDIQETKKLNVHLFDALRKALYKPAAFFKAILFPLVESGATLREAHIISAVLTRVSIPVLHSGAALKALCDIAAREASAMGAEASGATNVFIKALLDKKYALPYQVVDSLVFHFLRFRAQNKDEDTMMHSERAAREAKLPVIWHQCLLSFATRYKNEITEDQREMLLDLLLSVGHHQIGPVIRRELLAGRGRGVLAEPQGPALDGDDTMVIDG

SEQ ID NO: 34090 - DNA, 2480 bp, Muscodor strobelii
  misc_feature: SGI EST ID NO. CUFF.80653.0
  misc_feature: Variant of the nucleotide sequence at SEQ ID NO 34088
caagactctaatcggcgcccagctgcagcatagttcatttctacaccaaatcttgagctgcgagcatactagcaactcagatagaccgaaaagaccaccgtcacagtcttctaccgtacgaaagtagaatgcccaaagcaacaacgcccaaagcggctcggcgggcgctcgaagacgagtaccttgcgggcgccgctccggtgcgcaaccgccagccaaagcggaagtctaaagacaacgatgagaatgaaaagtcagactacattgattccagatcatcccaaaagatcctacaaatagggcgagaactggccgaagaagacgccgccaatgccccgcgaccaccccccgcagaccccagcgcagcgttcggtttcgattcgagattcgaagaagaagacacatacgagggtggattggaagacgaagtctgggcagatgaagatgaggagatcgaagagatcgacgtagagccggatgaccttgacacattcaaccgctttctccccaccgacgaagatcccttagtcaagaacggtccctggggtgaggcagcagaggaagaaaaaggcggcacgagcacgaatcttgcggatctaatattagcgcgtatcgctgcacatgaggctggtcaagatagacagggtgctgttgggcctgtagacgaggagtatgagctcccgcctaaggtcgtagaagtatacacgaaaatcggcctcttcctctcccgctacaagtccggcaagctgcctaaacccttcaagatccttcccacgataccaaactgggagtccatcctccagctcaccaagcccgaatcctggacgcccaacgccgtgctagcagcgacccgaatcttcatatcctccaccccgctcgtcgcccgcacattcctcgagatggtcctcctcgaccgcgtgcgagacgatatccaagagaccaagaagttaaacgtgcatctcttcgacgccttacgaaaggctctgtacaaacccgcagcattcttcaaggctattctcttcccgcttgtggaaagtggcgcaacgcttagggaggcacatatcatcagcgcggtactgacgagagtcagtatacccgtgctgcactctggagctgcgcttaaggctctgtgtgatattgcggcgagggaggcgagtgctatgggcgctgaggctagtggtgcgacaaatgtctttattaaggcgctgttggataagaaatatgctttaccgtaccaagtcgtggatagtctcgtcttccacttcttgcgcttcagggcgcagaacaaagatgaggatacgatgatgcacagtgagagggcggcgagagaggctaagctgcctgttatttggcatcagtgtttactttcgtttgcaacgaggtataagaatgagatcacagaggaccaaagagagatgttgcttgatttgttgctttctgtcgggcatcatcagatcggacccgtaatccgacgtgagttactagctggccgtggcagaggtgtgctagccgagccccagggtccggcgctggacggtgatgataccatggttattgatggatgagaaaggggcaaggtgataggggcgctgagatcggaatgataccaatgaatgatgatatgttcatataggacaatagagggaacgaaaaggggggatatatcataatgaagttttgtgcatgatcatacacatcgtgtcaagcaacggctttgccgatctattttctgcgaaagagaagccattcgtcgatttacatatggctaatgacacaaatcaccccatgccctatttttgacgcccaacgccgcttgtgagtacattcgtagaccgactgtcgtctagcgatcataaggcgcctgtgccgtatattttactctgatacatcactcctcatccttcttccccttcctcttcctcttcttactactgctctcctcctcagcgggggcaacaaattccgcctctctctcgcgcttcttaagctccttagcctccttctgcctatccatcctctcctcctttaccatacgtttcttcgcctctttcccaatatggtactcacccgcctccagctgcttatcaactttactctgttcttgggccggggggaagggtgtatacgtcttcttctcggtaatcttgaacgggactttccgcttggatagtgacctctttttgtaattcggtaggaaacgatcccaagattcgtttgccaggaggggatctttggcgagctcgcgttttaccattagttctttgatttgatagattgggtggacgttgtgcattgtgtcttcgactacgcggcgcacttctttaagacctttgtaccccccgattgcggagacggtgtttccttgcacttggaggtaggtgtttgttaggagttggagggctttgagggtttgcccgttgggaccgaggagccgctggcgtcgctttacgaatttttctttgccgtttactaggttgcgg

SEQ ID NO: 34091 - DNA, 2241 bp, Muscodor strobelii
  misc_feature: SGI cDNA ID NO. 571773
  misc_feature: Reduced expression when VOC is produced
  misc_feature: Encodes the peptide sequence at SEQ ID NO 34092
atggaagccatagtacggcaggcaagagtcactttcggcgacacattacccaaaggctatcttagcgaagaagaatacaagctgtacgaaagactatacggtcccccgctacgagagacacggccggaagatgtcggtgtgccaacacgcgagttccaagaggacatggaagaaatggaggacgacgaagagggagaatacttctacgacgaagacggcgaaatcctactgtatcggacgaaagatggcgagctacaggtggtgcaagaggcggccaatgatgtgctggggaagggtgcatccgaagaaccattagagtccgagctatctcctgaagcatcagacggagcaatcgagtcggcttcgcaggccgaagcagaattcgacgaactcccctccgaagctggtctccaccacatcaacgccgtcgctaagaaccaacgcgaatacaacgcacttctcaagttgcagaaggatttcgagaaggctgcgctacaagctcaagaagaaatcgcctacgacgaggaagaggaaccatttgaagaagaggaagatgtagaggaagaagacgaagacgagggagaaccagatgccgaattcatggaacgcgccgaccgtgtccatgaattctccaagctcggtcattggaggacgagccctactactatccagctccccaaagctgattttgttgctcccataacgacactactacaacgtaccgacacgaagcacatcagagaggctgccgagagcatatttggaggagccggtttgccattctccgtcacaacccccaccgacaagcgcaaaggcggccaagtcggacttcctatgctagccacgcaccataagatgtcacagatcgatgccgacgtcttcatggccacgacgctccccggcatgtacgcatcgaccatgagcattctagtcgaggttcggaaacgtcttggcactgactggatgaccaagctcatgtcgcgtaacaagggcgaggggccacgtgtactggatgtaggcggtggcggagctggattggcagcttgggaacaggtactacaagccgaatgggacattgcacgagaagaaggaagagcaaagagaatattgctaccaccgggcaagaagactgtagtcgtgggctccgagactttacggcaacgcatctcaagattcctccacaatactactttcctcccacgactcccggattacttgcattccggtgcccaccccgataagttggacggaggcgaggcaaacttgccaagaaagcaattcgacatcatcatcgcgtctcatactttactacctatcaaagaaggctacaggcgcaaagcaatgatagagaacctgtgggagatgttgtcaccagaaggtggcatcctcatcataatggagaagggtcatccccgaggatttgaagcagttgcagatgttcgcgctaatcttctcgacgagttcattgtctcaccttcttcggacccacggccggaagctattgaggtagagaacaggcgtgagcgcgagccaggtatgatcatcgcaccatgcacgaaccataaagcttgtcccatgtacttgacacctggtctctccggaggacggaaggacttctgccactttagtcaacgttttatccgcccgccgtttttacagagactgcttggcgcgacacacaagaaccacgatgatgtagatttcagcttcatcgccgtgcaacgtggagcactacgtggcgttgatgagtcagcgctatttgatcagggtaccgaggccgctgacaaggcattccaaggcttcgaaaaatcatcagaagcacccgatcccttttgcctcccccgcacagtcctgccacccatcaagcgccaaggccacgtaacattcgacatgtgtacaccagctggaaaactcgagcgctggacagtgcctaagagtttcagcaagacagcgtatcgcgatgcgcggaaagcccgatggggtgatctttgggctcttggtgctaagactagagtcgtgagacctgttcgtctcggaaagggcggcccggcgccgaatgatggtggtgttagagcgaggagagcggcggcggcgaataagatgcggaagatcaatattaatgctgactcgggcggtgcttatagtgctacggagagcaggagacgggatcctgagaggaggaagggaaataggggacggccgaagagtgttatggaggagttgggcattgaggcacattag

SEQ ID NO: 34092 - protein, 746 aa, Muscodor strobelii
  misc_feature: SGI Peptide ID NO. 571773
  misc_feature (288)..(665): Pfam Id: PF09243 Pfam Desc: Mitochondrial small ribosomal subunit Rsm22
  misc_feature (611)..(665): Pfam Id: PF09243 Pfam Desc: Mitochondrial small ribosomal subunit Rsm22
  misc_feature (427)..(485): Pfam Id: PF09243 Pfam Desc: Mitochondrial small ribosomal subunit Rsm22
  misc_feature (1)..(744): NCBI GI: 116192927 Blast Desc: CHGG_06181 [Chaetomium globosum CBS 148.51] gi|88182094|gb|EAQ89562.1| CHGG_06181 [Chaetomium globosum CBS 148.51]
  misc_feature (1)..(742): NCBI GI: 171684079 Blast Desc: protein product [Podospora anserina] gi|170942000|emb|CAP67652.1| protein product [Podospora anserina]
  misc_feature (2)..(746): NCBI GI: 85074743 Blast Desc: NCU00599 [Neurospora crassa OR74A] gi|28927552|gb|EAA36503.1| [Neurospora crassa OR74A] gi|38567308|emb|CAE76596.1| conserved [Neurospora crassa]
  misc_feature (1)..(733): NCBI GI: 145609908 Blast Desc: MGG_12571 [Magnaporthe grisea 70-15] gi|145017296|gb|EDK01659.1| MGG_12571 [Magnaporthe grisea 70-15]
  misc_feature (1)..(733): NCBI GI: 149210327 Blast Desc: MGCH7_ch7g641 [Magnaporthe grisea 70-15] gi|86196596|gb|EAQ71234.1| MGCH7_ch7g641 [Magnaporthe grisea 70-15]
  misc_feature (1)..(682): NCBI GI: 154321776 Blast Desc: BC1G_01035 [Botryotinia fuckeliana B05.10] gi|150850282|gb|EDN25475.1| BC1G_01035 [Botryotinia fuckeliana B05.10]
  misc_feature (1)..(736): NCBI GI: 256727089 Blast Desc: NECHADRAFT_103523 [Nectria haematococca mpVI 77-13-4]
  misc_feature (1)..(729): NCBI GI: 46135863 Blast Desc: FG09447.1 [Gibberella zeae PH-1]
  misc_feature (2)..(687): NCBI GI: 169595178 Blast Desc: SNOG_00323 [Phaeosphaeria nodorum SN15] gi|111070698|gb|EAT91818.1| SNOG_00323 [Phaeosphaeria nodorum SN15]
  misc_feature (171)..(711): NCBI GI: 212543085 Blast Desc: 37S ribosomal protein Rsm22 [Penicillium marneffei ATCC 18224] gi|210066604|gb|EEA20697.1| 37S ribosomal protein Rsm22 [Penicillium marneffei ATCC 18224]
  misc_feature: Useful for introducing or modulating the production of volatile compounds
MEAIVRQARVTFGDTLPKGYLSEEEYKLYERLYGPPLRETRPEDVGVPTREFQEDMEEMEDDEEGEYFYDEDGEILLYRTKDGELQVVQEAANDVLGKGASEEPLESELSPEASDGAIESASQAEAEFDELPSEAGLHHINAVAKNQREYNALLKLQKDFEKAALQAQEEIAYDEEEEPFEEEEDVEEEDEDEGEPDAEFMERADRVHEFSKLGHWRTSPTTIQLPKADFVAPITTLLQRTDTKHIREAAESIFGGAGLPFSVTTPTDKRKGGQVGLPMLATHHKMSQIDADVFMATTLPGMYASTMSILVEVRKRLGTDWMTKLMSRNKGEGPRVLDVGGGGAGLAAWEQVLQAEWDIAREEGRAKRILLPPGKKTVVVGSETLRQRISRFLHNTTFLPRLPDYLHSGAHPDKLDGGEANLPRKQFDIIIASHTLLPIKEGYRRKAMIENLWEMLSPEGGILIIMEKGHPRGFEAVADVRANLLDEFIVSPSSDPRPEAIEVENRREREPGMIIAPCTNHKACPMYLTPGLSGGRKDFCHFSQRFIRPPFLQRLLGATHKNHDDVDFSFIAVQRGALRGVDESALFDQGTEAADKAFQGFEKSSEAPDPFCLPRTVLPPIKRQGHVTFDMCTPAGKLERWTVPKSFSKTAYRDARKARWGDLWALGAKTRVVRPVRLGKGGPAPNDGGVRARRAAAANKMRKININADSGGAYSATESRRRDPERRKGNRGRPKSVMEELGIEAH

SEQ ID NO: 34093 - DNA, 2841 bp, Muscodor strobelii
  misc_feature: SGI EST ID NO. CUFF.80691.0
  misc_feature: Variant of the nucleotide sequence at SEQ ID NO 34091
ccgggacaaatgatgaaatgcacgaatcactggatgccgatttcatagcttgacagctttgccttcaacttatgaaacctccaattcttgtatcgcgaacacaatgttgtcagctgcgagagctcagagggcgtgtccaagatgtaggcaccagcttttgaatttactagaaaccggctttgcccctgttcgccacgacgctgcggccttctctacatcgcgacggttcgcaacaacctcgacgtcctcatccctccgagttacaaattcgaggtcacgatgtttttccaccaccgcttcgagactccaagagccccataacgaattacctccatctaaaaacgaatcagatattcctccatcgatacagcaagatgtcgagacagccgaaccccaagatatggaagccatagtacggcaggcaagagtcactttcggcgacacattacccaaaggctatcttagcgaagaagaatacaagctgtacgaaagactatacggtcccccgctacgagagacacggccggaagatgtcggtgtgccaacacgcgagttccaagaggacatggaagaaatggaggacgacgaagagggagaatacttctacgacgaagacggcgaaatcctactgtatcggacgaaagatggcgagctacaggtggtgcaagaggcggccaatgatgtgctggggaagggtgcatccgaagaaccattagagtccgagctatctcctgaagcatcagacggagcaatcgagtcggcttcgcaggccgaagcagaattcgacgaactcccctccgaagctggtctccaccacatcaacgccgtcgctaagaaccaacgcgaatacaacgcacttctcaagttgcagaaggatttcgagaaggctgcgctacaagctcaagaagaaatcgcctacgacgaggaagaggaaccatttgaagaagaggaagatgtagaggaagaagacgaagacgagggagaaccagatgccgaattcatggaacgcgccgaccgtgtccatgaattctccaagctcggtcattggaggacgagccctactactatccagctccccaaagctgattttgttgctcccataacgacactactacaacgtaccgacacgaagcacatcagagaggctgccgagagcatatttggaggagccggtttgccattctccgtcacaacccccaccgacaagcgcaaaggcggccaagtcggacttcctatgctagccacgcaccataagatgtcacagatcgatgccgacgtcttcatggccacgacgctccccggcatgtacgcatcgaccatgagcattctagtcgaggttcggaaacgtcttggcactgactggatgaccaagctcatgtcgcgtaacaagggcgaggggccacgtgtactggatgtaggcggtggcggagctggattggcagcttgggaacaggtactacaagccgaatgggacattgcacgagaagaaggaagagcaaagagaatattgctaccaccgggcaagaagactgtagtcgtgggctccgagactttacggcaacgcatctcaagattcctccacaatactactttcctcccacgactcccggattacttgcattccggtgcccaccccgataagttggacggaggcgaggcaaacttgccaagaaagcaattcgacatcatcatcgcgtctcatactttactacctatcaaagaaggctacaggcgcaaagcaatgatagagaacctgtgggagatgttgtcaccagaaggtggcatcctcatcataatggagaagggtcatccccgaggatttgaagcagttgcagatgttcgcgctaatcttctcgacgagttcattgtctcaccttcttcggacccacggccggaagctattgaggtagagaacaggcgtgagcgcgagccaggtatgatcatcgcaccatgcacgaaccataaagcttgtcccatgtacttgacacctggtctctccggaggacggaaggacttctgccactttagtcaacgttttatccgcccgccgtttttacagagactgcttggcgcgacacacaagaaccacgatgatgtagatttcagcttcatcgccgtgcaacgtggagcactacgtggcgttgatgagtcagcgctatttgatcagggtaccgaggccgctgacaaggcattccaaggcttcgaaaaatcatcagaagcacccgatcccttttgcctcccccgcacagtcctgccacccatcaagcgccaaggccacgtaacattcgacatgtgtacaccagctggaaaactcgagcgctggacagtgcctaagagtttcagcaagacagcgtatcgcgatgcgcggaaagcccgatggggtgatctttgggctcttggtgctaagactagagtcgtgagacctgttcgtctcggaaagggcggcccggcgccgaatgatggtggtgttagagcgaggagagcggcggcggcgaataagatgcggaagatcaatattaatgctgactcgggcggtgcttatagtgctacggagagcaggagacgggatcctgagaggaggaagggaaataggggacggccgaagagtgttatggaggagttgggcattgaggcacattagtgtaaaggatatggtttataaaatatcgggatgggatgagacggaatgtgtataaaattgtatcatgcatattgagggcacttcagcataggacgatgtgagtctgtaggtgcatctgtagaatatttgtatcacctcacgaatgataatcaagttgtatacgttaactatacattagctacgtaccttttctcccacca

SEQ ID NO: 34094 - DNA, 1140 bp, Muscodor strobelii
  misc_feature: SGI cDNA ID NO. 571774
  misc_feature: Reduced expression when VOC is produced
  misc_feature: Encodes the peptide sequence at SEQ ID NO 34095
atgaagcctcccgtgcgtctagccctccggctagcaagtcggccatctcaatgcacagccaatccatcctttctctccacagcccgtaacatatccaccacacccgccacacccgcaacggtatcccccattcacggaacaggcccaccaccctcagcccccgagcctgcgcccgacagcgccgacgcacgcctctccaggcgcaagaaacaagccgagctactctccaaagcccaagaaatccgctcttcagcctcctccaaaaatccccagaaaacacccctatcccgccgtcgcttctggaaagacgttcacgtgaaagagctcgacggcgcattggaagtgcatctcgacacccgacctctgcgccggcccgacacaaaagaaatcatccgtctacctaattccaagcccttactagccgccgctctcgcactagaatgggacctcctagtctccgtccaacaagcctccaaacaccatctcatccccctaacctccctcatctgccgcgccctcgacatcgcagatgacgacgcaaaacgccaatcaaccgtcatcccctcagaaagcctgcgcacgggtatatcaaggatgttgatgcggtacctggacaccgactccctcctctgctgggcaccacccccacggtacggtcaagatgcgccagacaccgcaggacgcaatctacgcgatctacagaaagaagccgcggaggaagtcgtcggatacctgaccacgcacgtctggcccggtgtggagatcgagcctgtgctcgacgctgagagcattatgcctaagcggcagaaacctgagacgagacagatcattcagggctggataatggggcttgatgcttttgagctcgctggtcttgaacgggccgtgttggcgggcaaggggttgctaggtgctgtcagattgcttgttgagtggagtgagggattcgctggattggcgaagagtgatgggaggaagtttggggtcgaggaggcggctaggatggctagtattgaggttgattggcagattgggaattggggcgaggtggaggatacacatgatgtccagaaggaagacctcaggaggcagctgggtagtacggttttgcttgttagtggcatggggaaacgtgcttga

SEQ ID NO: 34095 - protein, 379 aa, Muscodor strobelii
  misc_feature: SGI Peptide ID NO. 571774
  misc_feature (81)..(249): Pfam Id: PF07542 Pfam Desc: ATP12 chaperone protein
  misc_feature (81)..(237): Pfam Id: PF07542 Pfam Desc: ATP12 chaperone protein
  misc_feature (1)..(377): NCBI GI: 46129312 Blast Desc: FG08841.1 [Gibberella zeae PH-1]
  misc_feature (23)..(376): NCBI GI: 164428513 Blast Desc: NCU00676 [Neurospora crassa OR74A] gi|157072176|gb|EAA36580.2| conserved [Neurospora crassa OR74A]
  misc_feature (1)..(377): NCBI GI: 171680119 Blast Desc: protein product [Podospora anserina] gi|170939686|emb|CAP64912.1| protein product [Podospora anserina]
  misc_feature (27)..(377): NCBI GI: 156056344 Blast Desc: SS1G_05525 [Sclerotinia sclerotiorum 1980] gi|154703308|gb|EDO03047.1| SS1G_05525 [Sclerotinia sclerotiorum 1980]
  misc_feature (1)..(374): NCBI GI: 39970631 Blast Desc: MGG_02782 [Magnaporthe grisea 70-15] gi|149210107|ref|XP_001522428.1| MGCH7_ch7g535 [Magnaporthe grisea 70-15] gi|86196490|gb|EAQ71128.1| MGCH7_ch7g535 grisea
  misc_feature (9)..(374): NCBI GI: 258564100 Blast Desc: conserved [Uncinocarpus reesii 1704] gi|237908302|gb|EEP82703.1| conserved [Uncinocarpus reesii 1704]
  misc_feature (9)..(374): NCBI GI: 119177617 Blast Desc: CIMG_07725 [Coccidioides immitis RS]
  misc_feature (9)..(374): NCBI GI: 240107619 Blast Desc: ATP12 ATPase family protein [Coccidioides posadasii C735 delta SOWgp]
  misc_feature (64)..(374): NCBI GI: 169598848 Blast Desc: SNOG_02231 [Phaeosphaeria nodorum SN15] gi|160704480|gb|EAT90443.2| SNOG_02231 [Phaeosphaeria nodorum SN15]
  misc_feature (28)..(374): NCBI GI: 240281011 Blast Desc: ATP synthase F1 complex assembly factor 2 [Ajellomyces capsulatus H143]
  misc_feature: Useful for introducing or modulating the production of volatile compounds
MKPPVRLALRLASRPSQCTANPSFLSTARNISTTPATPATVSPIHGTGPPPSAPEPAPDSADARLSRRKKQAELLSKAQEIRSSASSKNPQKTPLSRRRFWKDVHVKELDGALEVHLDTRPLRRPDTKEIIRLPNSKPLLAAALALEWDLLVSVQQASKHHLIPLTSLICRALDIADDDAKRQSTVIPSESLRTGISRMLMRYLDTDSLLCWAPPPRYGQDAPDTAGRNLRDLQKEAAEEVVGYLTTHVWPGVEIEPVLDAESIMPKRQKPETRQIIQGWIMGLDAFELAGLERAVLAGKGLLGAVRLLVEWSEGFAGLAKSDGRKFGVEEAARMASIEVDWQIGNWGEVEDTHDVQKEDLRRQLGSTVLLVSGMGKRA

SEQ ID NO: 34096 - DNA, 1525 bp, Muscodor strobelii
  misc_feature: SGI EST ID NO. CUFF.80697.0
  misc_feature: Variant of the nucleotide sequence at SEQ ID NO 34094
cggcatgtgtctaccgcaaactcgcctcattccatcacacaccaccacaagaatgaagcctcccgtgcgtctagccctccggctagcaagtcggccatctcaatgcacagccaatccatcctttctctccacagcccgtaacatatccaccacacccgccacacccgcaacggtatcccccattcacggaacaggcccaccaccctcagcccccgagcctgcgcccgacagcgccgacgcacgcctctccaggcgcaagaaacaagccgagctactctccaaagcccaagaaatccgctcttcagcctcctccaaaaatccccagaaaacacccctatcccgccgtcgcttctggaaagacgttcacgtgaaagagctcgacggcgcattggaagtgcatctcgacacccgacctctgcgccggcccgacacaaaagaaatcatccgtctacctaattccaagcccttactagccgccgctctcgcactagaatgggacctcctagtctccgtccaacaagcctccaaacaccatctcatccccctaacctccctcatctgccgcgccctcgacatcgcagatgacgacgcaaaacgccaatcaaccgtcatcccctcagaaagcctgcgcacgggtatatcaaggatgttgatgcggtacctggacaccgactccctcctctgctgggcaccacccccacggtacggtcaagatgcgccagacaccgcaggacgcaatctacgcgatctacagaaagaagccgcggaggaagtcgtcggatacctgaccacgcacgtctggcccggtgtggagatcgagcctgtgctcgacgctgagagcattatgcctaagcggcagaaacctgagacgagacagatcattcagggctggataatggggcttgatgcttttgagctcgctggtcttgaacgggccgtgttggcgggcaaggggttgctaggtgctgtcagattgcttgttgagtggagtgagggattcgctggattggcgaagagtgatgggaggaagtttggggtcgaggaggcggctaggatggctagtattgaggttgattggcagattgggaattggggcgaggtggaggatacacatgatgtccagaaggaagacctcaggaggcagctgggtagtacggttttgcttgttagtggcatggggaaacgtgcttgaatatgatgggttgagatgtaagtttgtggagggttgaggatgtgtatatgattgtaatgatatgtggtcgtgtataaacaccgatgaagatcgatccgccgtttgctgaggtacaggtctggtaccattctgagctttgattgtttcacgatttcaaaagcgtgaggctaagctgatgggtgtgaggaatcgacattgacacatgttcgtacagggaagtcacagtatcagatttagtggccaaagagcgagcgggatattgagtattagtgaatagctagatctggtctgctattgtagtcctggagcgtcctaaatcatgtcctgtttccc

SEQ ID NO: 34097 - DNA, 339 bp, Muscodor strobelii
  misc_feature: SGI cDNA ID NO. 571775
  misc_feature: Encodes the peptide sequence at SEQ ID NO 34098
atgcacgcctactcttcagccaccctcactgtcattcttggctgcctcacactcaccactgccacgcccacgtctggcgatagcaagatgttgcaggctcgtaccctcacacttggcagtattgacgtcaacgctgcttgccaattagaagccggcggcgattactcggccgtggcagccggtagtggctgtgatgactggcagtgtgtaagcagcagcggcggctcaacaactggcgtcaacatgaacgctgcttgcgtcgcacagtataaccagccaagtgcctactcatcctgctctggcggcgtttacaactgggtgtgcaaggaagatgtttga

SEQ ID NO: 34098 - protein, 112 aa, Muscodor strobelii
  misc_feature: SGI Peptide ID NO. 571775
  misc_feature (33)..(110): NCBI GI: 171677684 Blast Desc: protein product [Podospora anserina] gi|170936910|emb|CAP61569.1| protein product [Podospora anserina]
MHAYSSATLTVILGCLTLTTATPTSGDSKMLQARTLTLGSIDVNAACQLEAGGDYSAVAAGSGCDDWQCVSSSGGSTTGVNMNAACVAQYNQPSAYSSCSGGVYNWVCKEDV

SEQ ID NO: 34099 - DNA, 345 bp, Muscodor strobelii
  misc_feature: SGI cDNA ID NO. 571776
  misc_feature: Encodes the peptide sequence at SEQ ID NO 34100
atgatgccttcccactccactatcatgggcgctattgccagcatcgtccttttcgccagctccacaggcgccctaaccttgcctcgaggtgatagcacagtggacacaagctcactcgccaagagaactacctctggagttgatatgaacgcagcctgtgcggcagagtacggctcgacttggtcagcctacgccaatggagatggttgcaatgactgggtgtgcctgaacagcgcaggtcagtcgcaaggagtcaatgtcgctacatactgctactccaacttcggcatcgacgcctacgcgtcgtgcagcggtggtgtctataattgggtgtgcaactactga

SEQ ID NO: 34100 - protein, 114 aa, Muscodor strobelii
  misc_feature: SGI Peptide ID NO. 571776
  misc_feature (1)..(113): NCBI GI: 171690680 Blast Desc: protein product [Podospora anserina] gi|170945288|emb|CAP71400.1| protein product [Podospora anserina]
  misc_feature (39)..(113): NCBI GI: 171677684 Blast Desc: protein product [Podospora anserina] gi|170936910|emb|CAP61569.1| protein product [Podospora anserina]
MMPSHSTIMGAIASIVLFASSTGALTLPRGDSTVDTSSLAKRTTSGVDMNAACAAEYGSTWSAYANGDGCNDWVCLNSAGQSQGVNVATYCYSNFGIDAYASCSGGVYNWVCNY

SEQ ID NO: 34101 - DNA, 552 bp, Muscodor strobelii
  misc_feature: SGI cDNA ID NO. 571777
  misc_feature: Encodes the peptide sequence at SEQ ID NO 34102
atgcattactcttccctactttcaatcctctccctagccctggctggctctgcgcagaccagagtcgttcttcctggtagtgagagcagagacgttgagcatgcctcccgctctgcccaagccgagatctaccggatcaacaaatttgccatcatgaacggaacccatcttcaattcgaaccacttgacggcgctctcgacaagacgaccgccaacccagagtggcaagccgagtatatcaagagccttgcggccgagatcaaggagttctacgcgccggagaccaaccagcttgtgaagaaagatggtgacatggcccagagtggtcccacctgtctcgcttgcgtggtggctgggatggctcctacttacaacgctggcggatcgacgacaagactggccgccttcaatggttgtgctgccgcctgtgtcacctacagctttcaagcttttcaatctggctggaagactttctggccgttggctggcttgggagacatggaagcagataactacaactgggatgtgtggtcagcttttggttggtcgtaa

SEQ ID NO: 34102 - protein, 183 aa, Muscodor strobelii
  misc_feature: SGI Peptide ID NO. 571777
MHYSSLLSILSLALAGSAQTRVVLPGSESRDVEHASRSAQAEIYRINKFAIMNGTHLQFEPLDGALDKTTANPEWQAEYIKSLAAEIKEFYAPETNQLVKKDGDMAQSGPTCLACVVAGMAPTYNAGGSTTRLAAFNGCAAACVTYSFQAFQSGWKTFWPLAGLGDMEADNYNWDVWSAFGWS

SEQ ID NO: 34103 - DNA, 427 bp, Muscodor strobelii
  misc_feature: SGI EST ID NO. CUFF.80706.0
  misc_feature: Variant of the nucleotide sequence at SEQ ID NO 34101
tggtgacatggcccagagtggtcccacctgtctcgcttgcgtggtggctgggatggctcctacttacaacgctggcggatcgacgacaagactggccgccttcaatggttgtgctgccgcctgtgtcacctacagctttcaagcttttcaatctggctggaagactttctggccgttggctggcttgggagacatggaagcagataactacaactgggatgtgtggtcagcttttggttggtcgtaaggaggggcgcatccacggttttagcactggtgtccaagtttcatccggcccttctgctccccatcttttggcgagtaaaattgttgatccaattatccgggggtgaaatcagtgcttgtaccatagtcatctgtcaggaaacgagtgatttcaagatcttacagacgcgcttggcgttca

SEQ ID NO: 34104 - DNA, 630 bp, Muscodor strobelii
  misc_feature: SGI cDNA ID NO. 571778
  misc_feature: Encodes the peptide sequence at SEQ ID NO 34105
atggcagactcagcgcgacctcttaccaatggtgagaagtccgcacttctcctgaaagcctatttcccaaatgtggatgagtttctcctgaacactatcctcattgccagcggcggtgagatcttcacggctttcgacgctctacaatactacactgctggcgcggtctatgactatgctgcgcagccccaagaaaacgagcagggcgaacaagcacatgtcgacgatgttgcagagcatgccgccgaggcaaatgtgccgatcgagaaccaacaagaattagcccaacgacagcaacctacaactttcgtcaatgcattcaacgaacaacgacttgtgagaatccagcgcatcgccgccgatgttacaaaacaagaagtcgttgcagaacttcgccgagttcttggccaggagatcaccgtgtactggcctgcacttcccccacggcgccctggagtgcttcacagggccgtctgctatgtcgggtttccaaatacccaagttatgctttcgaaatggaccgcaatgcaagaaatgaaattcggccgtcgtaatcagtcaatagacgtcaaccagatacatcagataaacaacaccaatgttgagtctcatgttgacattggggattag

SEQ ID NO: 34105 - protein, 209 aa, Muscodor strobelii
  misc_feature: SGI Peptide ID NO. 571778
  misc_feature (6)..(48): NCBI GI: 256730568 Blast Desc: NECHADRAFT_30457 [Nectria haematococca mpVI 77-13-4]
MADSARPLTNGEKSALLLKAYFPNVDEFLLNTILIASGGEIFTAFDALQYYTAGAVYDYAAQPQENEQGEQAHVDDVAEHAAEANVPIENQQELAQRQQPTTFVNAFNEQRLVRIQRIAADVTKQEVVAELRRVLGQEITVYWPALPPRRPGVLHRAVCYVGFPNTQVMLSKWTAMQEMKFGRRNQSIDVNQIHQINNTNVESHVDIGD

SEQ ID NO: 34106 - DNA, 1740 bp, Muscodor strobelii
  misc_feature: SGI cDNA ID NO. 571779
  misc_feature: Encodes the peptide sequence at SEQ ID NO 34107
atgagtagcaactacgttcctcccttccgacgcggcgaggggttagccaactcagcccgcaatccgtcaaccacaactcagcgtggtggcaatagtcaacaccctttcaacaataacaacaactaccgcggtggtcaaggtggacgtgcaggtcgaggcggtcggggttaccaccgtggaggtcgcggaaatcagcgtggaggccgaggaggcaattacggcaacttcttccagaagaaacctcaagagccccaggtagacgaatcaaagctcgtacatcagcgagatatacagcatcattttgaggcagaagacgatgggagctatctcacccctcatagcacactcaatggttcaaaggaacatccggacgacttatcttacatgttgctctttcgtaacgcaaacccgcgttgggatagcaataagatcatcttcgcaaagtctaaccttgcactacttcccgattacgatgaccagaagaagaagaggggagtctggatcccacaggagatacttgatggaccaggcaaagatgcctccgaagccgttgagctcacaaaggaggatactgcgaccctaatgacaaacgcgtcatcagacactccggtccaaggtgaccaggttcatttgacagaacctgaaacggcactcaccactactctgacgactccgacgactatggtggcagcagcaacagatctcagtgctgaatgcgatgggggaaaatccaccactgccgaggttggctttagtgagcacgatgtcattaagatagagagcaaaactcatgaacaggacaaaattggagatgatgatactacagaagcagacattgtttctggtagggaccagcaacatgattcagcgcctactagtcagaacgagcagccatcaccacagagccgactgaaatacacagacattcgcctcatgcccgactatcagatggaatccgttcaaagaccttccgtagagaaatctatctacgctgatatcgcacccattgagtacgagccatctagttccattgcagtggctgtctttgaagagcaacgacctcctatgtcgctctctgcggccgccaagcttggtgcatggtttactttcggggggtggttcaaagtttcacgtgttaatatcctcgcgccgaattctaacgagcttgtgcgcatgctccagcagaaatgggagctccagggtggtggagggtcgagaactgcctccgcttggaagtcatcacttgaacatgaatgggctgtcataaagtttgaggcgcttgaaggcgagggaacactgcctgatccgcagatcgcaaaagtcgcagtaccagaaacggagagaaagggtgtcaatgagatgctcgcagaaatgcgaattaaggatgccgatgaagacccagtgcaaggccaaggcaccaatcatatgaagcaaggccctggaaccaggaactccgagcctggctgtttaccacaatgggttctcgaccaacgctgggatgatgaatctttgctcttagatgtctacaaggccgatactcttaaaggcagctcgtcggaacctgacccatccgacggacctcgatccgatctgcgagaaggtgacccagtcattgtgaacgaagtcttacgggatgtgaagtcggaagcggaaagtcatgtaggcgcgcgccaagaccggggcgtcagcgtgacggagcaggtcggcgccggttcagaagatgccgctctagacagttag

SEQ ID NO: 34107 - protein, 579 aa, Muscodor strobelii
  misc_feature: SGI Peptide ID NO. 571779
  misc_feature (88)..(156): NCBI GI: 258570873 Blast Desc: conserved [Uncinocarpus reesii 1704] gi|237904510|gb|EEP78911.1| conserved [Uncinocarpus reesii 1704]
MSSNYVPPFRRGEGLANSARNPSTTTQRGGNSQHPFNNNNNYRGGQGGRAGRGGRGYHRGGRGNQRGGRGGNYGNFFQKKPQEPQVDESKLVHQRDIQHHFEAEDDGSYLTPHSTLNGSKEHPDDLSYMLLFRNANPRWDSNKIIFAKSNLALLPDYDDQKKKRGVWIPQEILDGPGKDASEAVELTKEDTATLMTNASSDTPVQGDQVHLTEPETALTTTLTTPTTMVAAATDLSAECDGGKSTTAEVGFSEHDVIKIESKTHEQDKIGDDDTTEADIVSGRDQQHDSAPTSQNEQPSPQSRLKYTDIRLMPDYQMESVQRPSVEKSIYADIAPIEYEPSSSIAVAVFEEQRPPMSLSAAAKLGAWFTFGGWFKVSRVNILAPNSNELVRMLQQKWELQGGGGSRTASAWKSSLEHEWAVIKFEALEGEGTLPDPQIAKVAVPETERKGVNEMLAEMRIKDADEDPVQGQGTNHMKQGPGTRNSEPGCLPQWVLDQRWDDESLLLDVYKADTLKGSSSEPDPSDGPRSDLREGDPVIVNEVLRDVKSEAESHVGARQDRGVSVTEQVGAGSEDAALDS

SEQ ID NO: 34108 - DNA, 2361 bp, Muscodor strobelii
  misc_feature: SGI EST ID NO. CUFF.80727.0
  misc_feature: Variant of the nucleotide sequence at SEQ ID NO 34106
tgatacttacaaaaggagagcagaagcagaaagaagtgtcaggtaaggcagccgtgttgatgcgggagcgccttccacatgtcatcagctcttgtcaatattttagcatagctgatttggaaatttcaggtcgtggttgtcttgggcattgcgcgtttgtgctttgttgtggaaagagcaaacggttggcagccccacctctcaaacactctacctcgacttctcctccatctgaccgatcacctttcatcagcctaaaacgtgccatactctgggcacattatcgaaactgaaccaaatctactgtcacgaggttgcaaactgccaagctattcatcatgagtagcaactacgttcctcccttccgacgcggcgaggggttagccaactcagcccgcaatccgtcaaccacaactcagcgtggtggcaatagtcaacaccctttcaacaataacaacaactaccgcggtggtcaaggtggacgtgcaggtcgaggcggtcggggttaccaccgtggaggtcgcggaaatcagcgtggaggccgaggaggcaattacggcaacttcttccagaagaaacctcaagagccccaggtagacgaatcaaagctcgtacatcagcgagatatacagcatcattttgaggcagaagacgatgggagctatctcacccctcatagcacactcaatggttcaaaggaacatccggacgacttatcttacatgttgctctttcgtaacgcaaacccgcgttgggatagcaataagatcatcttcgcaaagtctaaccttgcactacttcccgattacgatgaccagaagaagaagaggggagtctggatcccacaggagatacttgatggaccaggcaaagatgcctccgaagccgttgagctcacaaaggaggatactgcgaccctaatgacaaacgcgtcatcagacactccggtccaaggtgaccaggttcatttgacagaacctgaaacggcactcaccactactctgacgactccgacgactatggtggcagcagcaacagatctcagtgctgaatgcgatgggggaaaatccaccactgccgaggttggctttagtgagcacgatgtcattaagatagagagcaaaactcatgaacaggacaaaattggagatgatgatactacagaagcagacattgtttctggtagggaccagcaacatgattcagcgcctactagtcagaacgagcagccatcaccacagagccgactgaaatacacagacattcgcctcatgcccgactatcagatggaatccgttcaaagaccttccgtagagaaatctatctacgctgatatcgcacccattgagtacgagccatctagttccattgcagtggctgtctttgaagagcaacgacctcctatgtcgctctctgcggccgccaagcttggtgcatggtttactttcggggggtggttcaaagtttcacgtgttaatatcctcgcgccgaattctaacgagcttgtgcgcatgctccagcagaaatgggagctccagggtggtggagggtcgagaactgcctccgcttggaagtcatcacttgaacatgaatgggctgtcataaagtttgaggcgcttgaaggcgagggaacactgcctgatccgcagatcgcaaaagtcgcagtaccagaaacggagagaaagggtgtcaatgagatgctcgcagaaatgcgaattaaggatgccgatgaagacccagtgcaaggccaaggcaccaatcatatgaagcaaggccctggaaccaggaactccgagcctggctgtttaccacaatgggttctcgaccaacgctgggatgatgaatctttgctcttagatgtctacaaggccgatactcttaaaggcagctcgtcggaacctgacccatccgacggacctcgatccgatctgcgagaaggtgacccagtcattgtgaacgaagtcttacgggatgtgaagtcggaagcggaaagtcatgtaggcgcgcgccaagaccggggcgtcagcgtgacggagcaggtcggcgccggttcagaagatgccgctctagacagttagtcaacgaataggccttgagcagtgcttgaaaatgaaggcttgagagtgataagagggagttggacgatgtttcattgtagccgcgaaatggctattagaacacgctgtaggaatcgccggcgaggacgacaggatgcaaaaaaggaggccggaaggagacttgagggtttagccactgatgtgtttagtgccgtatcaggaactattattactctgtcctatgcctacctattgtgcgtgaattacctaatgaacggttcgagtatctaactttgcgtgttgg

SEQ ID NO: 34109 - DNA, 2196 bp, Muscodor strobelii
  misc_feature: SGI cDNA ID NO. 571780
  misc_feature: Encodes the peptide sequence at SEQ ID NO 34110
atgccagatccgaaggagccgcaaatttctgcctcattcataagtcatctgcggcaggcagcccgcttatcttgtcctatatcaggttgtggggaaacgatcccttcaattgatgatcggatacgtgagcatttacagtcacagcactcccaatacgtaaaaggaaatatcgataatatcgttcgtgatttgaaacgtggtcgaacacctcaaggcttgagtcaggagcaatctacacaggacatttcatctgtagcccattttgaatctacagaggatggtgcttcaagtactaataagaggagatcgcctaccacggctataagagcaagatctaatagtccagtacgacggtctcgggcgcgtcctccacaacatactactggggaagatccagactttttaaaaagagtaccgcagcaagggaaactttggaatccagagcaagatacgtcgtcggctcgggcagctccatcatctaggtcttctaagaatgtggctcaacaaagaagagatgaagaccaagatgctttacggctcattaaacagcctgagacccggccaatcagccaggagcagttggtagccgaggtcaagggtatatatgctggcctcgttatggtcgagtccaaatgcatcgaagttgataatgctcaatcatctaacagtgataccaagttgaataatgagcaatggcaggctcttatagcattacatcggactctgctacacgaacatcatgatttctttttagcatctcaacatccgtctgcgagtcaagctttaagacgtttagcatctaagtatgccatgcccgcgaggatgtggcgtcacggcatccatagcttccttgaattgcttcgtcaccgtttgcccgcgtctttagaacacatgctcacgttcatttacttggcatactcaatgatggctcttttatacgaaacagtgccggcctttgaagacacttggatcgaatgtttaggagatttaggtcgatatcgaatggcaatagaggatgaagatataagagaccgagaagtctggacttctgtgtcgaggcattggtactcgcgagcgtctgataaggcgccaacgacaggacgtttatatcaccatcttgctatattagcgcgtccagttgcgttgcagcagcttttctactacgcgaagtccctgtgcgtaccaatcccttttggttctgctcgggaatctatcatgacattattcgaacccatcttaaatgtgagtggctacgaccatgctcgccttattcctatcgatgttgcttttgtcaaagcgcatggtatcctctttagtcagaagttccaagatgactatcgacctgcggtgaacgaattcctcaaccttcttaatggacacatcggtaggactacaagaaggtggatggagtcgggctattacattgggatcgccaactgttgtgccttactgtcgtatggcaaggaagaaaacgtgatcatgagatcaatccaaaacttcagcgaagagactgcgaaccgaactgagctcacgacagccgcgaagctatcttctgacttcgaggaagctctttacctcgtaacaggaactcacgaagtcgtgttccgaagacttggtgatcctaacgttctgccttatgttcatgtcataatcgtcttcatgtcttacgtctcaagatttcctaacgccatggcttatctcgagaaacgctttccatggaagtgggtttctatgatcctcaattctcttcttgtctcgtaccaggactacaaacgtatcaagagcaaggattttcccagggagagcgaggaagcgcctcggccattgcccgaggatttcgcgttgaaaggactgttgtgggttgatcattactatcctgccgattggttttctaacgacaagatcgacgatgatgagaaatatttcgaaatgccttctatgacggatattcgaaaggaaagaattctctggctcgcgtatcgaatagcgcaagcaggaaaggggctggtctacgacgagatgctcaaccaatttggtgtgacgcctgagtatgagcaggcaattgacgagatcgccaaggacgcagacatgatgaatatctcggatgcaccagatgctggttctcaaacgccgaccttcgcattcgaaggacaaattggagatactatggatgttgacgaggatgcaaggcaatga

SEQ ID NO: 34110 - protein, 731 aa, Muscodor strobelii
  misc_feature: SGI Peptide ID NO. 571780
  misc_feature (109)..(691): NCBI GI: 256727644 Blast Desc: NECHADRAFT_66648 [Nectria haematococca mpVI 77-13-4]
  misc_feature (75)..(685): NCBI GI: 46135793 Blast Desc: FG09412.1 [Gibberella zeae PH-1]
  misc_feature (131)..(710): NCBI GI: 171683933 Blast Desc: protein product [Podospora anserina] gi|170941927|emb|CAP67579.1| protein product [Podospora anserina]
  misc_feature (96)..(709): NCBI GI: 164428463 Blast Desc: NCU00611 [Neurospora crassa OR74A] gi|157072156|gb|EAA36515.2| conserved [Neurospora crassa OR74A]
  misc_feature (103)..(727): NCBI GI: 261353274 Blast Desc: conserved [Verticillium albo-atrum VaMs.102]
  misc_feature (102)..(708): NCBI GI: 116192981 Blast Desc: CHGG_06208 [Chaetomium globosum CBS 148.51] gi|88182121|gb|EAQ89589.1| CHGG_06208 [Chaetomium globosum CBS 148.51]
  misc_feature (180)..(680): NCBI GI: 156050837 Blast Desc: SS1G_08006 [Sclerotinia sclerotiorum 1980] gi|154692406|gb|EDN92144.1| SS1G_08006 [Sclerotinia sclerotiorum 1980]
  misc_feature (88)..(680): NCBI GI: 156058500 Blast Desc: SS1G_03262 [Sclerotinia sclerotiorum 1980] gi|154701049|gb|EDO00788.1| SS1G_03262 [Sclerotinia sclerotiorum 1980]
  misc_feature (78)..(680): NCBI GI: 119181765 Blast Desc: CIMG_05962 [Coccidioides immitis RS]
  misc_feature (78)..(663): NCBI GI: 240109047 Blast Desc: CPC735_025520 [Coccidioides posadasii C735 delta SOWgp]
MPDPKEPQISASFISHLRQAARLSCPISGCGETIPSIDDRIREHLQSQHSQYVKGNIDNIVRDLKRGRTPQGLSQEQSTQDISSVAHFESTEDGASSTNKRRSPTTAIRARSNSPVRRSRARPPQHTTGEDPDFLKRVPQQGKLWNPEQDTSSARAAPSSRSSKNVAQQRRDEDQDALRLIKQPETRPISQEQLVAEVKGIYAGLVMVESKCIEVDNAQSSNSDTKLNNEQWQALIALHRTLLHEHHDFFLASQHPSASQALRRLASKYAMPARMWRHGIHSFLELLRHRLPASLEHMLTFIYLAYSMMALLYETVPAFEDTWIECLGDLGRYRMAIEDEDIRDREVWTSVSRHWYSRASDKAPTTGRLYHHLAILARPVALQQLFYYAKSLCVPIPFGSARESIMTLFEPILNVSGYDHARLIPIDVAFVKAHGILFSQKFQDDYRPAVNEFLNLLNGHIGRTTRRWMESGYYIGIANCCALLSYGKEENVIMRSIQNFSEETANRTELTTAAKLSSDFEEALYLVTGTHEVVFRRLGDPNVLPYVHVIIVFMSYVSRFPNAMAYLEKRFPWKWVSMILNSLLVSYQDYKRIKSKDFPRESEEAPRPLPEDFALKGLLWVDHYYPADWFSNDKIDDDEKYFEMPSMTDIRKERILWLAYRIAQAGKGLVYDEMLNQFGVTPEYEQAIDEIAKDADMMNISDAPDAGSQTPTFAFEGQIGDTMDVDEDARQ

SEQ ID NO: 34111 - DNA, 8158 bp, Muscodor strobelii
  misc_feature: SGI EST ID NO. CUFF.81643.2
  misc_feature: Variant of the nucleotide sequence at SEQ ID NO 34109
cttggaatggactggatggacgagtttgacttgaaaatgttaaggagaactggcaaggtacattctaaagtagggcgactattatgtgagggactgggttcaaagatcgacgatgttagattcatcctgatacaaaaatgtgtcaagcctgagcactaattcccatgattagattgagaaagaactatcctaccatgatgaaaccattcgcggattatcttgctactaagcgcatagcgcaatgtccaacaggtcttgtttaacatcatatgcagaggagcaagttgacgtagatatcctacattatggaaagccaaggctgaaaaaagacatttagaaaataactgggattatataggacgtacgtgtaatatagattagatatatttattttccctttacagtaccatacactgtgctagttactagatcacataacatagataggtatgtctattgttaccacgaaccaccgccagccggagtgcattgaagcgacttggacagacagagagtgaggcccaacctcagaattagcactcacgggtgtcaactttcttttgattcacgagtgatttgccgccgcattaaaatagaaactttgagatgatctacacatatatcgtatggtagactagaactgtcaagcgcttgtcaacccagtcttcagccagcattcttgtcaacaactttgtggtcaggtacatcaaggtgtcaagtctacatgttcaacattccattgcatttgctctgattatctcgcaagttagtttggtgttgtatcgttgggttgcctcctcgggttgcctcgtaattatcgaatatcaatggagactgtatatgtgagaattcgttccggctgttgccttgtatcctgagatagggcgcgtagtcccagaatgaccctaacgactatttctacaccagtcatatctctcaagttgtgtagcataacaaatgcagctgaacccctagcaaagccacattgatgacgtgaacctgtaagagagatcggtaagcaacctgggagacgtagcagtgctgaggcgatcgtttccaatcgattccaatgacagagctttgtttgtcccacgggaccaagaatagtggtcaatatatgccaggagcgtctgttccaatctcaccattggagaaagctcagacaagtggaaagcgattcgctggggagcgacaaagctgatctccgatcatgacgatagtcggtgaagaattttcttgcaggtaatctgatcgtcaagagtaaaccatcgggagtgatataagctcgcgaataaaactgcgaggaccaatactttgacataagtactggatggtccaagcgatacagaagccattggttgcaaagaaatcgccactgttaagtaatcccacccactaggtaaccagtccaaatcgacaacgaatctaggtcgtatgcgcaccgcattgtggatgtgtgaagattttgatgctagctcaggagtcgtctattgaccaatttcgccgaaatggtagctgcacgccaaactttccaaacgcgagcatcggatacgaagtagagcatcccactcagctatgaactgaggcgatagtgacaaattggattgctcactataattgccactcgagtcctgcagaatctgttagactgcgtcgttgcggattctcctatccagctcaccgctctctcagagagggagccctcattgattaaggcgcctgtctttgctctgggaattagtagtcatttgaatattttcgtttcttgaaatgaagaaggatctgtactggcgagatgtcgccacggagcggataggccgaggttgctgtcgtatagtcgcagtggctgtcgaggctgtgtttattggccacaccggcgatctccgatcacgaagtcccacctgtgcagtcgaccttcaagatttctggcgaccagaagtctcgtaacggccatcatacgttattgcaatggaatggcacgacaatggcgagagcgagacagtcgacagaatcaatcgatatatatgcaacgtcttgcctttctctgttgataagtatctcaccagttgcggcaataccattggaagctgaccggacaagcgcgcgttcggagcagatatctgtcgacctgttcacaacgacagcaactgactcgtgactttcactgagcccccatattctgtctctggtagaatgcaaccatatacgaatccaggcagcgtagtacaatgcaattacgcataatatgagacgaggcggctctcctcttcgtcaaggcttgagccagatccgaaatgaaaatgaatcctgaccagatcttatgacaaaacgagacactgtagtccgagacagtcgtgtcagagtacgccacagaaggaaatggataagatcattgatgatatgacaagtggtagttatatgaaagccaagtgggggttgatgttgaaagcaaagagtgccacttcttatctgctgcctaacaactgtgataaactacctgggaagtgggtgacaagttcgaacactaaatggtcacaaggaacttgacatatcaaaccaagagacgttggcctacgttaatcacgcttcataggaatgaagcaaattacccgcctccgaacctgttccgagaaagttaatgctactctgagttagctattaatattactattaccgtaactagaaatgctgacgttcagtgggtcgcgacaggcagggtcagaggcagggcgagttgcctcgaatgctaggcccctagaatcttacaaaaacgtggaaaggccaatggtagattgtacagtaggacagtagggatcttcggtgaagaactacgtatcactgttgccgacatgggctaaatcttccaactgtatcactaaggactgtttcgacaccatccaagcatcgacagaactaactgcgtgtccgcggcctacatatctggtcgggccactgtaacccggttgctatcactttgttgataatcagttatggccagacaactatcttgcatcattaccttgccaaactcggctgaacgctgctatgtcttctgcgttgtgtaattaccgtccggagtctccattttcggtgaagctgtcctacgggtgatggttacagtctgtatgcccagtttctttacgactgaactctccccatgttctactccacgagctacacgaggctgcgacgagatatcgcgtttcaataacaagaactggacctgttgccctgtcactatcacgatcgcctgatattgctcttgttgatcttgccgaaacgagggacccgacgatacagtggctagtgttgcaatctatcgcgactggacgtagacggcatggggttcaacgcgagaggcggtttaacggtcatccaggaggttggttatgacgatgatgatgatgacgatgacggtgagctacagtatatggccgcgactttgaggcgatattgcattgtcgtggttatcggtttcttcgagtaggggtttggacgtgtccaagacatatgcacatggaagagaattgagtgaaaatttggagggtatgtgaaaaccccactttcggtcgggcgcggacaacaggattgcggctcttggttgcctacatcccaaaatggaatagtctgcaagtactttaaaataaatgacacaagccatctgcaccactgccatgtagtgaaagcaaggcgacaaagccgctgtacttgcggcctacaaaaatacatattcccgaagtattcttttgtatacgccctgaagttcaagtaaatttaggattcccacccaaagcgaccgggcactaaggcgtccagacgcgaatgagtccacagttgccttatttatctcacattataagttctatgttaaccaaggtaaagcgtattcagcggcatcgcttcatttttcaagtacggacatccaaatggcaccagcaacacgtcttgctacataaccatcacaatacaacaagctttcctgtgtggaaatgactgccggctttgtcaaatcagaagctactgctccgtttgctccgagatttctgggccgcggctctaattctgtcttcgtttgaggcgacagaccaacgttaggcaggcttcgtcctgtcatcaaaagtctgccgtgctatctgcaggcagcaaatctttacgtttagcatattgcaacgtgggcggacactatatttgtcctcaaattagctttagatcttgttcgatctgttctcaacttcacgttttctttcatcgtatttcagaaaagtcaaaatgccagatccgaaggagccgcaaatttctgcctcattcataagtcatctgcggcaggcagcccgcttatcttgtcctatatcaggttgtggggaaacgatcccttcaattgatgatcggatacgtgagcatttacagtcacagcactcccaatacgtaaaaggaaatatcgataatatcgttcgtgatttgaaacgtggtcgaacacctcaaggcttgagtcaggagcaatctacacaggacatttcatctgtagcccattttgaatctacagaggatggtgcttcaagtactaataagaggagatcgcctaccacggctataagagcaagatctaatagtccagtacgacggtctcgggcgcgtcctccacaacatactactggggaagatccagactttttaaaaagagtaccgcagcaagggaaactttggaatccagagcaagatacgtcgtcggctcgggcagctccatcatctaggtcttctaagaatgtggctcaacaaagaagagatgaagaccaagatgctttacggctcattaaacagcctgagacccggccaatcagccaggagcagttggtagccgaggtcaagggtatatatgctggcctcgttatggtcgagtccaaatgcatcgaagttgataatgctcaatcatctaacagtgataccaagttgaataatgagcaatggcaggctcttatagcattacatcggactctgctacacgaacatcatgatttctttttagcatctcaacatccgtctgcgagtcaagctttaagacgtttagcatctaagtatgccatgcccgcgaggatgtggcgtcacggcatccatagcttccttgaattgcttcgtcaccgtttgcccgcgtctttagaacacatgctcacgttcatttacttggcatactcaatgatggctcttttatacgaaacagtgccggcctttgaagacacttggatcgaatgtttaggagatttaggtcgatatcgaatggcaatagaggatgaagatataagagaccgagaagtctggacttctgtgtcgaggcattggtactcgcgagcgtctgataaggcgccaacgacaggacgtttatatcaccatcttgctatattagcgcgtccagttgcgttgcagcagcttttctactacgcgaagtccctgtgcgtaccaatcccttttggttctgctcgggaatctatcatgacattattcgaacccatcttaaatgtgagtggctacgaccatgctcgccttattcctatcgatgttgcttttgtcaaagcgcatggtatcctctttagtcagaagttccaagatgactatcgacctgcggtgaacgaattcctcaaccttcttaatggacacatcggtaggactacaagaaggtggatggagtcgggctattacattgggatcgccaactgttgtgccttactgtcgtatggcaaggaagaaaacgtgatcatgagatcaatccaaaacttcagcgaagagactgcgaaccgaactgagctcacgacagccgcgaagctatcttctgacttcgaggaagctctttacctcgtaacaggaactcacgaagtcgtgttccgaagacttggtgatcctaacgttctgccttatgttcatgtcataatcgtcttcatgtcttacgtctcaagatttcctaacgccatggcttatctcgagaaacgctttccatggaagtgggtttctatgatcctcaattctcttcttgtctcgtaccaggactacaaacgtatcaagagcaaggattttcccagggagagcgaggaagcgcctcggccattgcccgaggatttcgcgttgaaaggactgttgtgggttgatcattactatcctgccgattggttttctaacgacaagatcgacgatgatgagaaatatttcgaaatgccttctatgacggatattcgaaaggaaagaattctctggctcgcgtatcgaatagcgcaagcaggaaaggggctggtctacgacgagatgctcaaccaatttggtgtgacgcctgagtatgagcaggcaattgacgagatcgccaaggacgcagacatgatgaatatctcggatgcaccagatgctggttctcaaacgccgaccttcgcattcgaaggacaaattggagatactatggatgttgacgaggatgcaaggcaatgaatatgagaagtctcaattaacaagtaatagcacgatctcgatatctcgatgattgctcggttttgtgacacaaagcagctacaagaaacatgacgccatgggcctcatccatgctacgtatcgtcagagcatgtgaggctgatcgagccagccacaaactcaagtgtgtccacgagttaataccagcagctggatcaggggctttcgatatatctagcctaacgcatcatagcctcttcctcggaggctggcctgacacggtcaatcatcttagcgttgggggccacaatctacagggtattctcagccgcatgaaagtaggcaaacataattttaccaacgcagttgcctaaattttggaaactccttctccaagcttggtgcgagcggcaaatatgttaaacccgggccgatgttctccgataacccgaaacaagccagtccctgaaactagctgagccacagcgcaacgtaatgtcaagacgtcgccttcttcgaaagatcaataacactttgcgaatgaaatcacgtacgactactgtacattggccatggggagattgaagcacataatagaggatgtctggcaaggcaaccacgacaccagttcatgtgatagtgtcagatctgaggtgagcatgacaacaaccaatacaatccgttatcggcagtggtgagcattggaatagcatcatgcgacaacgaaggaggagagtgtgtgcgcatgtactgatcattgacttttttttatttctggcgcaaggaggctacgctctaaacactgcatctggaggcgtcgtgaattaatttgcagatcctcgcaaagcacgcatacctgggtttctgaagcattgagtggtatcgtctcaatttctcgtctttcattgcttattcccatacatgggtcggatttcgatagacgggcctcacccaatatagttgctcttccgtaaatttgaccaatcttaccatagtcaaatcaaaactaaaagatagtgtgccagttcgttcaatttacttaccatgagttcgatagccgttcattgtccgtctttgatactctcgaaaacttgcagcgctttttggcccccaatcatccctgtgtctttcaatatcaaagggcgatggaggcgctactacttaatgtgcgcatgacgttaaccaaacaaagtgcaataggaaatggcttccgtcaattagattgtaccgaacaataagtactatgacatgataacattgaaagagctttgagagatgaagacaatgggatgggggccgctgcctaacctcgaaacttgatttcttctcaatctacgagagtattgtcgtcaacgagatcatatatgctccatcttatttagcgaagcctatcgcgtctaagcacgatataaagatcagcggcactcaaaacaagtccgacttcgagatcaagagcgctgaccgaacgatgaacttcaggctcgaaaaatatgacagaaagaggaaagccggacctgtcatagatgtgtatttcatcagtcggcccggatatgctatagaggtattccgcacgtgcagacgcacatcgtggaaaagaggaagttgccgcgaaccgatgtgaagcacttttggacgcaatctgcaggctgtccagtagtagctggacgcttatgatgcgtttaatggaatactataggcgcgcattgcagtgtgg

SEQ ID NO: 34112 - DNA, 1053 bp, Muscodor strobelii
  misc_feature: SGI cDNA ID NO. 571781
  misc_feature: Encodes the peptide sequence at SEQ ID NO 34113
atggtcaagctcagcgatgtcaaggctgctaatgcaacccttttaagcaccaagccgttcgtggctgtcgttgcaggtggcaccgctggaatcggggaatgcgctgttcgtggtcttgcggcagtctttgctaatcatggagacaagctccgtgtttacatcgtggggaggaggcagtctgctgcggaagcgattatcgccgattgtcgtcgcgcctgtcctggtggcagcttcaccttcatcggcggaaatctgcaactaataagagaagtcgaccgcgtctgcgaccaaattatcgaaacagaaacgaagctggctgaagcagacaatcaaaaacctaaggttgacttcctgctctgctcacaaggcatattgacgatgaactacaatgaaactgaagaagggataccggctctgatcgccctagcacattattctcgaatgcgattcgcggtacaattgctaccactactaggaaatgcaccgggcggcggccacgtttcttccgtattgaatggaggagtcaaaccagtcgttttgcttgatgatctcgatttgaaagatccaaagaaccgaggattcggcaatgcttttggccatctttgttgcattcacaatgtcttcatgagtgaacttgcgcgccgaaatcctggcaaaatcgcactcactcatatttatcctgggtttgtcgacacgaatcttgcgcaaacgtccgagttcaactggatgttgatgttcttatggaagtggattcttagacccatgacgctaccattctgtggtatacctcacgacgaagtcggacaacgcatggtttttacggccactggtcgattcacgccagcaggagcacatcagctgcaggatgcagttgctgcggaaggcttggatggaaagaaagggagcggtgcgtatagaattactcgccatggcgacatataccccgaagaaaagcaatactctacactacagaaaaatgggggagcgaataagatattcgagcacactattaaggtcttcgaggatatcaagacacgcggcttgcataaatag

SEQ ID NO: 34113 - protein, 350 aa, Muscodor strobelii
  misc_feature: SGI Peptide ID NO. 571781
  misc_feature (1)..(344): NCBI GI: 145233159 Blast Desc: An02g08200 [Aspergillus niger] gi|134056878|emb|CAK37782.1| protein product [Aspergillus niger]
  misc_feature (1)..(344): NCBI GI: 242796682 Blast Desc: conserved [Talaromyces stipitatus ATCC 10500] gi|218719439|gb|EED18859.1| conserved [Talaromyces stipitatus ATCC 10500]
  misc_feature (1)..(347): NCBI GI: 212544256 Blast Desc: conserved [Penicillium marneffei ATCC 18224] gi|210065251|gb|EEA19345.1| conserved [Penicillium marneffei ATCC 18224]
  misc_feature (1)..(344): NCBI GI: 212536714 Blast Desc: conserved [Penicillium marneffei ATCC 18224] gi|210070912|gb|EEA25002.1| conserved [Penicillium marneffei ATCC 18224]
  misc_feature (1)..(336): NCBI GI: 169779655 Blast Desc: [Aspergillus oryzae RIB40] gi|238500331|ref|XP_002381400.1| short-chain dehydrogenases/reductase, [Aspergillus flavus NRRL3357] protein
  misc_feature (1)..(346): NCBI GI: 119494785 Blast Desc: NFIA_009810 [Neosartorya fischeri NRRL 181] gi|119412360|gb|EAW22301.1| conserved [Neosartorya fischeri NRRL 181]
  misc_feature (1)..(348): NCBI GI: 116198989 Blast Desc: CHGG_07650 [Chaetomium globosum CBS 148.51] gi|88178929|gb|EAQ86397.1| CHGG_07650 [Chaetomium globosum CBS 148.51]
  misc_feature (1)..(346): NCBI GI: 115491029 Blast Desc: conserved [Aspergillus terreus NIH2624] gi|114197002|gb|EAU38702.1| conserved [Aspergillus terreus NIH2624]
  misc_feature (1)..(350): NCBI GI: 154290826 Blast Desc: BC1G_15452 [Botryotinia fuckeliana B05.10] gi|150847403|gb|EDN22596.1| BC1G_15452 [Botryotinia fuckeliana B05.10]
  misc_feature (1)..(336): NCBI GI: 121719480 Blast Desc: conserved [Aspergillus clavatus NRRL 1] gi|119404637|gb|EAW15013.1| conserved [Aspergillus clavatus NRRL 1]
MVKLSDVKAANATLLSTKPFVAVVAGGTAGIGECAVRGLAAVFANHGDKLRVYIVGRRQSAAEAIIADCRRACPGGSFTFIGGNLQLIREVDRVCDQIIETETKLAEADNQKPKVDFLLCSQGILTMNYNETEEGIPALIALAHYSRMRFAVQLLPLLGNAPGGGHVSSVLNGGVKPVVLLDDLDLKDPKNRGFGNAFGHLCCIHNVFMSELARRNPGKIALTHIYPGFVDTNLAQTSEFNWMLMFLWKWILRPMTLPFCGIPHDEVGQRMVFTATGRFTPAGAHQLQDAVAAEGLDGKKGSGAYRITRHGDIYPEEKQYSTLQKNGGANKIFEHTIKVFEDIKTRGLHK

SEQ ID NO: 34114 - DNA, 1739 bp, Muscodor strobelii
  misc_feature: SGI EST ID NO. CUFF.80764.1
  misc_feature: Variant of the nucleotide sequence at SEQ ID NO 34112
aaaattatgaagattagccgtgtcaacgtcttcatcgttcggaatctcttaatggatctacaaattgcgcgataaggattcaggtgctctcgatgtttgattcccacgcggttcataacactccagtccctagctatagtgacggctcgatagggtatggaaccagtctgtatctgggtcttagtcctaaggtgtcgaggatgtattctcattattgatgtgtcatgtccgataaccggctatgcagtttttgagacgaatgcaccaatctagtttctaggtaaatcaaaacttatcgggcgaccgaaagcaatctgggctgcggatcgtcggacttagaaataagtaattcgatgtgaacttcgtttgatgcagtcaattcacgatatgggcctcttgatgcgacttgtcactttcacatgccttctgctcaaggcagtgctctaggtacttgctgcagagtcccagtaaagtttaagcatcgaattaatgacctagcaacctggaatttgtaccattaggagctttctaaaatgcattggccgacgtctaccgctcagtgcatgagcatgtgaaaagaaggatgttcggacaggcatgcacacggagccttgtattgcaccgttcaaccttctcgatgagcggagtcacggtttcgacttcgaatacttcgtaagaggtttatattttcagacacatcacgatgaaaacgagaggcatattccatggaaggtatcatacgtaaacggatgattggtgaacccgaaacaccgataaatccggctcggacaccgctgccaatcggaattacatttacgggccatgaatactagatttcgcagggacttccatcaccaccttacatttactattggcgcttatgactgagtcctcttttgccattggtgacgatagactttcatcatcacagtcattcttttacggacacaaaaaaacagaatggtcaagctcagcgatgtcaaggctgctaatgcaacccttttaagcaccaagccgttcgtggctgtcgttgcaggtggcaccgctggaatcggggaatgcgctgttcgtggtcttgcggcagtctttgctaatcatggagacaagctccgtgtttacatcgtggggaggaggcagtctgctgcggaagcgattatcgccgattgtcgtcgcgcctgtcctggtggcagcttcaccttcatcggcggaaatctgcaactaataagagaagtcgaccgcgtctgcgaccaaattatcgaaacagaaacgaagctggctgaagcagacaatcaaaaacctaaggttgacttcctgctctgctcacaaggcatattgacgatgaactacaatgaaactgaagaagggataccggctctgatcgccctagcacattattctcgaatgcgattcgcggtacaattgctaccactactaggaaatgcaccgggcggcggccacgtttcttccgtattgaatggaggagtcaaaccagtcgttttgcttgatgatctcgatttgaaagatccaaagaaccgaggattcggcaatgcttttggccatctttgttgcattcacaatgtcttcatgagtgaacttgcgcgccgaaatcctggcaaaatcgcactcactcatatttatcctgggtttgtcgacacgaatcttgcgcaaacgtccgagttcaactggatgttgatgttcttatggaagtggattcttagacccatgacgctaccattctg

SEQ ID NO: 34115 - DNA, 496 bp, Muscodor strobelii
  misc_feature: SGI cDNA ID NO. 571782
  misc_feature: Elevated expression when VOC is produced
  misc_feature: Encodes the peptide sequence at SEQ ID NO 34116
atgggtgtcagagcggcagtagagtgttgttctaagctcaaagcactgcgagcaagagaagttcggggattcgacagcctgcaagttgcggaggccatatttaagcgcggcacgcttgagcgcttggttctcagcggctgtgatgatcttacggatagatcattcaggactatgatccgaggtatcaccttggacactggtagcagcgccgactgcccacttgttccgcccaggcgccttcggcacattgatgtgagccgttgctcccaattgacgactgatggcatcagtgctctcggttatctcgcgccagcgctggaagatctcttactcagcggctgcacagccgtgaccgacgcagctctagagcccatcctcgcctcggcgccacgcctcactcgcctagagcttgattatctgcaccagctcacgaacaacatcctctcggaccatctcgccaaatcgccttgcacagagacattggagcacctttcgg

SEQ ID NO: 34116 - protein, 165 aa, Muscodor strobelii
  misc_feature: SGI Peptide ID NO. 571782
  misc_feature (2)..(165): NCBI GI: 85109814 Blast Desc: NCU06250 [Neurospora crassa OR74A] gi|28924752|gb|EAA33865.1| conserved [Neurospora crassa OR74A]
  misc_feature (2)..(165): NCBI GI: 256733171 Blast Desc: [Nectria haematococca mpVI 77-13-4]
  misc_feature (2)..(165): NCBI GI: 46125183 Blast Desc: FG06969.1 [Gibberella zeae PH-1]
  misc_feature (2)..(165): NCBI GI: 116192199 Blast Desc: CHGG_05817 [Chaetomium globosum CBS 148.51] gi|88181730|gb|EAQ89198.1| CHGG_05817 [Chaetomium globosum CBS 148.51]
  misc_feature (1)..(165): NCBI GI: 154295215 Blast Desc: BC1G_13421 [Botryotinia fuckeliana B05.10] gi|150844148|gb|EDN19341.1| BC1G_13421 [Botryotinia fuckeliana B05.10]
  misc_feature (2)..(165): NCBI GI: 171686676 Blast Desc: protein product [Podospora anserina] gi|170943299|emb|CAP68952.1| protein product [Podospora anserina]
  misc_feature (2)..(165): NCBI GI: 145602055 Blast Desc: MGG_05222 [Magnaporthe grisea 70-15] gi|145010505|gb|EDJ95161.1| MGG_05222 [Magnaporthe grisea 70-15]
  misc_feature (2)..(165): NCBI GI: 212542989 Blast Desc: F-box domain protein [Penicillium marneffei ATCC 18224] gi|210066556|gb|EEA20649.1| F-box domain protein [Penicillium marneffei ATCC 18224]
  misc_feature (2)..(165): NCBI GI: 242785386 Blast Desc: F-box domain protein [Talaromyces stipitatus ATCC 10500] gi|218720730|gb|EED20149.1| F-box domain protein [Talaromyces stipitatus ATCC 10500]
  misc_feature (2)..(165): NCBI GI: 119498189 Blast Desc: F-box domain protein [Neosartorya fischeri NRRL 181] gi|119414016|gb|EAW23955.1| F-box domain protein [Neosartorya fischeri NRRL 181]
  misc_feature: Useful for introducing or modulating the production of volatile compounds
MGVRAAVECCSKLKALRAREVRGFDSLQVAEAIFKRGTLERLVLSGCDDLTDRSFRTMIRGITLDTGSSADCPLVPPRRLRHIDVSRCSQLTTDGISALGYLAPALEDLLLSGCTAVTDAALEPILASAPRLTRLELDYLHQLTNNILSDHLAKSPCTETLEHLS

SEQ ID NO: 34117 - DNA, 810 bp, Muscodor strobelii
  misc_feature: SGI EST ID NO. CUFF.80773.0
  misc_feature: Variant of the nucleotide sequence at SEQ ID NO 34115
gcagacttcttggccaagatcatcacgtccgcgggcccatttatccaagacctaaacctccgcggctgtgtccagttagaatactacaagcgcaccgacgttctcgtcgctgcctgcagaaacctagccagcgcttcgctagaagggtgcgcaaattttctaaggccgacgattcacacgctgatccggaacaaccagaggctggtccacttgaacctagcaggtataaatgccgtcacaaatagaacttgcgaagtgatctcggacagctgtccgcaactcgagagcctggatgtttcgtggtgcaacaacatagatgcaatgggtgtcagagcggcagtagagtgttgttctaagctcaaagcactgcgagcaagagaagttcggggattcgacagcctgcaagttgcggaggccatatttaagcgcggcacgcttgagcgcttggttctcagcggctgtgatgatcttacggatagatcattcaggactatgatccgaggtatcaccttggacactggtagcagcgccgactgcccacttgttccgcccaggcgccttcggcacattgatgtgagccgttgctcccaattgacgactgatggcatcagtgctctcggttatctcgcgccagcgctggaagatctcttactcagcggctgcacagccgtgaccgacgcagctctagagcccatcctcgcctcggcgccacgcctcactcgcctagagcttgattatctgcaccagctcacgaacaacatcctctcggaccatctcgccaaatcgccttgcacagagacattggagcac

SEQ ID NO: 34118 - DNA, 1909 bp, Muscodor strobelii
  misc_feature: SGI cDNA ID NO. 571783
  misc_feature: Elevated expression when VOC is produced
  misc_feature: Encodes the peptide sequence at SEQ ID NO 34119
atgggaaacttctggatagtgagcccaggagatcaccaaagattgatgcccgttggggctgttggcgaactcttgattggcggggcggccgtcgctcaatgccttgacgcagacagtcgccacacgcaccgtcacggtgctggccatgcgaacggcggcacatcgacctcgcttggtgacctggcgggctcgctcattaagactgggcactttgctcgctactgtgaacagggcggggtcgaattcgtcttccccggaagcaatggtggaggtctctcacacattgatgtagagcgacatctacgccaatgcctcggccgcagcttgaatgtcgttgttcaggctgtcacattcaacgacgcgcactcgcagccgactctatgcgcgttcatcgagatgggcgatggtctatatcgcggagcagaagacctgtccggaattagccatgccactaaaacacagctgcgtcgtgctaagaaggcaatggataccttgcacccaagtcctctcccgatgcacaaggtgccctcaatctacatccccgtcaagtgcatgccattgacacgatcatttgatatcgaccgatcaatcttgcgaagaatgaacaacgccgccgtagccttagtgaggggacccataccggaggcggagatgctgtcggagagggccgtccagacgctacgtagcgcaaacagcgaagtgatcgaagacgtcatcgaggcctcggcggtccaagctatgcatgtaggatctgggacgctccgccgccgtggagatgttgattatctgacggttcatattactggagccctggacggggacagattaaaaacggcatgcctcgatctggttaaagcccacccgagccttcgcacggcatttgtggcccaagatcgccaactttatcagaccgtcctccgatcgttcagtcccgagatgatttggcgacggtgcaggacttggcagctgaactcttctatggcgaaagctgtggatgaggatcggcttttaccgctcgatttccgattgccagctaccaaagttttctatttctttgccaaaaagcgatctatattaattgtgcgtctatcaaaagcccagtatgatcaaatctcgctacatacgcttgtgcgagatctcagccagctctatagtgatggcggcgatgcgcctcgacgatccggggtttgccagatattccgagctgtccaggcgtcttactcggacgaaaccgttcggtactggcatgaattgctcgaaggcgcctcagtcactcaggtcatccctcaaccatcacctgcaagtgtcagcttgaacttacagactgttcgcaaaaccatcgatgtgcggcattcacagagcgaagatatgcctttcgatgtgatcctgaagagcgcatggtctgttgttctatcgaatttatcggcaactcgagatgtggtgtttggcgagcttatagactatagagacatgagcatagcaaaggatcaagatcatgccatcgcagacgtggtcgggccactagggaatgtaattccggtgcgtgcgcgactgccagccatgccaatcgcgcctagcgagtatatcgactctatgttgaaccagcatctagcaagcattccgcatcgacatatgcagactgaagacattgtgcgccggtgcacgtcttggccagcctggactcggttcagcactgtagttcggcacgagaatcgtgccgattctggaaggtcgatccattttgcgttaggcaatgccagctgcgatctcgcccggactgaagtatgctatcagagctacgatatattagttcagtcggcaatgcttggagctgaatgcgtaaatgtgtcgttgacgttgaacgagaagcttgacgcggcatttgcagagaaggtgctgacaatgctat

SEQ ID NO: 34119 - protein, 636 aa, Muscodor strobelii
  misc_feature: SGI Peptide ID NO. 571783
  misc_feature (235)..(519): Pfam Id: PF00668 Pfam Desc: Condensation domain
  misc_feature (202)..(636): NCBI GI: 164425711 Blast Desc: NCU04531 [Neurospora crassa OR74A] gi|157071032|gb|EAA27706.2| [Neurospora crassa OR74A]
  misc_feature (217)..(636): NCBI GI: 116205980 Blast Desc: CHGG_02283 [Chaetomium globosum CBS 148.51] gi|88182880|gb|EAQ90348.1| CHGG_02283 [Chaetomium globosum CBS 148.51]
  misc_feature (217)..(636): NCBI GI: 171678561 Blast Desc: protein product [Podospora anserina] gi|170937350|emb|CAP62008.1| protein product [Podospora anserina]
  misc_feature (233)..(636): NCBI GI: 261360420 Blast Desc: conserved [Verticillium albo-atrum VaMs.102]
  misc_feature (235)..(636): NCBI GI: 39942642 Blast Desc: MGG_03401 [Magnaporthe grisea 70-15] gi|145015580|gb|EDK00070.1| MGG_03401 [Magnaporthe grisea 70-15]
  misc_feature (198)..(622): NCBI GI: 121704124 Blast Desc: nonribosomal peptide synthase, [Aspergillus clavatus NRRL 1] gi|119398470|gb|EAW08900.1| nonribosomal peptide synthase, [Aspergillus clavatus NRRL 1]
  misc_feature (235)..(636): NCBI GI: 256734955 Blast Desc: NECHADRAFT_31971 [Nectria haematococca mpVI 77-13-4]
  misc_feature (237)..(636): NCBI GI: 46138017 Blast Desc: FG10523.1 [Gibberella zeae PH-1]
  misc_feature (235)..(606): NCBI GI: 116201311 Blast Desc: CHGG_08540 [Chaetomium globosum CBS 148.51] gi|88177058|gb|EAQ84526.1| CHGG_08540 [Chaetomium globosum CBS 148.51]
  misc_feature (235)..(589): NCBI GI: 169782552 Blast Desc: [Aspergillus oryzae RIB40] gi|83774482|dbj|BAE64605.1| protein product [Aspergillus oryzae]
  misc_feature: Useful for introducing or modulating the production of volatile compounds
MGNFWIVSPGDHQRLMPVGAVGELLIGGAAVAQCLDADSRHTHRHGAGHANGGTSTSLGDLAGSLIKTGHFARYCEQGGVEFVFPGSNGGGLSHIDVERHLRQCLGRSLNVVVQAVTFNDAHSQPTLCAFIEMGDGLYRGAEDLSGISHATKTQLRRAKKAMDTLHPSPLPMHKVPSIYIPVKCMPLTRSFDIDRSILRRMNNAAVALVRGPIPEAEMLSERAVQTLRSANSEVIEDVIEASAVQAMHVGSGTLRRRGDVDYLTVHITGALDGDRLKTACLDLVKAHPSLRTAFVAQDRQLYQTVLRSFSPEMIWRRCRTWQLNSSMAKAVDEDRLLPLDFRLPATKVFYFFAKKRSILIVRLSKAQYDQISLHTLVRDLSQLYSDGGDAPRRSGVCQIFRAVQASYSDETVRYWHELLEGASVTQVIPQPSPASVSLNLQTVRKTIDVRHSQSEDMPFDVILKSAWSVVLSNLSATRDVVFGELIDYRDMSIAKDQDHAIADVVGPLGNVIPVRARLPAMPIAPSEYIDSMLNQHLASIPHRHMQTEDIVRRCTSWPAWTRFSTVVRHENRADSGRSIHFALGNASCDLARTEVCYQSYDILVQSAMLGAECVNVSLTLNEKLDAAFAEKVLTML

SEQ ID NO: 34120 - DNA, 555 bp, Muscodor strobelii
  misc_feature: SGI cDNA ID NO. 571784
  misc_feature: Encodes the peptide sequence at SEQ ID NO 34121
atgatggaggggtctcccattaaccttatcctgcgcccgttgcaggtactgttcgccttgatagcgaccgctctcattggcaacgtccgccaaactacttcgcaccacaaggacgcgagctacaccaacaataactcggtagctctgaacttcagcctttttgtctgcgccctcgcttggattaactcactaggcggcctagccgcccaaattgtcttcaagacactcatcgcgccactttcccaagtgctcgatccgcttgctatcttattcactttcattggcgctgtggtgttgtcggctaagctgaaggccaccaactgcgcgaatgctactgaatatgccaaatcacatcacggttggattgccagccttttgtcgaaagacaatcagcctatcagcgccgagaagaattgtcgcgagatccaaggcggcctcgtgtttctctggtttctgtgcgccgcgttcggcgtgagctatttcctattcttgagcgagtggcggaagacgcgcggcgcctttagtcggcctagtatgtctcagataggcgtgtag

SEQ ID NO: 34121 - protein, 184 aa, Muscodor strobelii
  misc_feature: SGI Peptide ID NO. 571784
  misc_feature (1)..(182): NCBI GI: 145610945 Blast Desc: MGG_00786 [Magnaporthe grisea 70-15] gi|145018278|gb|EDK02557.1| MGG_00786 [Magnaporthe grisea 70-15]
  misc_feature (2)..(184): NCBI GI: 256732111 Blast Desc: NECHADRAFT_80397 [Nectria haematococca mpVI 77-13-4]
  misc_feature (7)..(184): NCBI GI: 85092010 Blast Desc: NCU04639 [Neurospora crassa OR74A] gi|21622306|emb|CAD37009.1| related to NCE102 protein [Neurospora crassa] gi|28920584|gb|EAA29946.1| NCU04639 [Neurospora crassa
  misc_feature (2)..(184): NCBI GI: 171691691 Blast Desc: protein product [Podospora anserina] gi|170945794|emb|CAP72594.1| protein product [Podospora anserina]
  misc_feature (2)..(182): NCBI GI: 46136905 Blast Desc: FG09968.1 [Gibberella zeae PH-1]
  misc_feature (43)..(184): NCBI GI: 261351786 Blast Desc: conserved [Verticillium albo-atrum VaMs.102]
  misc_feature (7)..(156): NCBI GI: 261196007 Blast Desc: non-classical export protein Nce102 [Ajellomyces dermatitidis SLH14081] gi|239587540|gb|EEQ70183.1| non-classical export protein Nce102 [Ajellomyces dermatitidis SLH14081] export
  misc_feature (7)..(182): NCBI GI: 121710892 Blast Desc: non-classical export protein Nce2, [Aspergillus clavatus NRRL 1] gi|119401212|gb|EAW11636.1| non-classical export protein Nce2, [Aspergillus clavatus NRRL 1]
  misc_feature (7)..(182): NCBI GI: 226294943 Blast Desc: conserved [Paracoccidioides brasiliensis Pb18]
  misc_feature (7)..(182): NCBI GI: 226285533 Blast Desc: conserved [Paracoccidioides brasiliensis Pb01]
MMEGSPINLILRPLQVLFALIATALIGNVRQTTSHHKDASYTNNNSVALNFSLFVCALAWINSLGGLAAQIVFKTLIAPLSQVLDPLAILFTFIGAVVLSAKLKATNCANATEYAKSHHGWIASLLSKDNQPISAEKNCREIQGGLVFLWFLCAAFGVSYFLFLSEWRKTRGAFSRPSMSQIGV

SEQ ID NO: 34122 - DNA, 1247 bp, Muscodor strobelii
  misc_feature: SGI EST ID NO. CUFF.80805.0
  misc_feature: Variant of the nucleotide sequence at SEQ ID NO 34120
tatacttatgacctgggtagcttgaaccaccgtagcctcatccattctgcatttccttgcattcctgcaccgtcagtcttcgatattctattgctaccttgcagactatcgaagcattcccaatctacacaagcttgaaaatacttacgtgtgcacttccgccttggagagacgttgcgggttcaatcacactatccttgtcattagctgctgcgaataattcacaacaagaccgactcgagcagcaaccaaccgtctgtcctgagcatccatctgcccatatttacttttaaaacgtccccattctccattccaagtcatctcagtctagcggctctacgatctttgcccttgaaatcttgctgcgcaaattccagctcaagacgtaccaagactcgaaaaccacgatgatggaggggtctcccattaaccttatcctgcgcccgttgcaggtactgttcgccttgatagcgaccgctctcattggcaacgtccgccaaactacttcgcaccacaaggacgcgagctacaccaacaataactcggtagctctgaacttcagcctttttgtctgcgccctcgcttggattaactcactaggcggcctagccgcccaaattgtcttcaagacactcatcgcgccactttcccaagtgctcgatccgcttgctatcttattcactttcattggcgctgtggtgttgtcggctaagctgaaggccaccaactgcgcgaatgctactgaatatgccaaatcacatcacggttggattgccagccttttgtcgaaagacaatcagcctatcagcgccgagaagaattgtcgcgagatccaaggcggcctcgtgtttctctggtttctgtgcgccgcgttcggcgtgagctatttcctattcttgagcgagtggcggaagacgcgcggcgcctttagtcggcctagtatgtctcagataggcgtgtagtttacaaggaggctgcatggacggcaattgctagttgagccttggggtttttccacaagcaggttcttgatgaagtcacgtcgatgtatgaaatcaagcaggcggatgatgacgggcatcctggttcggaatgcgtacaagatgatgaggtccatcaggtataatggttacggatctgctcctacaatagagactctgaggcctttatattcatcataatatagtcttccgcaaaagatttcacatgcatgtccgcttgagcactctaatgagcgctggggccgt

SEQ ID NO: 34123 - DNA, 1539 bp, Muscodor strobelii
  misc_feature: SGI cDNA ID NO. 571785
  misc_feature: Encodes the peptide sequence at SEQ ID NO 34124
atggcgggatcgtctacgagttcgacgttgacttcgagcccgtcttcacctatcttgacaacagagactgcaccattgctaccaaaattcccagcatcacatacctctggggctcaatcggagtgcggccagtggttaagcgagatctggttactaacgaaagcagctatacccgtaatactggcttatactctgcaaaatagcctgcaaacgatctcggtactgatagttgggcggttgtcaccagaggcactggctactgccgcattctcgtatatgtttgcgatggcaacagcgtggctggtggcgttaggcggtacaacggcgctcgacacgcttgcctctagtagcttcactggctcgcaggaccggcaagatctaggcattcttcttcaaaggggaataatcgtactcactttgctatacgccattgtcgccgtgatctggggattttcagaacccttgtttcgagcactagggcaggaagattttatctgcgtacaaagctctcggtttctccagatcctgattccgggaggactcggttatgtgtggttcgaggcaatgaaaaagtatttacaggcccaggagatattccgcccaggcacatatgtcctgctcattacttctcctctcaatgcgcttttgaactggctcttcgtgcataaattcgaaattggactttatggtgcgcccattgcaacaggcgttagttactgggcgtcatttcttctcctggtggcctatgctgtcttcgtccgcggccacgaatgctggggcggactcgcgccgaagcgggctctgtctcacctctggccgttcacacgactagccctactaggcgtcgttcatgttggcacagaatggtgggcctttgaaatcgtcgcgctggcagcgggacgactgggcacgattgctttggccgcgcagtctgtcatcatgacagccgaccaaattatcaatactatcccctttggtctaggagttgcggcgtcgtcacgaattggcaatctacttggggcccagaggtcgcgagatgcagctcgatcagcgcattgtgcagcggtgttatccgtgatatttggagccataatattgaccatcctgatgagcacgaagaacgtctttggtaagatcttcaatgacgacgagcgtgtcgtgaggctggtggggcaagtgatgccttacgtcgcactcttccagattgcagacggccttaatggcagctgtggtggcgtcctccgaggtatggggaggcaatgggtaggggctttggttaatatcgtaagctactacggcggagcattgcccacggggatttatctagcattccacggctggggcttaggggggctttggtttggtaactgtgtcgccttatacatcgttggcgtgttggaatggctcatcgttgggctgactaggtgggataaagaaacaaagagagcgatagataggctggaggcgggtggtattagtaggaggtgcgaagctatggaaacggctgaagaggactcagctcacaacaacactgtttga

SEQ ID NO: 34124 - protein, 512 aa, Muscodor strobelii
  misc_feature: SGI Peptide ID NO. 571785
  misc_feature (281)..(441): Pfam Id: PF01554 Pfam Desc: MatE
  misc_feature (58)..(219): Pfam Id: PF01554 Pfam Desc: MatE
  misc_feature (1)..(491): NCBI GI: 85092076 Blast Desc: NCU04672 [Neurospora crassa OR74A] gi|28920617|gb|EAA29979.1| conserved [Neurospora crassa OR74A] gi|28950060|emb|CAD70814.1| conserved [Neurospora crassa]
  misc_feature (45)..(501): NCBI GI: 171691655 Blast Desc: protein product [Podospora anserina] gi|170945776|emb|CAP72576.1| protein product [Podospora anserina]
  misc_feature (13)..(495): NCBI GI: 46110651 Blast Desc: FG02207.1 [Gibberella zeae PH-1]
  misc_feature (22)..(492): NCBI GI: 256729195 Blast Desc: [Nectria haematococca mpVI 77-13-4]
  misc_feature (1)..(488): NCBI GI: 39969849 Blast Desc: MGG_10534 [Magnaporthe grisea 70-15] gi|145010166|gb|EDJ94822.1| MGG_10534 [Magnaporthe grisea 70-15]
  misc_feature (7)..(497): NCBI GI: 154292177 Blast Desc: BC1G_14710 [Botryotinia fuckeliana B05.10] gi|150846261|gb|EDN21454.1| BC1G_14710 [Botryotinia fuckeliana B05.10]
  misc_feature (6)..(497): NCBI GI: 115399564 Blast Desc: conserved [Aspergillus terreus NIH2624] gi|114192254|gb|EAU33954.1| conserved [Aspergillus terreus NIH2624]
  misc_feature (15)..(488): NCBI GI: 242782242 Blast Desc: MATE efflux family protein subfamily, [Talaromyces stipitatus ATCC 10500] gi|218720108|gb|EED19527.1| MATE efflux family protein subfamily, [Talaromyces stipitatus ATCC 10500]
  misc_feature (12)..(488): NCBI GI: 169779397 Blast Desc: [Aspergillus oryzae RIB40] gi|238500029|ref|XP_002381249.1| MATE efflux family protein subfamily, [Aspergillus flavus NRRL3357] protein product oryzae]
  misc_feature (19)..(488): NCBI GI: 212526974 Blast Desc: MATE efflux family protein subfamily, [Penicillium marneffei ATCC 18224] gi|210073042|gb|EEA27129.1| MATE efflux family protein subfamily, [Penicillium marneffei ATCC 18224]
MAGSSTSSTLTSSPSSPILTTETAPLLPKFPASHTSGAQSECGQWLSEIWLLTKAAIPVILAYTLQNSLQTISVLIVGRLSPEALATAAFSYMFAMATAWLVALGGTTALDTLASSSFTGSQDRQDLGILLQRGIIVLTLLYAIVAVIWGFSEPLFRALGQEDFICVQSSRFLQILIPGGLGYVWFEAMKKYLQAQEIFRPGTYVLLITSPLNALLNWLFVHKFEIGLYGAPIATGVSYWASFLLLVAYAVFVRGHECWGGLAPKRALSHLWPFTRLALLGVVHVGTEWWAFEIVALAAGRLGTIALAAQSVIMTADQIINTIPFGLGVAASSRIGNLLGAQRSRDAARSAHCAAVLSVIFGAIILTILMSTKNVFGKIFNDDERVVRLVGQVMPYVALFQIADGLNGSCGGVLRGMGRQWVGALVNIVSYYGGALPTGIYLAFHGWGLGGLWFGNCVALYIVGVLEWLIVGLTRWDKETKRAIDRLEAGGISRRCEAMETAEEDSAHNNTV

SEQ ID NO: 34125 - DNA, 1413 bp, Muscodor strobelii
  misc_feature: SGI cDNA ID NO. 571786
  misc_feature: Encodes the peptide sequence at SEQ ID NO 34126
atggcgattcgtggcgggcgtctcgtcgccttgatcaccctggtcgatgcaatgtctgcttgttggtttggatactgccagggtgtactcgccggtgttcttgcatcaccatattttctagatgcttttgttgcagtcaacgatcccaatatcaatggagcattgacctctagtttcttcctcggggccttcctaggagcagcaatagctttctatcttggcgaccgccttggccgcaagaagacaatcgtactaggccatattttgaatgtcgtgggcgcgacactccagttctcatcatctagtctcgcgcagttctttgttgggcgcactcttaatggcatgggtatcggaatcacctcgaccatgtcaccagtatggcttggcgaatgtgctaagcctcggatgcgtggacgtctgcttgtcactggcgcatctgctaatatcgcgacattcgctcttgcgaactggataaactacattctcgccttcaatggcgggcctcttcaatggaggctgccactagcccttcaactcgttttccccttcataattttctttgccttgcctttcgtgccagagagtccgcgctggttacttctagttggccgggacgaggatgcaaagattgtgatttcgaagttgaacaatgtacaggttgacaatgacactgtgaaaagagattgcaacttaatcaagacatcgattcgtctggagacgacacatcgtgtgccgtggattgacgtgctacagcacaaagacaagacacaaaattttcgacgtctgatactgtcatgcggtacgcaatttatgcagcagttgagtggtataaacagtcttggcttttatctccccacattgctcaaccaaactgtgggctacagtctagagtcaagcaaactactttcagcattcggaaagctcgccgtggcattcataattctttatcacgtgttttttgctccgacctggggtggtattccatgggtgtacgcggctgaagtcaactctatcggatggcgaacacgaggtgcggcggcggcaacggcaataaattggcttaccgggtttgccgtcgtacagttcacaaaactcggcatcgataatttgcattgggcatttttcttgatctttgctactctctgtttatctttctatcccctcgtatacttcttctatccagagacggctggacgtacgcttgaggatatggacgagatgttcattagaaacccgtcatggttcgtacagggcagtcgagagctgacgcagcgcacgcgaccacaggcctacatcgacgctgaggcggcgcgcgtcttggacagtggctcagataccggtgtagaggccaccgtcgttcaaatgacacctaataagcccgacaaaatcattgatcccacgacagtgatttga

SEQ ID NO: 34126 - protein, 470 aa, Muscodor strobelii
  misc_feature: SGI Peptide ID NO. 571786
  misc_feature (12)..(408): Pfam Id: PF00083 Pfam Desc: Sugar (and other) transporter
  misc_feature (53)..(197): Pfam Id: PF07690 Pfam Desc: Major Facilitator Superfamily
  misc_feature (12)..(291): Pfam Id: PF00083 Pfam Desc: Sugar (and other) transporter
  misc_feature (292)..(408): Pfam Id: PF00083 Pfam Desc: Sugar (and other) transporter
  misc_feature (3)..(439): NCBI GI: 116203069 Blast Desc: CHGG_09419 [Chaetomium globosum CBS 148.51] gi|88177937|gb|EAQ85405.1| CHGG_09419 [Chaetomium globosum CBS 148.51]
  misc_feature (22)..(454): NCBI GI: 255939340 Blast Desc: Pc16g00140 [Penicillium chrysogenum Wisconsin 54-1255] gi|211585062|emb|CAP92684.1| Pc16g00140 [Penicillium chrysogenum Wisconsin 54-1255]
  misc_feature (3)..(447): NCBI GI: 242792343 Blast Desc: sugar transporter, [Talaromyces stipitatus ATCC 10500] gi|218718521|gb|EED17941.1| sugar transporter, [Talaromyces stipitatus ATCC 10500]
  misc_feature (3)..(417): NCBI GI: 115437472 Blast Desc: [Aspergillus terreus NIH2624] gi|114188634|gb|EAU30334.1| [Aspergillus terreus NIH2624]
  misc_feature (2)..(440): NCBI GI: 254573802 Blast Desc: Glycerol proton symporter of the plasma membrane, subject to glucose-induced inactivation [Pichia pastoris GS115] gi|238033809|emb|CAY71831.1| Glycerol proton symporter of the to
  misc_feature (16)..(439): NCBI GI: 190348609 Blast Desc: PGUG_05190 [Pichia guilliermondii ATCC 6260]
  misc_feature (16)..(439): NCBI GI: 146412398 Blast Desc: PGUG_05190 [Pichia guilliermondii ATCC 6260]
  misc_feature (2)..(452): NCBI GI: 119473777 Blast Desc: hexose carrier protein [Neosartorya fischeri NRRL 181] gi|119406917|gb|EAW16867.1| hexose carrier protein [Neosartorya fischeri NRRL 181]
  misc_feature (2)..(442): NCBI GI: 156055628 Blast Desc: SS1G_05166 [Sclerotinia sclerotiorum 1980] gi|154702950|gb|EDO02689.1| SS1G_05166 [Sclerotinia sclerotiorum 1980]
  misc_feature (3)..(463): NCBI GI: 67902960 Blast Desc: AN8467.2 [Aspergillus nidulans FGSC A4] gi|40747933|gb|EAA67089.1| AN8467.2 [Aspergillus nidulans FGSC A4]
MAIRGGRLVALITLVDAMSACWFGYCQGVLAGVLASPYFLDAFVAVNDPNINGALTSSFFLGAFLGAAIAFYLGDRLGRKKTIVLGHILNVVGATLQFSSSSLAQFFVGRTLNGMGIGITSTMSPVWLGECAKPRMRGRLLVTGASANIATFALANWINYILAFNGGPLQWRLPLALQLVFPFIIFFALPFVPESPRWLLLVGRDEDAKIVISKLNNVQVDNDTVKRDCNLIKTSIRLETTHRVPWIDVLQHKDKTQNFRRLILSCGTQFMQQLSGINSLGFYLPTLLNQTVGYSLESSKLLSAFGKLAVAFIILYHVFFAPTWGGIPWVYAAEVNSIGWRTRGAAAATAINWLTGFAVVQFTKLGIDNLHWAFFLIFATLCLSFYPLVYFFYPETAGRTLEDMDEMFIRNPSWFVQGSRELTQRTRPQAYIDAEAARVLDSGSDTGVEATVVQMTPNKPDKIIDPTTVI

SEQ ID NO: 34127 - DNA, 942 bp, Muscodor strobelii
  misc_feature: SGI EST ID NO. CUFF.80799.0
  misc_feature: Variant of the nucleotide sequence at SEQ ID NO 34125
tttctctattctggccaacgcggtaaaatagcaactaatggaagtgaaggctcatgctttccggctctttcgctatggcagtttgccacctgattatctctttgggtctgtgggcagcggagcagcaacccgcgcaagaaatactagttggttccctgttgatcgcattcacgatcgatctaaagtttgactcctaaatcagaactctttatgctaacttataatccagttcggaaagctcgccgtggcattcataattctttatcacgtgttttttgctccgacctggggtggtattccatgggtgtacgcggctgaagtcaactctatcggatggcgaacacgaggtgcggcggcggcaacggcaataaattggcttaccgggtttgccgtcgtacagttcacaaaactcggcatcgataatttgcattgggcatttttcttgatctttgctactctctgtttatctttctatcccctcgtatacttcttctatccagagacggctggacgtacgcttgaggatatggacgagatgttcattagaaacccgtcatggttcgtacagggcagtcgagagctgacgcagcgcacgcgaccacaggcctacatcgacgctgaggcggcgcgcgtcttggacagtggctcagataccggtgtagaggccaccgtcgttcaaatgacacctaataagcccgacaaaatcattgatcccacgacagtgatttgactcaataaccttttgcagactccaatcacgtgtttcgatatctgctaatgggaacgacctagcgggtaattatgttgatacaatacaaggtttagattagatctaagaacgatagaattggcggaataggcgggactagtgatagaatatcggattggaatagagtcatgtgagcgacaaacttctagaatacggttcaaagtactataaag

SEQ ID NO: 34128 - DNA, 2631 bp, Muscodor strobelii
  misc_feature: SGI cDNA ID NO. 571787
  misc_feature: Elevated expression when VOC is produced
  misc_feature: Encodes the peptide sequence at SEQ ID NO 34129
atgccgtcgagtcgaccaaatgcatcccggccggcctctaaggctggtggagagggtagtctcccggtcaagtacaccccaatcactggacgtgtgagccgagccaagaaaggagttccagttcacgtgtgcgatatgtgcaatcctccaaagacatttactcgagccgagcatttaaggcgacaccaattaagccacaagccagccgcatttccatgcacatacccagggtgtgacaagacttttcacagggcagacctattgtcccgccacgttcagaggcacgaacaagatgacaagtcagatatatccggaagttcaggtcgacgaccatcacatatctcaatggatgggtctccctcacacatcagccgctatcttgccgccccatcactgattccgggaactaactctcacacgatgaatatgaacaacgatcctgtcgtcactggtgttgcatactctggcacaacctcctcgtatccagcaagtcaaccaggaagcagtactcggcagactcccatgtccccgtctggagggtcccatcggtctcattcaactggacctccgcaggcatcaaattatatgatatcatcaacccctataccaccagagtatagcactcactcatcgggtatgaatggctcctcttatcagaatgctgctttcgggatggaatttgagccgcgcacctacatcggccttgagggaatgagcatgccacaacacttgcctagcctgacaattcctgacactaataacccaggccttcttgcacaagacgcctggccctcctcagcatcagacagtccctattccacaccctctgatcctggccatcggggagcgatccggggcttcggatcccccgtggacggtgtgaccgaagctctgatgtattacccccagtatccttcgcctcaacccaacatctatcaacaggtgtctgaatactcgaccgcctatacggatgataatttctacgatgttcagggacaagcatttgcagtgcgtagtccgaccccaccgaccgttacgcagtccgctcaatcggctgaaaatctagtcacccttggcagccagtccgtaccggccccgacggtactaagtcggcagaaatcggtagctctcgtgagtccgtactctggtgctgcctttctgacggctaaagtcctgtcgtcggctgtacggaatgccatcccccactatctcgacgtatactggaagcgcttcgacaacctctttcccattgttcatcatcggagcctagaaaccgctgctgacgatgtgctgcgttgtgccatggctgccatgggcacgcagtttctctcaagcaaggaggatcgcgaaaatggcaacgagctgcatcaatttgcttctcaagaggccagacggcatcctcaatggagcgttcaagtgatgcaagccattctcctctgcgagttctatgcccggttccggggattgaggtcgacgacgcgaccgtcggagcccttccagtcgctatactcgagagtggccaaccctcagaacccaaacctaaatgaccatggtccttccaagcccgaacaccgacactgggaccaatggattatcgtcgaaacccgccggagacttttggctgctgctttcattttggatgtccacacatccgtgtaccatgaacattctattatgcatcgatttcttgttcctacaccccctattcctttaattcgctcaagccaagccctgtggaccgcaacaactccagaggcatgggaggagctctgtgcctctgagccctcccaacttaatcccattttcttagctgacgaagaagcctcggcggatcgactcgccacagccttgcctatcgatgcgggcgtgcttttggcttcggagctacttcgtctaccacggaggacagcgtcgaagctagacctctcagcagggttagatatcgactcgacgagacgaataagcacattgttttccgactctcccgtagcccagacctatctggcacttcacttcacaccgcttcgggacttgctagctgtcagcggcgaaacgtggctctttgccgagaaggtcacagagcagcataactttaaaaagcaccagagccatctgggagactggagtcgaagcccccacgccggcgctgcggccaccttcgcagctaaagccctgttatctttcctttacacttctaatgataatgatgttaatactcgacggggacgacgatcggccgtggcatcccaccatcgagcgggaataggtgcggatatttcggcttactgggctctctacgtttgcgttctcatttgttgggcgctcaattaccggatcatgaaaggcggcgtatctcgtggaggcaaaggaagcgctgcccctgtctcttttctcaatgcttctgccgcgaccaaaggggagatgcagcgctggctgaagatggtggcgagcttagatcccgagctcgccagccagcagttacgcagctctccacaggagatactcggcatcatcggtgaggtacgaagaaggctggagatggagacggtaggcggcaaaagcaaattgcttgtcgatgccgttcgcgtcctagagagcctggaggcggagcctaataagaaacggttttga

SEQ ID NO: 34129 - protein, 876 aa, Muscodor strobelii
  misc_feature: SGI Peptide ID NO. 571787
  misc_feature (71)..(95): Pfam Id: PF00096 Pfam Desc: Zinc finger, C2H2 type
  misc_feature (42)..(66): Pfam Id: PF00096 Pfam Desc: Zinc finger, C2H2 type
  misc_feature (22)..(873): NCBI GI: 145616681 Blast Desc: MGG_01017 [Magnaporthe grisea 70-15] gi|145023301|gb|EDK06731.1| MGG_01017 [Magnaporthe grisea 70-15]
  misc_feature (16)..(870): NCBI GI: 256732039 Blast Desc: NECHADRAFT_41324 [Nectria haematococca mpVI 77-13-4]
  misc_feature (10)..(870): NCBI GI: 46136981 Blast Desc: FG10006.1 [Gibberella zeae PH-1]
  misc_feature (375)..(870): NCBI GI: 85080487 Blast Desc: NCU03878 [Neurospora crassa OR74A] gi|28917619|gb|EAA27315.1| [Neurospora crassa OR74A]
  misc_feature (523)..(876): NCBI GI: 171677955 Blast Desc: protein product [Podospora anserina] gi|170937046|emb|CAP61705.1| protein product [Podospora anserina]
  misc_feature (392)..(511): NCBI GI: 171677955 Blast Desc: protein product [Podospora anserina] gi|170937046|emb|CAP61705.1| protein product [Podospora anserina]
  misc_feature (17)..(777): NCBI GI: 242791019 Blast Desc: C2H2 finger domain protein, [Talaromyces stipitatus ATCC 10500] gi|218718265|gb|EED17685.1| C2H2 finger domain protein, [Talaromyces stipitatus ATCC 10500]
  misc_feature (21)..(96): NCBI GI: 156043059 Blast Desc: [Sclerotinia sclerotiorum 1980] gi|154694920|gb|EDN94658.1| [Sclerotinia sclerotiorum 1980]
  misc_feature (18)..(777): NCBI GI: 212534746 Blast Desc: C2H2 finger domain protein, [Penicillium marneffei ATCC 18224] gi|210069928|gb|EEA24018.1| C2H2 finger domain protein, [Penicillium marneffei ATCC 18224]
  misc_feature (24)..(147): NCBI GI: 116201579 Blast Desc: CHGG_08674 [Chaetomium globosum CBS 148.51] gi|88177192|gb|EAQ84660.1| CHGG_08674 [Chaetomium globosum CBS 148.51]
  misc_feature: Useful for introducing or modulating the production of volatile compounds
MPSSRPNASRPASKAGGEGSLPVKYTPITGRVSRAKKGVPVHVCDMCNPPKTFTRAEHLRRHQLSHKPAAFPCTYPGCDKTFHRADLLSRHVQRHEQDDKSDISGSSGRRPSHISMDGSPSHISRYLAAPSLIPGTNSHTMNMNNDPVVTGVAYSGTTSSYPASQPGSSTRQTPMSPSGGSHRSHSTGPPQASNYMISSTPIPPEYSTHSSGMNGSSYQNAAFGMEFEPRTYIGLEGMSMPQHLPSLTIPDTNNPGLLAQDAWPSSASDSPYSTPSDPGHRGAIRGFGSPVDGVTEALMYYPQYPSPQPNIYQQVSEYSTAYTDDNFYDVQGQAFAVRSPTPPTVTQSAQSAENLVTLGSQSVPAPTVLSRQKSVALVSPYSGAAFLTAKVLSSAVRNAIPHYLDVYWKRFDNLFPIVHHRSLETAADDVLRCAMAAMGTQFLSSKEDRENGNELHQFASQEARRHPQWSVQVMQAILLCEFYARFRGLRSTTRPSEPFQSLYSRVANPQNPNLNDHGPSKPEHRHWDQWIIVETRRRLLAAAFILDVHTSVYHEHSIMHRFLVPTPPIPLIRSSQALWTATTPEAWEELCASEPSQLNPIFLADEEASADRLATALPIDAGVLLASELLRLPRRTASKLDLSAGLDIDSTRRISTLFSDSPVAQTYLALHFTPLRDLLAVSGETWLFAEKVTEQHNFKKHQSHLGDWSRSPHAGAAATFAAKALLSFLYTSNDNDVNTRRGRRSAVASHHRAGIGADISAYWALYVCVLICWALNYRIMKGGVSRGGKGSAAPVSFLNASAATKGEMQRWLKMVASLDPELASQQLRSSPQEILGIIGEVRRRLEMETVGGKSKLLVDAVRVLESLEAEPNKKRF

SEQ ID NO: 34130 - DNA, 4653 bp, Muscodor strobelii
  misc_feature: SGI EST ID NO. CUFF.80888.0
  misc_feature: Variant of the nucleotide sequence at SEQ ID NO 34128
gaaacgtcttgtggatcttcccactatcatcaccgttttgacagggacatggcacgttttccaaaggcgaagggttgtcgatgcttgtctaggtaggttctgacaacatctcacaactatcaagcgactgtcgaacgcaacgacggtcaccaacttacttcgagcgagtgtgtcttgttccggtgatgggagtgtcagggtcgtaaactacggctctcgagtgtcgacgttcgccgaaaggaattccgtggaactattgtatgcctagagctgcatctcggtgcaacgaggaatgttgatggggggtgggtcttcccatgtacgagtatgcatcgacagggccacaaggcaacggccagcctgctctgccccagcctaccgctcgttcgcacacttcccacggctttgtttcgactttatctttttatttcgttttttattttattttatttatttttgcctgcaagtgtcagctagtcatcttctttcttgcagtctgcatctactattctcaatatagcaatgccacccaatttaactactcttacctctccgctgttggcatctgcgtttcattgcataggtacagagacgttacgcgccctccacacgccctgacaaacttctcttgcgtctcgagagaaggctgaatatctctcggtgatctctctttattctcacccccggtctctgtcactcccttcttgactattctgagcactacctatactcttattttatcggaggacagacagggctgtgcggtgtgtggattactattttttttcttggtttccatttttgactgcaaccagtcttctgcaaccataccaccaactatgtcagaccttaagaagattatcaacgtagaagacgaccaagaggctggagatcataagtaccccggatatctccctagtttgacatctagttccaatcctcctcctccttcaaccaagagaagcgatgatatacagcagcctcacgacgctagaccaagtaaaatccaagtaagacggcgcggaccactagatagatcgtctggatctaccacatcggcgccgtctacaaccgtgccggcaagtttaggagaagcatcgtcatccaggtctgtcttggcccggcgagacagtgtcgatagcactgagtcaatggaccctaccggttatgggaattacggtcagagttcatcgtcagcaaccatgccgtcgagtcgaccaaatgcatcccggccggcctctaaggctggtggagagggtagtctcccggtcaagtacaccccaatcactggacgtgtgagccgagccaagaaaggagttccagttcacgtgtgcgatatgtgcaatcctccaaagacatttactcgagccgagcatttaaggcgacaccaattaagccacaagccagccgcatttccatgcacatacccagggtgtgacaagacttttcacagggcagacctattgtcccgccacgttcagaggcacgaacaagatgacaagtcagatatatccggaagttcaggtcgacgaccatcacatatctcaatggatgggtctccctcacacatcagccgctatcttgccgccccatcactgattccgggaactaactctcacacgatgaatatgaacaacgatcctgtcgtcactggtgttgcatactctggcacaacctcctcgtatccagcaagtcaaccaggaagcagtactcggcagactcccatgtccccgtctggagggtcccatcggtctcattcaactggacctccgcaggcatcaaattatatgatatcatcaacccctataccaccagagtatagcactcactcatcgggtatgaatggctcctcttatcagaatgctgctttcgggatggaatttgagccgcgcacctacatcggccttgagggaatgagcatgccacaacacttgcctagcctgacaattcctgacactaataacccaggccttcttgcacaagacgcctggccctcctcagcatcagacagtccctattccacaccctctgatcctggccatcggggagcgatccggggcttcggatcccccgtggacggtgtgaccgaagctctgatgtattacccccagtatccttcgcctcaacccaacatctatcaacaggtgtctgaatactcgaccgcctatacggatgataatttctacgatgttcagggacaagcatttgcatcacccttggcagccagtccgtaccggccccgacggtactaagtcggcagaaatcggtagctctcgtgagtccgtactctggtgctgcctttctgacggctaaagtcctgtcgtcggctgtacggaatgccatcccccactatctcgacgtatactggaagcgcttcgacaacctctttcccattgttcatcatcggagcctagaaaccgctgctgacgatgtgctgcgttgtgccatggctgccatgggcacgcagtttctctcaagcaaggaggatcgcgaaaatggcaacgagctgcatcaatttgcttctcaagaggccagacggcatcctcaatggagcgttcaagtgatgcaagccattctcctctgcgagttctatgcccggttccggggattgaggtcgacgacgcgaccgtcggagcccttccagtcgctatactcgagagtggccaaccctcagaacccaaacctaaatgaccatggtccttccaagcccgaacaccgacactgggaccaatggattatcgtcgaaacccgccggagacttttggctgctgctttcattttggatgtccacacatccgtgtaccatgaacattctattatgcatcgatttcttgttcctacaccccctattcctttaattcgctcaagccaagccctgtggaccgcaacaactccagaggcatgggaggagctctgtgcctctgagccctcccaacttaatcccattttcttagctgacgaagaagcctcggcggatcgactcgccacagccttgcctatcgatgcgggcgtgcttttggcttcggagctacttcgtctaccacggaggacagcgtcgaagctagacctctcagcagggttagatatcgactcgacgagacgaataagcacattgttttccgactctcccgtagcccagacctatctggcacttcacttcacaccgcttcgggacttgctagctgtcagcggcgaaacgtggctctttgccgagaaggtcacagagcagcataactttaaaaagcaccagagccatctgggagactggagtcgaagcccccacgccggcgctgcggccaccttcgcagctaaagccctgttatctttcctttacacttctaatgataatgatgttaatactcgacggggacgacgatcggccgtggcatcccaccatcgagcgggaataggtgcggatatttcggcttactgggctctctacgtttgcgttctcatttgttgggcgctcaattaccggatcatgaaaggcggcgtatctcgtggaggcaaaggaagcgctgcccctgtctcttttctcaatgcttctgccgcgaccaaaggggagatgcagcgctggctgaagatggtggcgagcttagatcccgagctcgccagccagcagttacgcagctctccacaggagatactcggcatcatcggtgaggtacgaagaaggctggagatggagacggtaggcggcaaaagcaaattgcttgtcgatgccgttcgcgtcctagagagcctggaggcggagcctaataagaaacggttttgagcgccgggtcacgacatttctttctgtctgtctcttgtttcatgatttgcttgtctttgcgatattcttctttctgttcatctattattcacttctctgtccctctcttctatattattactacatgattctgtttgatccctttcagcatattacttatttttctatcccatgcatatacacaagaagtagtgttcaggcatcatagacgcatggcagggcaaaaggcttacagatgtacaactaattgatgatcacggcatagggacgcatgggaggcttctaaaatcacattttccagagcaagggcgttggctgaccagatggaccgctatttcctttccttcataacccctttctttattacattccttgtctctacccttgtactactctgctctgtctttgcctcgcgaccttgattgcgggcaggagctatgaactaatgctgacgatggaaatgatgtatgatagtgttttattacattgggccagcggattagaagaactatctgacaagtggattggcatactaaagggccaggtggacatggagacgatatgggcattgagagggcacatgagagccacgaaatataccaccatcatttacttcgtatcgttacgttttatgctaccgtgtccgcgcagcccgagtcacgtcgctgctcataagcatgtgaagagagccagagagtcaggggaaaagggaagtaagtggaatattaggtacttagtagatgcccttgactcattgctacgaaatggcaaatgactcttgccatggacaagagaagagcggcagagattaccagtatcagtccgcgctaatcagtcatcaatcctgattcttcagtgatgcaggatctgcctgttcc

SEQ ID NO: 34131 - DNA, 3708 bp, Muscodor strobelii
  misc_feature: SGI cDNA ID NO. 571788
  misc_feature: Reduced expression when VOC is produced
  misc_feature: Encodes the peptide sequence at SEQ ID NO 34132
ccccttcaccgagccccctcgccagccgacaggagtttcagccagactcgaggaggaagcggtgcagcaggtagcaacggcacggagaactcgcgctcgtttatgcaacgctggctcgagcctcccgtacagagcaagcccagcttccaggacgcgggactagtgcgcggcggcgtggttgagaacatggctgccttgggtacgctgcctaaggccgcgatgctgaagaaacagtctgcatccaccgagagtccaccacctacttcagctccaggcgtcaagaggatcgtgctgaagaagccgagttcatataccattgcacccatcacagcaccaacctcagcagtcggcacgccaaaccacacgagacattcatcaaatgatgctatggacatatcagggatggagccaggagtgatggatgatgaaatggatctggacgattcacaggcactatcgcccatgtcgcgtcagctacctctgaccatcatggatgacggagacgatgaggactacgtgccaaaaaagaccaaggcccgtcgctcctcacagaccaagcactctggtcacggcaaaaatccggctgagcatctcactccccggtctcattcacggaggcagtcacatagacacaaaggtgcaaggtcaagtccgggtgcagtcacgacgccggcacctgccacatctgcggcaaagacggtgccttctaccgcacccatccaacccgttgacaccacccctacccctacacccgctcctccctcgccgactcactctgtgcattccactcactctattcattctgacacttcatccatcccccttggccgggaacccgacgataaagaacaggctgacaaggctgtggagcttgccgtagaagaagcactccgccacttccggtatcctactgcctgggcactccgcaccctctatgacgagaactcgtctgaccctcactttgtgtctatgattgaggacgtctgctatcagcgtgctacacccaaggtactccggaaattctgccgtctgctgcatgagaagaagaaagacggcaagcgcgagaacaaaggctttgattactttgttccgccccctccaggcggcaacctcgcacctgaacaccctgaggctgccccctacggcgatctactcagtatggagtttgctaagatcctcagggcatctgctcaagattttgcggatgaagaaggtcatgtcagcaaaaagcggaagaccgagccaactcctcaggatctgcaggcaattcccgctcccgctcttaaagccgacgagtcatctatcgccactctaggttacaaaccggagagcagcaggggccggaccatgaaagcccttcagaagcagaatggccaagatgcatttctgcatcctcatgctcatccggaaccgcaagctaatggatcccgtgataacgccgccttggccactaagctcaagtcacctcacaagtcaccgcgcaagacacctaagaaatccacccccaagcgcaaaaagacgcgttcggattcagtcagcagtctttcatcgctttcctctgttcccgatgatgcaattgaagacttcgatgatttcatggacacggttgttgatgacgagccaaacgtgtcgcgtgtcttgggagatgaggacgccgcgccaaataatgcgcagaccccagtagcctccgcacagccaatcaccgctaagcaaccgaaacccgcagccaaaaggaagagtgctctgcccaaacctggatcatcgcaaaacactcctgttaatcatcaaccctcccattcttcttcgcacgctcaggactcgagcatgccagccactactgtcaccacaactattccggctacaacatcaacacaacacccaaacaagaaatctgctggctctctgaaatttgatagtcgctttggaggatttgatgaggcctctttttcccttatcagcaaaaaactagccgcaaagtcagagaccacccagcaaacctctgatacgacgggagagagctttgtccgtgatcctcttgagttggatacgctaccggaggacctgacgctgctatcgcagcctgtcccgtctctccctcttgagactgctcctcgtttccccaagacgccggcgtctgctctaagctcgcgagcagcgcgagctgctaaaaggaatcatgaagacatggaagacgccagctctcctattgccgcttcattccgtacagacttagagccactgtcggcacgtggttcgcgggctgcaacgccggcaaatgcgcgctcttccaagaagccccgcggcggtctacgcgtcaaaacctcaccgatgaagaagaagggtacatcagcgggaataccacgtggtgtcggcgagcgaccgagccctgtgggcggtggcgcacctcataaccaggacgataatgacgattcttgttatacctgtggaggtcaagggcagctcgtctgttgtgatgggtgccattattcatttcacttcgtgtgcatcgatcctccgatggatgagaatgaggtctccgaggagtggttttgtaacgagtgtgacattcgatataacccgcctttagagaagaactacaccggtctcttcgcttcactgacctatgcgctggaccgaaagaatccccggtctttccgtctttccgaggacatccgcgagcgcttcgagggcgtcaagacgggagctgatggagagtttgaggaggcggtcaatacaaccaaggccaaggttacaaacaaaaaggcagaggaaagtttcgacttcttgaagatcagacaaggggacgaggccgtgctttgccatcgttgtcacaagtcggccgactccaataggcttatcgttacctgttccgtgtgcggactacactggcatttggattgcctcgacaatcctctcacctatccaccagtacagcgaacatggcgttgtcctgctcatgttaatgacatgcttaacgatgttcgggccagactgggtcctgcccacaagtggcgtcccatcaagaacgcacccgtcatcgaacaaggctattcccgtggtctagctaataatgggtgggtcgatattgcttgggatttggacgaggacgagggcaccgagagtatttggcgcgagaatctgaattttggtcgtgtgtcccgggtgtctgggaagggcgttgcgcgagatttcgccgagcgagttcacaagaatgccaataaagagcgaaagcgaaggcttggttctagtgctctagctaaccccgctcctccgaccacactcgctccactcagaagcctggccgagcaacaagccgccctgaacatcattgcattgtcacacggagacggcgatagaactgatcaattggttcatgccttgatttccgaggcaagcccctctgcactctctcttatagcgcaaggggatgcgacgcgtattgccggtggtaatctgaccagtgctgattcaatcacattggagacgatgcttaagcaagctgaggccctgagacaaggcatttctaagatcctcgatgctcgtcacaagaatgccctggcccagtccaaagcgctcacccctaacagtatttcgcatgatgactcgacgatagtcgacgagctacagctcgatctcgctagctctcaggagagagggaacaccacagatacccaggagacgaaagatagcgaaatgcagctcgactga

SEQ ID NO: 34132 - protein, 1235 aa, Muscodor strobelii
  misc_feature: SGI Peptide ID NO. 571788
  misc_feature (811)..(857): Pfam Id: PF00628 Pfam Desc: PHD-finger
  misc_feature (939)..(984): Pfam Id: PF00628 Pfam Desc: PHD-finger
  misc_feature (733)..(1206): NCBI GI: 85081276 Blast Desc: NCU00423 [Neurospora crassa OR74A] gi|28917761|gb|EAA27451.1| [Neurospora crassa OR74A] gi|40882156|emb|CAF05983.1| [Neurospora crassa]
  misc_feature (551)..(1178): NCBI GI: 116207934 Blast Desc: CHGG_03260 [Chaetomium globosum CBS 148.51] gi|88183857|gb|EAQ91325.1| CHGG_03260 [Chaetomium globosum CBS 148.51]
  misc_feature (562)..(1208): NCBI GI: 171686528 Blast Desc: protein product [Podospora anserina] gi|170943225|emb|CAP68878.1| protein product [Podospora anserina]
  misc_feature (715)..(1208): NCBI GI: 256732715 Blast Desc: NECHADRAFT_79186 [Nectria haematococca mpVI 77-13-4]
  misc_feature (715)..(1212): NCBI GI: 154290947 Blast Desc: BC1G_15537 [Botryotinia fuckeliana B05.10] gi|150847173|gb|EDN22366.1| BC1G_15537 [Botryotinia fuckeliana B05.10]
  misc_feature (708)..(1178): NCBI GI: 261358240 Blast Desc: conserved [Verticillium albo-atrum VaMs.102]
  misc_feature (651)..(1163): NCBI GI: 156033207 Blast Desc: SS1G_13679 [Sclerotinia sclerotiorum 1980] gi|154699082|gb|EDN98820.1| SS1G_13679 [Sclerotinia sclerotiorum 1980]
  misc_feature (691)..(1181): NCBI GI: 145608858 Blast Desc: MGG_06317 [Magnaporthe grisea 70-15] gi|145016286|gb|EDK00776.1| MGG_06317 [Magnaporthe grisea 70-15]
  misc_feature (748)..(1143): NCBI GI: 189191502 Blast Desc: PTRG_01757 [Pyrenophora tritici-repentis Pt-1C-BFP] gi|187973696|gb|EDU41195.1| PTRG_01757 [Pyrenophora tritici-repentis Pt-1C-BFP]
  misc_feature (783)..(1085): NCBI GI: 254570543 Blast Desc: Essential subunit of the histone deacetylase Rpd3S complex [Pichia pastoris GS115] gi|238032179|emb|CAY70142.1| Essential subunit of the histone deacetylase Rpd3S complex GS115]
  misc_feature: Useful for introducing or modulating the production of volatile compounds
PLHRAPSPADRSFSQTRGGSGAAGSNGTENSRSFMQRWLEPPVQSKPSFQDAGLVRGGVVENMAALGTLPKAAMLKKQSASTESPPPTSAPGVKRIVLKKPSSYTIAPITAPTSAVGTPNHTRHSSNDAMDISGMEPGVMDDEMDLDDSQALSPMSRQLPLTIMDDGDDEDYVPKKTKARRSSQTKHSGHGKNPAEHLTPRSHSRRQSHRHKGARSSPGAVTTPAPATSAAKTVPSTAPIQPVDTTPTPTPAPPSPTHSVHSTHSIHSDTSSIPLGREPDDKEQADKAVELAVEEALRHFRYPTAWALRTLYDENSSDPHFVSMIEDVCYQRATPKVLRKFCRLLHEKKKDGKRENKGFDYFVPPPPGGNLAPEHPEAAPYGDLLSMEFAKILRASAQDFADEEGHVSKKRKTEPTPQDLQAIPAPALKADESSIATLGYKPESSRGRTMKALQKQNGQDAFLHPHAHPEPQANGSRDNAALATKLKSPHKSPRKTPKKSTPKRKKTRSDSVSSLSSLSSVPDDAIEDFDDFMDTVVDDEPNVSRVLGDEDAAPNNAQTPVASAQPITAKQPKPAAKRKSALPKPGSSQNTPVNHQPSHSSSHAQDSSMPATTVTTTIPATTSTQHPNKKSAGSLKFDSRFGGFDEASFSLISKKLAAKSETTQQTSDTTGESFVRDPLELDTLPEDLTLLSQPVPSLPLETAPRFPKTPASALSSRAARAAKRNHEDMEDASSPIAASFRTDLEPLSARGSRAATPANARSSKKPRGGLRVKTSPMKKKGTSAGIPRGVGERPSPVGGGAPHNQDDNDDSCYTCGGQGQLVCCDGCHYSFHFVCIDPPMDENEVSEEWFCNECDIRYNPPLEKNYTGLFASLTYALDRKNPRSFRLSEDIRERFEGVKTGADGEFEEAVNTTKAKVTNKKAEESFDFLKIRQGDEAVLCHRCHKSADSNRLIVTCSVCGLHWHLDCLDNPLTYPPVQRTWRCPAHVNDMLNDVRARLGPAHKWRPIKNAPVIEQGYSRGLANNGWVDIAWDLDEDEGTESIWRENLNFGRVSRVSGKGVARDFAERVHKNANKERKRRLGSSALANPAPPTTLAPLRSLAEQQAALNIIALSHGDGDRTDQLVHALISEASPSALSLIAQGDATRIAGGNLTSADSITLETMLKQAEALRQGISKILDARHKNALAQSKALTPNSISHDDSTIVDELQLDLASSQERGNTTDTQETKDSEMQLD

SEQ ID NO: 34133 - DNA, 4689 bp, Muscodor strobelii
  misc_feature: SGI EST ID NO. CUFF.81409.0
  misc_feature: Variant of the nucleotide sequence at SEQ ID NO 34131
ccttcaccgagccccctcgccagccgacaggagtttcagccagactcgaggaggaagcggtgcagcaggtagcaacggcacggagaactcgcgctcgtttatgcaacgctggctcgagcctcccgtacagagcaagcccagcttccaggacgcgggactagtgcgcggcggcgtggttgagaacatggctgccttgggtacgctgcctaaggccgcgatgctgaagaaacagtctgcatccaccgagagtccaccacctacttcagctccaggcgtcaagaggatcgtgctgaagaagccgagttcatataccattgcacccatcacagcaccaacctcagcagtcggcacgccaaaccacacgagacattcatcaaatgatgctatggacatatcagggatggagccaggagtgatggatgatgaaatggatctggacgattcacaggcactatcgcccatgtcgcgtcagctacctctgaccatcatggatgacggagacgatgaggactacgtgccaaaaaagaccaaggcccgtcgctcctcacagaccaagcactctggtcacggcaaaaatccggctgagcatctcactccccggtctcattcacggaggcagtcacatagacacaaaggtgcaaggtcaagtccgggtgcagtcacgacgccggcacctgccacatctgcggcaaagacggtgccttctaccgcacccatccaacccgttgacaccacccctacccctacacccgctcctccctcgccgactcactctgtgcattccactcactctattcattctgacacttcatccatcccccttggccgggaacccgacgataaagaacaggctgacaaggctgtggagcttgccgtagaagaagcactccgccacttccggtatcctactgcctgggcactccgcaccctctatgacgagaactcgtctgaccctcactttgtgtctatgattgaggacgtctgctatcagcgtgctacacccaaggtactccggaaattctgccgtctgctgcatgagaagaagaaagacggcaagcgcgagaacaaaggctttgattactttgttccgccccctccaggcggcaacctcgcacctgaacaccctgaggctgccccctacggcgatctactcagtatggagtttgctaagatcctcagggcatctgctcaagattttgcggatgaagaaggtcatgtcagcaaaaagcggaagaccgagccaactcctcaggatctgcaggcaattcccgctcccgctcttaaagccgacgagtcatctatcgccactctaggttacaaaccggagagcagcaggggccggaccatgaaagcccttcagaagcagaatggccaagatgcatttctgcatcctcatgctcatccggaaccgcaagctaatggatcccgtgataacgccgccttggccactaagctcaagtcacctcacaagtcaccgcgcaagacacctaagaaatccacccccaagcgcaaaaagacgcgttcggattcagtcagcagtctttcatcgctttcctctgttcccgatgatgcaattgaagacttcgatgatttcatggacacggttgttgatgacgagccaaacgtgtcgcgtgtcttgggagatgaggacgccgcgccaaataatgcgcagaccccagtagcctccgcacagccaatcaccgctaagcaaccgaaacccgcagccaaaaggaagagtgctctgcccaaacctggatcatcgcaaaacactcctgttaatcatcaaccctcccattcttcttcgcacgctcaggactcgagcatgccagccactactgtcaccacaactattccggctacaacatcaacacaacacccaaacaagaaatctgctggctctctgaaatttgatagtcgctttggaggatttgatgaggcctctttttcccttatcagcaaaaaactagccgcaaagtcagagaccacccagcaaacctctgatacgacgggagagagctttgtccgtgatcctcttgagttggatacgctaccggaggacctgacgctgctatcgcagcctgtcccgtctctccctcttgagactgctcctcgtttccccaagacgccggcgtctgctctaagctcgcgagcagcgcgagctgctaaaaggaatcatgaagacatggaagacgccagctctcctattgccgcttcattccgtacagacttagagccactgtcggcacgtggttcgcgggctgcaacgccggcaaatgcgcgctcttccaagaagccccgcggcggtctacgcgtcaaaacctcaccgatgaagaagaagggtacatcagcgggaataccacgtggtgtcggcgagcgaccgagccctgtgggcggtggcgcacctcataaccaggtaagcagtctcattagactcagcagcacactgttcttttcatcatcaaaattcgtcttgccatgctcttcgtccatcattttaccctataccataattcttccatgtctactggatgagggcggttgcaccaggatttccaccgcaagatcgggggcatgctggtcctttttgttcccgcttttgccgaatctcgcactggtcgcccgcgtcatcacctagtgtgccttgctaacacggctccccaggacgataatgacgattcttgttatacctgtggaggtcaagggcagctcgtctgttgtgatgggtgccattattcatttcacttcgtgtgcatcgatcctccgatggatgagaatgaggtctccgaggagtggttttgtaacgagtgtgacattcgatataacccgcctttagagaagaactacaccggtctcttcgcttcactgacctatgcgctggaccgaaagaatccccggtctttccgtctttccgaggacatccgcgagcgcttcgagggcgtcaagacgggagctgatggagagtttgaggaggcggtcaatacaaccaaggccaaggttacaaacaaaaaggcagaggaaagtttcgacttcttgaagatcagacaaggggacgaggccgtgctttgccatcgttgtcacaagtcggccgactccaataggcttatcgttacctgttccgtgtgcggactacactggcatttggattgcctcgacaatcctctcacctatccaccagtacagcgaacatggcgttgtcctgctcatgttaatgacatgcttaacgatgttcgggccagactgggtcctgcccacaagtggcgtcccatcaagaacgcacccgtcatcgaacaaggctattcccgtggtctagctaataatgggtgggtcgatattgcttgggatttggacgaggacgagggcaccgagagtatttggcgcgagaatctgaattttggtcgtgtgtcccgggtgtctgggaagggcgttgcgcgagatttcgccgagcgagttcacaagaatgccaataaagagcgaaagcgaaggcttggttctagtgctctagctaaccccgctcctccgaccacactcgctccactcagaagcctggccgagcaacaagccgccctgaacatcattgcattgtcacacggagacggcgatagaactgatcaattggttcatgccttgatttccgaggcaagcccctctgcactctctcttatagcgcaaggggatgcgacgcgtattgccggtggtaatctgaccagtgctgattcaatcacattggagacgatgcttaagcaagctgaggccctgagacaaggcatttctaagatcctcgatgctcgtcacaagaatgccctggcccagtccaaagcgctcacccctaacagtatttcgcatgatgactcgacgatagtcgacgagctacagctcgatctcgctagctctcaggagagagggaacaccacagatacccaggagacgaaagatagcgaaatgcagctcgactgaaaaatctcgaagatcctgcatacccgacaataataccactaattagtggaaccgggccggatagtccggcctcggtcccacctacacctagacacaatctaagtttcttatgtttctcggctcaattctgataggcgcgatacccccgaaggacactgcacacgactgcgctctactcgtcccggcgccattataacgaccggaaacttgatgattaggtcacatgactggctcacttcctgctatactgatcttgcgaagatactagatgcactcgctcatcgctgcctctcatatttttgagcgtcgcaaaagcctccagggagcacaaagatcacaaccgcgacgggcgagtttgatatatgactatagataggagagaggggatgatcctgcgagggatgctggcgcggtggtcgtgaggtatctggtggttgggcgtgaatggatgcgcaaagtattcagtctcgaggttgcgacttttgagcatgcttctaaggcagacgactgacttgcttaccgctcgctgtgacgagataggagagaacgagaagagagaagagtgctggggtgattgtgtgaattgcatgattgcatagcattgcgtggcgtcgctgagagggtacttaggtatttagtgcctatatttgattctctgagattggtctttttatgtttggctgcaagtgatgagtgtgggaccgatctgtgtaagtatgtagtatatggtctcgg

SEQ ID NO: 34134 - DNA, 435 bp, Muscodor strobelii
  misc_feature: SGI cDNA ID NO. 571789
  misc_feature: Encodes the peptide sequence at SEQ ID NO 34135
atgcatttcaccgccatcatcagcgcagccgtcacggcccttgccttcactgccacggcctcgcctattgatctcgaggaacgcgcagcaatgtgtcagttcaaagtctcatgcacacacgcgattggagccggcgtcgacaatgtgcactgcgctcagcaggtcttcggcccccagggaaatcttcgtgtctccaagacggttgacatggagggctcatcagggggtacggccgtagtcaaaaagggtggatggaagggcgacgcagatgttcatctgcacggtgtattcaatcgagccagcaaccacttcacagttgccaactacacttacaaaggcaagacacacaaagtcgcggtccatgacactattgatagtggtaccgtttcgaatgcaatttcaagatacagcttctctctagcttgcaacgcttag

SEQ ID NO: 34135 - protein, 144 aa, Muscodor strobelii
  misc_feature: SGI Peptide ID NO. 571789
MHFTAIISAAVTALAFTATASPIDLEERAAMCQFKVSCTHAIGAGVDNVHCAQQVFGPQGNLRVSKTVDMEGSSGGTAVVKKGGWKGDADVHLHGVFNRASNHFTVANYTYKGKTHKVAVHDTIDSGTVSNAISRYSFSLACNA

SEQ ID NO: 34136 - DNA, 1307 bp, Muscodor strobelii
  misc_feature: SGI EST ID NO. CUFF.80855.0
  misc_feature: Variant of the nucleotide sequence at SEQ ID NO 34134
tcccgatgcaatgctctcatctagatcgcacctaacgagcaacaccaaagcttgcttatcgtcaagaccgaagacggaagaaaaagtcaacccgatcgttcgtattagtaggtcttacatagcctcgttgcggagtatatgtcgttctttccgaatgttgatacgtccgtatctcgaaaacgaccccgtgtgcacctggacactcaacaacgtatctcaatctttgaaaagcatgtcaacatgagaattatgattatatcagctgcggtcgtctcggtcttcttcacgccgtgggccgttgttcgagttacataacaacatcgacaagtcatatcatggggctcagctgaacacaatctgcgacgccattgcagcctatgcgtcaaaatgaagagtcatgaccatgcctcatagcacaatgagctgttaaacgagatcacgatgcgtttgcggcaatgtcgtcgcggcaatggcttcgcggtatgatgaataatgttggtctcaaagacgtctatataagacaacactacttcccgagatcaatgtccagcttcatcgcacaacaaactcaacgagccaactcgcctcattgtccacaatctctgagtttttgattgacaagataccggactctcgagtctactcccttgccaagtacccagacgtgtcttcagcgccaacaatctcataaataccttggtcaagtaccatcaccaacatgcatttcaccgccatcatcagcgcagccgtcacggcccttgccttcactgccacggcctcgcctattgatctcgaggaacgcgcagcaatgtgtcagttcaaagtctcatgcacacacgcgattggagccggcgtcgacaatgtgcactgcgctcagcaggtcttcggcccccagggaaatcttcgtgtctccaagacggttgacatggagggctcatcagggggtacggccgtagtcaaaaagggtggatggaagggcgacgcagatgttcatctgcacggtgtattcaatcgagccagcaaccacttcacagttgccaactacacttacaaaggcaagacacacaaagtcgcggtccatgacactattgatagtggtaccgtttcgaatgcaatttcaagatacagcttctctctagcttgcaacgcttagagggcgctttgcgcgttgtacgaggtggcaatatagcaggatatacgatgattcgtcgctgtgttcttgatggatttgaagctcgcctcttctacttcttgcagtctctaccgaacagtcactctttctatagtttcagctgaacaaataacgc

SEQ ID NO: 34137 - DNA, 528 bp, Muscodor strobelii
  misc_feature: SGI cDNA ID NO. 571790
  misc_feature: Encodes the peptide sequence at SEQ ID NO 34138
atggcacccaacagacagaagaaagagaaggacaaggagaagaaggttaaggccagacgcccccagccccctcgtggcaagaaagctcaagcactgcgtgttgtccccgatggggttgctgatcacccacaggctcgcggtgaagttgttgagcatggcctcttccgctgcgagtgcggttcggtgttccacaatgagcatcacaatcaccagagccatatcgaccacaagcacaaagccaacgctgcctaccgcaagaagcaagccaacaggctgtacttctgccggggatgcccacgcgttttcaagaacttcaacagctatcaccgccactaccgtgccaatcacaactcgcaggcaaaggtcgcagatctgatcgaccatgacttccccgacctcgagcagtggggctggaacaacgtcgacgaagaggagcccacattcaccttgccgcagcagtatcgtgagaaggacgatgaccaggacgagggtggcatgggaggacgacaagttgctgaggctgcctaa

SEQ ID NO: 34138 - protein, 175 aa, Muscodor strobelii
  misc_feature: SGI Peptide ID NO. 571790
MAPNRQKKEKDKEKKVKARRPQPPRGKKAQALRVVPDGVADHPQARGEVVEHGLFRCECGSVFHNEHHNHQSHIDHKHKANAAYRKKQANRLYFCRGCPRVFKNFNSYHRHYRANHNSQAKVADLIDHDFPDLEQWGWNNVDEEEPTFTLPQQYREKDDDQDEGGMGGRQVAEAA

SEQ ID NO: 34139 - DNA, 522 bp, Muscodor strobelii
  misc_feature: SGI cDNA ID NO. 571791
  misc_feature: Encodes the peptide sequence at SEQ ID NO 34140
atgtctagggcctcctcgactaatgatggaacacctgactcaacgtgggacaagaccacctgcagcactgtccaataccagaccgtcacctctcatgggaacgcagtggtatccgacgcctcattgccgactgttgtgcagttcaaccagggctactcggtgctaagccccgataactaccagtctggaaacaaagagggcatggtacacatcccaatcgccgtgccgatcggcatggtcatcgatcctaccaaactacagtacatcgtcgtcaagtttagtagcaagagcaaagcaaccgtcgacaatatttacctatattacgacacagtgcaagttgccagcgccaatcctagcaagagcggcacgttcttcgtctctttcagtgcgtctgagagtactaaggccgcctattccgcccaggatcccaaaggcatctgcctcacactcgacctcaattttccggctactgatgccatcatcaatctcgtctcggtggaactcgtctatctttacaagtag

SEQ ID NO: 34140 - protein, 173 aa, Muscodor strobelii
  misc_feature: SGI Peptide ID NO. 571791
MSRASSTNDGTPDSTWDKTTCSTVQYQTVTSHGNAVVSDASLPTVVQFNQGYSVLSPDNYQSGNKEGMVHIPIAVPIGMVIDPTKLQYIVVKFSSKSKATVDNIYLYYDTVQVASANPSKSGTFFVSFSASESTKAAYSAQDPKGICLTLDLNFPATDAIINLVSVELVYLYK

SEQ ID NO: 34141 - DNA, 2859 bp, Muscodor strobelii
  misc_feature: SGI cDNA ID NO. 571792
  misc_feature: Encodes the peptide sequence at SEQ ID NO 34142
atggcacacgagaaaaggaatgatgtcgaaaccgagagcgagggcaacgacaaagccgcatctactgccggggccatgacggagccggaggtcagcggaaacattgagaaaaacaaaccggactcgccactagccttggatgttttcccacttccaacttcttcaacatccactgcccacgatctacgcaaacctcccactcaagagatcgtagaacacatcgcgagatcagcaatgcggcagtcatctaaggacgaaggtcaacccgaagagagaggacaacccaatcctgtctccctcgatgagaacgcacaggcactcgacgtcaaagaaggtgagcccacagattttgacgagaatacactatttcccgcccttatcgagtttacaccccgtggcctagtgccacgcgcgtctactcccgcgattgcactcttgcgatctcaggacactcttctaacactgcccaacttcccctctctagtctctgagtcttctcaccaaatctcgccagccatgtcgccagacgcgtctgctgcggcattgacagatgcgacggatcaagtcgacgcaaatatgaaggaagactacgatgatgacgatgatgtcatcgagcaagacgagtacggattccccgtaacctgggacatctacccaactccttctcagcggaaaatctcactgtcgcccgccgagcaacaacgagcaactgtcgagttcctcaaagcatggcacgacgctgacgaaagtgtacctttcggacctgtcaaagatgatgtagatcatgacactaccgatgcggatacaattaccacagatgcaatctgcgatggccgtattgaggtcgcgccccctaccacaagaccgtcagaatacagtcgacaagagcatgaagcaaacgaagcggaggacgcgagcgctgatgatgaagggcgagttgttacatattacgatcccaatgtctgtctatttcttgtgcgatcgccttatatggaacagaaccagcagaatgaagtcgagaatgatttcgtattccgttcccgttccaaacctcaagagacggaatcttctactccctctgaacgctggtatccggggctctcgaggagtctgccagaagattccatgacacttgccatgcttcggccctcgcctcctccaattcgatccccatctcccccggctgcacccatgacaagatctcctgagctgcgagttgtcgagaaggacatatcttggggtgatgagcgatttcccatatattacaggtcgcactctgagaatgcgtcgctcagtgatcttccgcctgatgggactcatctgccttcaacagaaatcgctgcagaacaagagtctgacggtgatggagcacaaggacaaggacaggaacaagcacagtcatcaacttcgagaacccatattcaagctcctcttgactctccgacaatgagtcgctatcgtcgtctttacgacgagcttgaagcttctttgcaatcttcatatccaagcgatgatgagatcactgcttcaccacagtcatggaagtcggtcaaagaagagacgctggaagataacagcctagccaagttgaaagactccttgtacatcacagaggctagtctactagctatacaaaaagagcttcgatctataaacccagcagaggaagatcttcaagattctgctcctcctcccaaggcttcggacccactgctaagacttcatcagcactcatctccccgtggtcagactctcaagccgcgaacaggtctacgaagagagccctccacactctctcaaccccaaagtccggtccctagggaggaagaagacggatcagcaatgccttgtccagagtgcggcccacaagcccaagcctctggcatttcccatacccacaccgatagcgaggacgaatcgtctcccaacgacacgcctctccaaacccgcctcacaagccaagacatagatgcaaaccgtcctcaagctgctcgctccccttcaccacgccggtatggaccgcggcccattgctccagtacctgtcttcgtccgcgacctcccctctccagaccgggctccatacacgccatcaagcactatccaatccctcccccctgtccaacaaatcgacgagctctgcaagatcattacgcagtgccacgcacttctcgattccaaaaacaccacgatctcaaacctgaccgctttcctcgaggccgcacatagcgaagtagagaaccttacgaatcaagtcgaggagaaagacaagatcgtccgtatcctccacgatttcacacgggatctcgatgacgaaaacgaagagctagaggaacgaataatgaaaatggaagaggttagggagttagagaagaggctttgggagatggaggaagaagagaagaaggaagaccaagacgaaaccggcaaagggaagacagacgaagaggacaacgccgctcgactcgattcctacgctcccactacgcacaatacggacgcagacgacaaacatcttcccgcgaacggccgtccctcaatcctccagtctatcaccaacggtggtctcctcacaatcatctccggcttcgccgctgcatcgaagatcgcaatgaccgccatcatctacgcgataatcttcagcatagccctacgctgcatcaacgccttgttcccactctcttcccccaacgtctcagtcccgacattgcaggatcgccactcacagatcccaactatcacagatgttgcgaacggtgtaggtgttgtgaataacacgaccgctacgcacttcacaggccccacgcacattgtgggcatgactgagacagagaccacgcccatctccacgactggatga

SEQ ID NO: 34142 - protein, 952 aa, Muscodor strobelii
  misc_feature: SGI Peptide ID NO. 571792
MAHEKRNDVETESEGNDKAASTAGAMTEPEVSGNIEKNKPDSPLALDVFPLPTSSTSTAHDLRKPPTQEIVEHIARSAMRQSSKDEGQPEERGQPNPVSLDENAQALDVKEGEPTDFDENTLFPALIEFTPRGLVPRASTPAIALLRSQDTLLTLPNFPSLVSESSHQISPAMSPDASAAALTDATDQVDANMKEDYDDDDDVIEQDEYGFPVTWDIYPTPSQRKISLSPAEQQRATVEFLKAWHDADESVPFGPVKDDVDHDTTDADTITTDAICDGRIEVAPPTTRPSEYSRQEHEANEAEDASADDEGRVVTYYDPNVCLFLVRSPYMEQNQQNEVENDFVFRSRSKPQETESSTPSERWYPGLSRSLPEDSMTLAMLRPSPPPIRSPSPPAAPMTRSPELRVVEKDISWGDERFPIYYRSHSENASLSDLPPDGTHLPSTEIAAEQESDGDGAQGQGQEQAQSSTSRTHIQAPLDSPTMSRYRRLYDELEASLQSSYPSDDEITASPQSWKSVKEETLEDNSLAKLKDSLYITEASLLAIQKELRSINPAEEDLQDSAPPPKASDPLLRLHQHSSPRGQTLKPRTGLRREPSTLSQPQSPVPREEEDGSAMPCPECGPQAQASGISHTHTDSEDESSPNDTPLQTRLTSQDIDANRPQAARSPSPRRYGPRPIAPVPVFVRDLPSPDRAPYTPSSTIQSLPPVQQIDELCKIITQCHALLDSKNTTISNLTAFLEAAHSEVENLTNQVEEKDKIVRILHDFTRDLDDENEELEERIMKMEEVRELEKRLWEMEEEEKKEDQDETGKGKTDEEDNAARLDSYAPTTHNTDADDKHLPANGRPSILQSITNGGLLTIISGFAAASKIAMTAIIYAIIFSIALRCINALFPLSSPNVSVPTLQDRHSQIPTITDVANGVGVVNNTTATHFTGPTHIVGMTETETTPISTTG

SEQ ID NO: 34143 - DNA, 760 bp, Muscodor strobelii
  misc_feature: SGI EST ID NO. CUFF.80882.0
  misc_feature: Variant of the nucleotide sequence at SEQ ID NO 34141
cgcacaggcactcgacgtcaaagaaggtgagcccacagattttgacgagaatacactatttcccgcccttatcgagtttacaccccgtggcctagtgccacgcgcgtctactcccgcgattgcactcttgcgatctcaggacactcttctaacactgcccaacttcccctctctagtctctgagtcttctcaccaaatctcgccagccatgtcgccagacgcgtctgctgcggcattgacagatgcgacggatcaagtcgacgcaaatatgaaggaagactacgatgatgacgatgatgtcatcgagcaagacgagtacggattccccgtaacctgggacatctacccaactccttctcagcggaaaatctcactgtcgcccgccgagcaacaacgagcaactgtcgagttcctcaaagcatggcacgacgctgacgaaagtgtacctttcggacctgtcaaagatgatgtagatcatgacactaccgatgcggatacaattaccacagatgcaatctgcgatggccgtattgaggtcgcgccccctaccacaagaccgtcagaatacagtcgacaagagcatgaagcaaacgaagcggaggacgcgagcgctgatgatgaagggcgagttgttacatattacgatcccaatgtctgtctatttcttgtgcgatcgccttatatggaacagaaccagcagaatgaagtcgagaatgatttcgtattccgttcccgttccaaacctcaagagacggaatct

SEQ ID NO: 34144 - DNA, 3528 bp, Muscodor strobelii
  misc_feature: SGI cDNA ID NO. 571793
  misc_feature: Reduced expression when VOC is produced
  misc_feature: Encodes the peptide sequence at SEQ ID NO 34145
atgtcaactgctagaaacgaacacctcgccattggctaccctcccaagtctgccggtagccgaagaacgccctctcctgtcacccacgtctcgcccatcgagtccactgccagctctgccctcaagtcgcccttcggcatgtctggcctgggcaatccttcccgaacggcgggcgcctcgcggtccggcaccggttctccatcgcaagatgcccctggatccggcagactgttttccaaacgcgcgagagagatccaagcccaagaaggcattgccgtgcccgtgaacaacccatggggcggccctcccaccagcggcaactcaactcccctccgcgaaaacatccccgagtcgcccaccgatggattccccgacttcgcacagctgcccactcccgacagcctgccctcgacgaggcgtgcccgggctggcactgtgccctcccgattccccgccggcggactaggcaatggcctcctgcccatgcccacccactcggcccagtccctgtcctcccggccgaccccgtcccagagcccgtacaacaagacgccctctccgggactcgccgacaacatggaggcgtcacggtcgtctgctctgctttccagactccgggctggctcgatgccccagcgaagcccattcctccacacccccggtaccagctcgcctttcggaccgtccgtgttcagcacatggaaccctagcggtggccgggagagaggcaacactttggctagcatcgcaagcgctggctccaatggtcctagctctccggcgcagtcggccatgtccaaggagggctcaggtgacaacgacgttcatatgagaactcttgattatctgggcctggccgagacgccccagcctgcccgcgcccagttggcggcaccatatctgcctgggttggccgactacaccaggcaagccaaccggttccgatcctactcggtgaacaataaggacaagtatgccgacgaggaggactacgacgacgagagcattgctctggataaccaatatgctcaactgcaagaacagctcgctgcgaccaatgccgccattcacagccacaatcttgcggtgcagagcctgcagacactggcttccaacgctgtcacccggccccgtgcccgaactgcagggcttctcgatctcaccggcgctggttctcgacttggcgcccgcaactactatcccacgccctcgcgtctggacagctccatgactgccgcagacattgggctgggagacgagaaggagtatgacgcacttccatctgccgtcgcggctatgaacctgggcagatccaacagccgaaacaacggacttctgtcagccgacgaacccggtttggaaggcccgacgagtgcactgtggctgggcagcattccgacttcgaccactccgtccacgttgacggagatgttcaagtcgtacggcccagtccagtccgctcgagtcttgacgcacaagaactgcggctttgtcaactttgagagagtcgaaagtgctatcgcggccaaaagtggcatgaatgggaaagagatcttccccggagccggtcccatccgcatcaacttcgccaaacctgcttcagcctcggggacgcccggacacgacggtgctttcccaagtccaagtcccgaccctttcgcgaagagctcgggctccaatggtgcgacgggtggcggtcctgctactgcccatgtcgcggccgccaacacgtctgcctctgcccccaatatccccccgctccccgagatgacggcagatattgtgcagattgtcaagtccttcggcgccaccgacgaggatacctaccgcatctcccaaagcctccagcaagccattcagtataccactttcattgacgagatccctgccatccaggagcccgttactgcacgtgttcacgacgcgccgaaacttcgagatatccggaagcgcatcgataaccaaagcttgagccaaccggagatcgagagcatcgccgtcgatatgctccccgagattgccgaattgtcttcagattatctcggcaataccgtcgtgcaaaagctgttccaggagtgctccgacaatatccgcgatgccatgcttcaagaaattgctccacacctagccaagatcggtgtacacaagaatgggacctgggctgctcagaagatcatcgatgtctgcaagacaccccatcagctatccatgattgtagagcatttgcggccatataccattcccctcttcctcgaccagtatggcaactatgttcttcagggttgtttgcaattcggagcgccgttcaacgacttcatctttgagaccatgctgagccgaatgtgggagattgctcaaggtcgatatggcgctcgtgccatgcgggcctgtctcgagagccacagtgccaccaaggagcagcagcgcatgcttgccgctgccatcgctcttcacagtgttcagcttgcgactaatgctaatggagctcttctgctgacctggttcttggacacttgtaccttccctcagcgacgcagcgttttagccccccagctcgtaccatacctggtccatctctgtactcacaaggtcgcctacttgaccgtcttgaaggtcatcaaccagaaggcggaatccgatgcacgggatgccattttgcaagcgcttttctttactccgaaggatcagacgttggaggctatccttagtgatcatgcttgcggagctacgctgatcttcaaggttcttactaccccgttcttcgatgagagtattagaagtcaagtcgtcgaaaatgtgaagaatgttcttattcgaatcaaggcacagcctagccaaggttacaagcgcttgatggacgaggttggcatgtcgagtcgtaacggcggcggtaatgcttcgcgggatcattccgtcggccccaacgcatccggtgatcgtcaacgatctacctcgcgtcaagctcaagcacaggcacaagccaatgccgcagcggtccagcaaaacgcacagtacggaaaccagttcctcaacccattgaaccctgctactgctgccgctggaggtttcgatgtcggcggcttccctgttccccgaagtgacaatggggaacagaccatgccttacggtgcttatggagcccagggtggaatgtataatggggctaccggatcaattcctcccatgaatatgcagcaattgcagtatcaacagaacatgatgtcacgtggcaccccgccgatgaacaacttctaccctcagatgcaggcgggctttgggggatataacaacgccaatgcccagatggatcagttccgtggccagaatgtggccaatggcagccctatccagccaacaggcggcgctgctgggttcgctccaccaggttttgggatgggcgttggtatgggaggatatggttatcctaatgggggcatgtcaaacgtaccatatgtccccgaacaacctgtgggctctagacgcggacgcgtaggtcacccccctcgacagagatcgcctcgaccttag

SEQ ID NO: 34145 - protein, 1175 aa, Muscodor strobelii
  misc_feature: SGI Peptide ID NO. 571793
  misc_feature (741)..(774): Pfam Id: PF00806 Pfam Desc: Pumilio-family RNA binding repeat
  misc_feature (668)..(702): Pfam Id: PF00806 Pfam Desc: Pumilio-family RNA binding repeat
  misc_feature (460)..(527): Pfam Id: PF00076 Pfam Desc: RNA recognition motif. (a.k.a. RRM, RBD, or RNP domain)
  misc_feature (814)..(848): Pfam Id: PF00806 Pfam Desc: Pumilio-family RNA binding repeat
  misc_feature (460)..(518): Pfam Id: PF00076 Pfam Desc: RNA recognition motif. (a.k.a. RRM, RBD, or RNP domain)
  misc_feature (58)..(1167): NCBI GI: 145608856 Blast Desc: MGG_06318 [Magnaporthe grisea 70-15] gi|145016285|gb|EDK00775.1| MGG_06318 [Magnaporthe grisea 70-15]
  misc_feature (1)..(1155): NCBI GI: 164425256 Blast Desc: NCU06199 [Neurospora crassa OR74A] gi|157070853|gb|EAA33679.2| NCU06199 [Neurospora crassa OR74A]
  misc_feature (1)..(1164): NCBI GI: 256733163 Blast Desc: NECHADRAFT_37587 [Nectria haematococca mpVI 77-13-4]
  misc_feature (1)..(1118): NCBI GI: 116207938 Blast Desc: CHGG_03262 [Chaetomium globosum CBS 148.51] gi|88183859|gb|EAQ91327.1| CHGG_03262 [Chaetomium globosum CBS 148.51]
  misc_feature (1)..(1175): NCBI GI: 171686516 Blast Desc: protein product [Podospora anserina] gi|170943219|emb|CAP68872.1| protein product [Podospora anserina]
  misc_feature (1)..(1163): NCBI GI: 156033181 Blast Desc: SS1G_13666 [Sclerotinia sclerotiorum 1980] gi|154699069|gb|EDN98807.1| SS1G_13666 [Sclerotinia sclerotiorum 1980]
  misc_feature (1)..(1163): NCBI GI: 154290963 Blast Desc: BC1G_15545 [Botryotinia fuckeliana B05.10] gi|150847181|gb|EDN22374.1| BC1G_15545 [Botryotinia fuckeliana B05.10]
  misc_feature (31)..(1129): NCBI GI: 169769400 Blast Desc: [Aspergillus oryzae RIB40] gi|83767028|dbj|BAE57168.1| protein product [Aspergillus oryzae]
  misc_feature (31)..(1129): NCBI GI: 238501870 Blast Desc: RNA binding protein Jsn1, [Aspergillus flavus NRRL3357] gi|220692406|gb|EED48753.1| RNA binding protein Jsn1, [Aspergillus flavus NRRL3357]
  misc_feature (32)..(1164): NCBI GI: 261189994 Blast Desc: pumilio-family RNA binding repeat-containing protein [Ajellomyces dermatitidis SLH14081] gi|239591235|gb|EEQ73816.1| pumilio-family RNA binding repeat-containing protein [Ajellomyces
  misc_feature: Useful for introducing or modulating the production of volatile compounds
MSTARNEHLAIGYPPKSAGSRRTPSPVTHVSPIESTASSALKSPFGMSGLGNPSRTAGASRSGTGSPSQDAPGSGRLFSKRAREIQAQEGIAVPVNNPWGGPPTSGNSTPLRENIPESPTDGFPDFAQLPTPDSLPSTRRARAGTVPSRFPAGGLGNGLLPMPTHSAQSLSSRPTPSQSPYNKTPSPGLADNMEASRSSALLSRLRAGSMPQRSPFLHTPGTSSPFGPSVFSTWNPSGGRERGNTLASIASAGSNGPSSPAQSAMSKEGSGDNDVHMRTLDYLGLAETPQPARAQLAAPYLPGLADYTRQANRFRSYSVNNKDKYADEEDYDDESIALDNQYAQLQEQLAATNAAIHSHNLAVQSLQTLASNAVTRPRARTAGLLDLTGAGSRLGARNYYPTPSRLDSSMTAADIGLGDEKEYDALPSAVAAMNLGRSNSRNNGLLSADEPGLEGPTSALWLGSIPTSTTPSTLTEMFKSYGPVQSARVLTHKNCGFVNFERVESAIAAKSGMNGKEIFPGAGPIRINFAKPASASGTPGHDGAFPSPSPDPFAKSSGSNGATGGGPATAHVAAANTSASAPNIPPLPEMTADIVQIVKSFGATDEDTYRISQSLQQAIQYTTFIDEIPAIQEPVTARVHDAPKLRDIRKRIDNQSLSQPEIESIAVDMLPEIAELSSDYLGNTVVQKLFQECSDNIRDAMLQEIAPHLAKIGVHKNGTWAAQKIIDVCKTPHQLSMIVEHLRPYTIPLFLDQYGNYVLQGCLQFGAPFNDFIFETMLSRMWEIAQGRYGARAMRACLESHSATKEQQRMLAAAIALHSVQLATNANGALLLTWFLDTCTFPQRRSVLAPQLVPYLVHLCTHKVAYLTVLKVINQKAESDARDAILQALFFTPKDQTLEAILSDHACGATLIFKVLTTPFFDESIRSQVVENVKNVLIRIKAQPSQGYKRLMDEVGMSSRNGGGNASRDHSVGPNASGDRQRSTSRQAQAQAQANAAAVQQNAQYGNQFLNPLNPATAAAGGFDVGGFPVPRSDNGEQTMPYGAYGAQGGMYNGATGSIPPMNMQQLQYQQNMMSRGTPPMNNFYPQMQAGFGGYNNANAQMDQFRGQNVANGSPIQPTGGAAGFAPPGFGMGVGMGGYGYPNGGMSNVPYVPEQPVGSRRGRVGHPPRQRSPRP

SEQ ID NO: 34146 - DNA, 5436 bp, Muscodor strobelii
  misc_feature: SGI EST ID NO. CUFF.81577.1
  misc_feature: Variant of the nucleotide sequence at SEQ ID NO 34144
gctgcggcacatcacctctgtccaaccccccaaacgagtgacacctggtcccccattcgattattcaattttctcctgagtcggggccacacatggtactatatcgcttctttcctcctccaccaccaccgaaccaccaacaccactccttcaaccctctcccatctccccgtctctcatctcgccgttctgcatctatctccttattctcttcccttctccaggctcgtcccgcttccacctagttgcccgccctgcccgagtatacgattatctatgtcattaatggagcctgtatattgatcacgatctgtttggccattgtaccggttttacgatttccccccctcgactctccactaagcgtctgcatcattcggaacaggcagcccgtctccgtatctcacgccgagtgacagacagaagcggaagaaaacgtgtaaagcactccaaacccgctgcaatccacttggagatactcgaggtgtgctgcacccgtgttccccaaccccggatcgaactctgagacgctgtcttcccgacgcatctcgacactccttcagatcatctcgcgatcaattctgcctcattgctacactagattctaatcgacctctcgagttttctagccgcactttgcctcgattcttgccctgttgtaatcgccctcagcgtatttcctgtgggataaattccttcgactctccgctcctttctggacctctgccctctccgctggcaccgcgcaaagagacgacgtaatcatacacttagtcaccagtcgccatcgcacccagcttccacgagataggcgagcacctccagacagcttgacacgacgtcaatttgaaccgtttcttacaactctccgctgtctgctacacgccgcacgcacggagatcaaattgctctgcccacatatcatccgtggagaagtccctacagctgcttctccgagacgacatcgcccgatgaaggccggatgcgtaattgataatgtcaactgctagaaacgaacacctcgccattggctaccctcccaagtctgccggtagccgaagaacgccctctcctgtcacccacgtctcgcccatcgagtccactgccagctctgccctcaagtcgcccttcggcatgtctggcctgggcaatccttcccgaacggcgggcgcctcgcggtccggcaccggttctccatcgcaagatgcccctggatccggcagactgttttccaaacgcgcgagagagatccaagcccaagaaggcattgccgtgcccgtgaacaacccatggggcggccctcccaccagcggcaactcaactcccctccgcgaaaacatccccgagtcgcccaccgatggattccccgacttcgcacagctgcccactcccgacagcctgccctcgacgaggcgtgcccgggctggcactgtgccctcccgattccccgccggcggactaggcaatggcctcctgcccatgcccacccactcggcccagtccctgtcctcccggccgaccccgtcccagagcccgtacaacaagacgccctctccgggactcgccgacaacatggaggcgtcacggtcgtctgctctgctttccagactccgggctggctcgatgccccagcgaagcccattcctccacacccccggtaccagctcgcctttcggaccgtccgtgttcagcacatggaaccctagcggtggccgggagagaggcaacactttggctagcatcgcaagcgctggctccaatggtcctagctctccggcgcagtcggccatgtccaaggagggctcaggtgacaacgacgttcatatgagaactcttgattatctgggcctggccgagacgccccagcctgcccgcgcccagttggcggcaccatatctgcctgggttggccgactacaccaggcaagccaaccggttccgatcctactcggtgaacaataaggacaagtatgccgacgaggaggactacgacgacgagagcattgctctggataaccaatatgctcaactgcaagaacagctcgctgcgaccaatgccgccattcacagccacaatcttgcggtgcagagcctgcagacactggcttccaacgctgtcacccggccccgtgcccgaactgcagggcttctcgatctcaccggcgctggttctcgacttggcgcccgcaactactatcccacgccctcgcgtctggacagctccatgactgccgcagacattgggctgggagacgagaaggagtatgacgcacttccatctgccgtcgcggctatgaacctgggcagatccaacagccgaaacaacggacttctgtcagccgacgaacccggtttggaaggcccgacgagtgcactgtggctgggcagcattccgacttcgaccactccgtccacgttgacggagatgttcaagtcgtacggcccagtccagtccgctcgagtcttgacgcacaagaactgcggctttgtcaactttgagagagtcgaaagtgctatcgcggccaaaagtggcatgaatgggaaagagatcttccccggagccggtcccatccgcatcaacttcgccaaacctgcttcagcctcggggacgcccggacacgacggtgctttcccaagtccaagtcccgaccctttcgcgaagagctcgggctccaatggtgcgacgggtggcggtcctgctactgcccatgtcgcggccgccaacacgtctgcctctgcccccaatatccccccgctccccgagatgacggcagatattgtgcagattgtcaagtccttcggcgccaccgacgaggatacctaccgcatctcccaaagcctccagcaagccattcagtataccactttcattgacgagatccctgccatccaggagcccgttactgcacgtgttcacgacgcgccgaaacttcgagatatccggaagcgcatcgataaccaaagcttgagccaaccggagatcgagagcatcgccgtcgatatgctccccgagattgccgaattgtcttcagattatctcggcaataccgtcgtgcaaaagctgttccaggagtgctccgacaatatccgcgatgccatgcttcaagaaattgctccacacctagccaagatcggtgtacacaagaatgggacctgggctgctcagaagatcatcgatgtctgcaagacaccccatcagctatccatgattgtagagcatttgcggccatataccattcccctcttcctcgaccagtatggcaactatgttcttcagggttgtttgcaattcggagcgccgttcaacgacttcatctttgagaccatgctgagccgaatgtgggagattgctcaaggtcgatatggcgctcgtgccatgcgggcctgtctcgagagccacagtgccaccaaggagcagcagcgcatgcttgccgctgccatcgctcttcacagtgttcagcttgcgactaatgctaatggagctcttctgctgacctggttcttggacacttgtaccttccctcagcgacgcagcgttttagccccccagctcgtaccatacctggtccatctctgtactcacaaggtcgcctacttgaccgtcttgaaggtcatcaaccagaaggcggaatccgatgcacgggatgccattttgcaagcgcttttctttactccgaaggatcagacgttggaggctatccttagtgatcatgcttgcggagctacgctgatcttcaaggttcttactaccccgttcttcgatgagagtattagaagtcaagtcgtcgaaaatgtgaagaatgttcttattcgaatcaaggcacagcctagccaaggttacaagcgcttgatggacgaggttggcatgtcgagtcgtaacggcggcggtaatgcttcgcgggatcattccgtcggccccaacgcatccggtgatcgtcaacgatctacctcgcgtcaagctcaagcacaggcacaagccaatgccgcagcggtccagcaaaacgcacagtacggaaaccagttcctcaacccattgaaccctgctactgctgccgctggaggtttcgatgtcggcggcttccctgttccccgaagtgacaatggggaacagaccatgccttacggtgcttatggagcccagggtggaatgtataatggggctaccggatcaattcctcccatgaatatgcagcaattgcagtatcaacagaacatgatgtcacgtggcaccccgccgatgaacaacttctaccctcagatgcaggcgggctttgggggatataacaacgccaatgcccagatggatcagttccgtggccagaatgtggccaatggcagccctatccagccaacaggcggcgctgctgggttcgctccaccaggttttgggatgggcgttggtatgggaggatatggttatcctaatgggggcatgtcaaacgtaccatatgtccccgaacaacctgtgggctctagacgcggacgcgtaggtcacccccctcgacagagatcgcctcgaccttaggaactcgtggcactaactgttggaggttcagagatgaatttagttctgatcgaatctctctctacctgatgcgagtttcaacttgtcgaaagccggccttgtacccacgaaacctctgtttgtgaacttgttatgggcgttgaggatggccgaaccctgatttgttgtctatggtacaagagctgtagggaacaaaagtgctgcatttcatgaacttagacggatagcctctccttcatcatgtgaccgggagggcaggagacctctttggagcattgtgttggatggcatttcatcatcacgttcgttcactgttcgatgtttatggcaatctatagatacgactacattgtttcgattacgaccaaccaaaaaatcacggcgactgctgaacaggatttagctccagcaccgggatggaatggcgttcttacagcgtcatcaaaatgtgagatggtggggactgagagtccacgagcgttttcgtgtccggagaggacatggagatgtgaaacgcgtggaggagctggggaattacgagctgaccgaacaggagctcggtgactgagtatagagcgagtgtgagactaaatgcggaatggacagacgcggtgcttcaattgagcgatcattaagaggacgagtacttctgaaatctgctacccctatgatggtgttttgatgtgatgtgaatatgaaatctagactgtctatttgtacattcatgctacctccgacggcccatgagcatgcttgaaattcccctatgccgcgtgactgacacttcacaactaacaattcgggttgaataccatccgcgctctcctcgacttagtaagacggcagtggctgtctgtcatcgtggtccttgcctggactctctccacactcgtcgcccgcgtgatatcttgc

SEQ ID NO: 34147 - DNA, 3495 bp, Muscodor strobelii
  misc_feature: SGI cDNA ID NO. 571794
  misc_feature: Reduced expression when VOC is produced
  misc_feature: Encodes the peptide sequence at SEQ ID NO 34148
atgtcaactgctagaaacgaacacctcgccattggctaccctcccaagtctgccggtagccgaagaacgccctctcctgtcacccacgtctcgcccatcgagtccactgccagctctgccctcaagtcgcccttcggcatgtctggcctgggcaatccttcccgaacggcgggcgcctcgcggtccggcaccggttctccatcgcaagatgcccctggatccggcagactgttttccaaacgcgcgagagagatccaagcccaagaaggcattgccgtgcccgtgaacaacccatggggcggccctcccaccagcggcaactcaactcccctccgcgaaaacatccccgagtcgcccaccgatggattccccgacttcgcacagctgcccactcccgacagcctgccctcgacgaggcgtgcccgggctggcactgtgccctcccgattccccgccggcggactaggcaatggcctcctgcccatgcccacccactcggcccagtccctgtcctcccggccgaccccgtcccagagcccgtacaacaagacgccctctccgggactcgccgacaacatggaggcgtcacggtcgtctgctctgctttccagactccgggctggctcgatgccccagcgaagcccattcctccacacccccggtaccagctcgcctttcggaccgtccgtgttcagcacatggaaccctagcggtggccgggagagaggcaacactttggctagcatcgcaagcgctggctccaatggtcctagctctccggcgcagtcggccatgtccaaggagggctcaggtgacaacgacgttcatatgagaactcttgattatctgggcctggccgagacgccccagcctgcccgcgcccagttggcggcaccatatctgcctgggttggccgactacaccaggcaagccaaccggttccgatcctactcggtgaacaataaggacaagtatgccgacgaggaggactacgacgacgagagcattgctctggataaccaatatgctcaactgcaagaacagctcgctgcgaccaatgccgccattcacagccacaatcttgcggtgcagagcctgcagacactggcttccaacgctgtcacccggccccgtgcccgaactgcagggcttctcgatctcaccggcgctggttctcgacttggcgcccgcaactactatcccacgccctcgcgtctggacagctccatgactgccgcagacattgggctgggagacgagaaggagtatgacgcacttccatctgccgtcgcggctatgaacctgggcagatccaacagccgaaacaacggacttctgtcagccgacgaacccggtttggaaggcccgacgagtgcactgtggctgggcagcattccgacttcgaccactccgtccacgttgacggagatgttcaagtcgtacggcccagtccagtccgctcgagtcttgacgcacaagaactgcggctttgtcaactttgagagagtcgaaagtgctatcgcggccaaaagtggcatgaatgggaaagagatcttccccggagccggtcccatccgcatcaacttcgccaaacctgcttcagcctcggggacgcccggacacgacggtgctttcccaagtccaagtcccgaccctttcgcgaagagctcgggctccaatggtgcgacgggtggcggtcctgctactgcccatgtcgcggccgccaacacgtctgcctctgcccccaatatccccccgctccccgagatgacggcagatattgtgcagattgtcaagtccttcggcgccaccgacgaggatacctaccgcatctcccaaagcctccagcaagccattcagtataccactttcattgacgagatccctgccatccaggagcccgttactgcacgtgttcacgacgcgccgaaacttcgagatatccggaagcgcatcgataaccaaagcttgagccaaccggagatcgagagcatcgccgtcgatatgctccccgagattgccgaattgtcttcagattatctcggcaataccgtcgtgcaaaagctgttccaggagtgctccgacaatatccgcgatgccatgcttcaagaaattgctccacacctagccaagatcggtgtacacaagaatgggacctgggctgctcagaagatcatcgatgtctgcaagacaccccatcagctatccatgattgtagagcatttgcggccatataccattcccctcttcctcgaccagtatggcaactatgttcttcagggttgtttgcaattcggagcgccgttcaacgacttcatctttgagaccatgctgagccgaatgtgggagattgctcaaggtcgatatggcgctcgtgccatgcgggcctgtctcgagagccacagtgccaccaaggagcagcagcgcatgcttgccgctgccatcgctcttcacagtgttcagcttgcgactaatgctaatggagctcttctgctgacctggttcttggacacttgtaccttccctcagcgacgcagcgttttagccccccagctcgtaccatacctggtccatctctgtactcacaaggtcgcctacttgaccgtcttgaaggtcatcaaccagaaggcggaatccgatgcacgggatgccattttgcaagcgcttttctttactccgaaggatcagacgttggaggctatccttagtgatcatgcttgcggagctacgctgatcttcaaggttcttactaccccgttcttcgatgagagtattagaagtcaagtcgtcgaaaatgtgaagaatgttcttattcgaatcaaggcacagcctagccaaggttacaagcgcttgatggacgaggttggcatgtcgagtcgtaacggcggcggtaatgcttcgcgggatcattccgtcggccccaacgcatccggtgatcgtcaacgatctacctcgcgtcaagctcaagcacaggcacaagccaatgccgcagcggtccagcaaaacgcacagtacggaaaccagttcctcaacccattgaaccctgctactgctgccgctggaggtttcgatgtcggcggcttccctgttccccgaagtgacaatggggaacagaccatgccttacggtgcttatggagcccagggtggaatgtataatggggctaccggatcaattcctcccatgaatatgcagcaattgcagtatcaacagaacatgatgtcacgtggcaccccgccgatgaacaacttctaccctcagatgcaggcgggctttgggggatataacaacgccaatgcccagatggatcagttccgtggccagaatgtggccaatggcagccctatccagccaacaggcggcgctgctgggttcgctccaccaggttttgggatgggcgttggtatgggaggatatggttatcctaatgggggcatgtcaaacgtaccatatgtccccgaacaacctgtgggctctagacgcggacgcagatga

SEQ ID NO: 34148 - protein, 1164 aa, Muscodor strobelii
  misc_feature: SGI Peptide ID NO. 571794
  misc_feature (741)..(774): Pfam Id: PF00806 Pfam Desc: Pumilio-family RNA binding repeat
  misc_feature (668)..(702): Pfam Id: PF00806 Pfam Desc: Pumilio-family RNA binding repeat
  misc_feature (460)..(527): Pfam Id: PF00076 Pfam Desc: RNA recognition motif. (a.k.a. RRM, RBD, or RNP domain)
  misc_feature (814)..(848): Pfam Id: PF00806 Pfam Desc: Pumilio-family RNA binding repeat
  misc_feature (460)..(518): Pfam Id: PF00076 Pfam Desc: RNA recognition motif. (a.k.a. RRM, RBD, or RNP domain)
  misc_feature (58)..(1164): NCBI GI: 145608856 Blast Desc: MGG_06318 [Magnaporthe grisea 70-15] gi|145016285|gb|EDK00775.1| MGG_06318 [Magnaporthe grisea 70-15]
  misc_feature (1)..(1155): NCBI GI: 164425256 Blast Desc: NCU06199 [Neurospora crassa OR74A] gi|157070853|gb|EAA33679.2| NCU06199 [Neurospora crassa OR74A]
  misc_feature (1)..(1163): NCBI GI: 256733163 Blast Desc: NECHADRAFT_37587 [Nectria haematococca mpVI 77-13-4]
  misc_feature (1)..(1118): NCBI GI: 116207938 Blast Desc: CHGG_03262 [Chaetomium globosum CBS 148.51] gi|88183859|gb|EAQ91327.1| CHGG_03262 [Chaetomium globosum CBS 148.51]
  misc_feature (1)..(1163): NCBI GI: 171686516 Blast Desc: protein product [Podospora anserina] gi|170943219|emb|CAP68872.1| protein product [Podospora anserina]
  misc_feature (1)..(1164): NCBI GI: 156033181 Blast Desc: SS1G_13666 [Sclerotinia sclerotiorum 1980] gi|154699069|gb|EDN98807.1| SS1G_13666 [Sclerotinia sclerotiorum 1980]
  misc_feature (1)..(1164): NCBI GI: 154290963 Blast Desc: BC1G_15545 [Botryotinia fuckeliana B05.10] gi|150847181|gb|EDN22374.1| BC1G_15545 [Botryotinia fuckeliana B05.10]
  misc_feature (31)..(1129): NCBI GI: 238501870 Blast Desc: RNA binding protein Jsn1, [Aspergillus flavus NRRL3357] gi|220692406|gb|EED48753.1| RNA binding protein Jsn1, [Aspergillus flavus NRRL3357]
  misc_feature (31)..(1129): NCBI GI: 169769400 Blast Desc: [Aspergillus oryzae RIB40] gi|83767028|dbj|BAE57168.1| protein product [Aspergillus oryzae]
  misc_feature (32)..(1163): NCBI GI: 261189994 Blast Desc: pumilio-family RNA binding repeat-containing protein [Ajellomyces dermatitidis SLH14081] gi|239591235|gb|EEQ73816.1| pumilio-family RNA binding repeat-containing protein [Ajellomyces
  misc_feature: Useful for introducing or modulating the production of volatile compounds
MSTARNEHLAIGYPPKSAGSRRTPSPVTHVSPIESTASSALKSPFGMSGLGNPSRTAGASRSGTGSPSQDAPGSGRLFSKRAREIQAQEGIAVPVNNPWGGPPTSGNSTPLRENIPESPTDGFPDFAQLPTPDSLPSTRRARAGTVPSRFPAGGLGNGLLPMPTHSAQSLSSRPTPSQSPYNKTPSPGLADNMEASRSSALLSRLRAGSMPQRSPFLHTPGTSSPFGPSVFSTWNPSGGRERGNTLASIASAGSNGPSSPAQSAMSKEGSGDNDVHMRTLDYLGLAETPQPARAQLAAPYLPGLADYTRQANRFRSYSVNNKDKYADEEDYDDESIALDNQYAQLQEQLAATNAAIHSHNLAVQSLQTLASNAVTRPRARTAGLLDLTGAGSRLGARNYYPTPSRLDSSMTAADIGLGDEKEYDALPSAVAAMNLGRSNSRNNGLLSADEPGLEGPTSALWLGSIPTSTTPSTLTEMFKSYGPVQSARVLTHKNCGFVNFERVESAIAAKSGMNGKEIFPGAGPIRINFAKPASASGTPGHDGAFPSPSPDPFAKSSGSNGATGGGPATAHVAAANTSASAPNIPPLPEMTADIVQIVKSFGATDEDTYRISQSLQQAIQYTTFIDEIPAIQEPVTARVHDAPKLRDIRKRIDNQSLSQPEIESIAVDMLPEIAELSSDYLGNTVVQKLFQECSDNIRDAMLQEIAPHLAKIGVHKNGTWAAQKIIDVCKTPHQLSMIVEHLRPYTIPLFLDQYGNYVLQGCLQFGAPFNDFIFETMLSRMWEIAQGRYGARAMRACLESHSATKEQQRMLAAAIALHSVQLATNANGALLLTWFLDTCTFPQRRSVLAPQLVPYLVHLCTHKVAYLTVLKVINQKAESDARDAILQALFFTPKDQTLEAILSDHACGATLIFKVLTTPFFDESIRSQVVENVKNVLIRIKAQPSQGYKRLMDEVGMSSRNGGGNASRDHSVGPNASGDRQRSTSRQAQAQAQANAAAVQQNAQYGNQFLNPLNPATAAAGGFDVGGFPVPRSDNGEQTMPYGAYGAQGGMYNGATGSIPPMNMQQLQYQQNMMSRGTPPMNNFYPQMQAGFGGYNNANAQMDQFRGQNVANGSPIQPTGGAAGFAPPGFGMGVGMGGYGYPNGGMSNVPYVPEQPVGSRRGRR

SEQ ID NO: 34149 - DNA, 5436 bp, Muscodor strobelii; identical to SEQ ID NO: 34146
  misc_feature: SGI EST ID NO. CUFF.81577.1
  misc_feature: Variant of the nucleotide sequence at SEQ ID NO 34147

SEQ ID NO: 34150 - DNA, 1419 bp, Muscodor strobelii
  misc_feature: SGI cDNA ID NO. 571795
  misc_feature: Encodes the peptide sequence at SEQ ID NO 34151
atggtgtcattgtcaccccctgagaggctagatgccttgtacaagttgcgtctgccgtcggccgatggtcggccagattccgaagaggacatacatccttggagagtcacgacgtttgaaccaatgctgtgtccattgttgcgaatcaggggccagcgttcgggaagccagccggatcaacatggccacatctttgctagggcaccagacatgcagcttgatagtcatgagaggcggaaaactgcactagtaaaacattacgatcccaaaaaccaggagcctacgccattcatctcatttacaacttcttttggcgacatcgagcatttggcgaagcaacgcactgctgaagggctgaataatcttacacttactgttatcgacccaaatgtgcggctccgtaaagggctgcctttactctctctccgggatgagatgcggtactacggccatgacaggttcttcaagagccatgaaagatatcgactggaagaaccaaactacgattaccttgctgtatggaaagtgatgcatgacgaagtcgtcgggcattggaactggtccacattgcgaaacatctctgatcattggtacaacgacattatccttccaacattcaaggaattcacgaaaagggccaggtatgatgtattagaagactggcttcacacccattacttttacattgaccaacatcaaaagctctcgaggaccttcgtccacatcaaaaacacggcattccatgagcgtcgctctgatatcaagtttgcaccgacagcgcgcgaagtgatgcgagaacaatggtgggcaaagtcgaaggtccttttgcagacgccacagccattcttaacaaaggtatcgagggaacagccgccttccgaagatacgctgaaagcatgggtgttcgcggcaactgaactgatcattcgaatgagacatatggtcaagtatcacgaagaattctcgaaattcttagcggatcgactcttcacttcgggttatcagataactccgctccaagttaaatggtcctatgatcgactcttaaagcaatgcctggagcaatcaggtggcgtagtgttagctgacatcaaaccatcattgttatccgacctcaaacaagtagctcgcaaacagcagcttacaacttgggataaaatgatatcgagcgcgagtttattttacacgcaatcgaagtcatttgttgggcacattggtagtacgattagcagcctcagcagcccgcttcttcgtagagacacgggatatagaaggccttatcagctcgccagcttggcgtggccacgatctggcccagagagaagcccagagatgcctatgggttcttacgagatgaaggaccgtgcattctttactgacgactacgatgaggagatcggttcgagtcgagaagaataa

SEQ ID NO: 34151 - protein, 472 aa, Muscodor strobelii
  misc_feature: SGI Peptide ID NO. 571795
  misc_feature (27)..(213): NCBI GI: 70986535 Blast Desc: AFUA_7G08560 [Aspergillus fumigatus Af293] gi|66846389|gb|EAL86721.1| AFUA_7G08560 [Aspergillus fumigatus Af293] gi|159122798|gb|EDP47919.1| conserved [Aspergillus A1163]
  misc_feature (16)..(208): NCBI GI: 240107491 Blast Desc: CPC735_067760 [Coccidioides posadasii C735 delta SOWgp]
  misc_feature (27)..(212): NCBI GI: 169777223 Blast Desc: [Aspergillus oryzae RIB40] gi|83771814|dbj|BAE61944.1| protein product [Aspergillus oryzae]
  misc_feature (19)..(207): NCBI GI: 261197596 Blast Desc: conserved [Ajellomyces dermatitidis SLH14081] gi|239595163|gb|EEQ77744.1| conserved [Ajellomyces dermatitidis SLH14081]
  misc_feature (170)..(220): NCBI GI: 46128509 Blast Desc: FG08632.1 [Gibberella zeae PH-1]
MVSLSPPERLDALYKLRLPSADGRPDSEEDIHPWRVTTFEPMLCPLLRIRGQRSGSQPDQHGHIFARAPDMQLDSHERRKTALVKHYDPKNQEPTPFISFTTSFGDIEHLAKQRTAEGLNNLTLTVIDPNVRLRKGLPLLSLRDEMRYYGHDRFFKSHERYRLEEPNYDYLAVWKVMHDEVVGHWNWSTLRNISDHWYNDIILPTFKEFTKRARYDVLEDWLHTHYFYIDQHQKLSRTFVHIKNTAFHERRSDIKFAPTAREVMREQWWAKSKVLLQTPQPFLTKVSREQPPSEDTLKAWVFAATELIIRMRHMVKYHEEFSKFLADRLFTSGYQITPLQVKWSYDRLLKQCLEQSGGVVLADIKPSLLSDLKQVARKQQLTTWDKMISSASLFYTQSKSFVGHIGSTISSLSSPLLRRDTGYRRPYQLASLAWPRSGPERSPEMPMGSYEMKDRAFFTDDYDEEIGSSREE

SEQ ID NO: 34152 - DNA, 222 bp, Muscodor strobelii
  misc_feature: SGI EST ID NO. CUFF.80903.0
  misc_feature: Variant of the nucleotide sequence at SEQ ID NO 34150
ggcttcacacccattacttttacattgaccaacatcaaaagctctcgaggaccttcgtccacatcaaaaacacggcattccatgagcgtcgctctgatatcaagtttgcaccgacagcgcgcgaagtgatgcgagaacaatggtgggcaaagtcgaaggtccttttgcagacgccacagccattcttaacaaaggtatcgagggaacagccgccttccgaag

SEQ ID NO: 34153 - DNA, 9003 bp, Muscodor strobelii
  misc_feature: SGI cDNA ID NO. 571796
  misc_feature: Encodes the peptide sequence at SEQ ID NO 34154
atggaacctatcgcgattatcggcttctccttcaagcttccccaaggtgtgaacgacgagtctactctctgggacctgctcgaaaaacggaagaatgcaatgacagcatggccagaaacacgcatatcaaatcaagccttactcgatgatggaccagagagggatatcaagggtcgcccacgtggtggtcacttcctcgcagaggacctcgcatgctttgatgcgccctttttctccctgactgcggaagaggcagcgagcatggatcctcaacaacggtgggcactggaggcgacataccacgcgtttgaaaatgctggtatcgccgtagaaggtctgcgagggagtcaaaccgctgtgtatggttcatctattgctgatgattacttgcgaatggtggctagagaccccgatactatgcctacaaccgcagtaaccggtacccaaactgcaatcctgcctaatcgaatcagctggttctatgacttgacagggcccagcgtatttgtcgatacagcttgctctagtagcatggtcgccctcgatattgcttgccaatcactccgtaattctgaatcatccatggctctcgttttcgggtctagtctcttgctggttccggacggctcattgatgttgaacaatatgcaatttacttcacctgacagcgtctgttggagctttgaccatcgagcaaatggatatggaaggggtgaaggcatcatcgccctggttttgaaacctgtctcgagagcactagagcatggggatatgatacgagcgattgtgcgatcgagcggatgcaaccaggatggtcacacgctaggactgacacagcccagctttgagtcacaagagaaactgatccgacacgtatatcagaaagcagggttggactacggagaaactcgatacgtagaggcgcacggtaacattctctggcacactgtagtagcaaaacgaatactgacagcattaggtaccggcacacctctaggcgatcctatcgagatgcgggcccttggcacagtcttcagggataatttctcagtcgaacagccgctttatgtaggctcgatcaaatccaatatcgggcatctcgaagctggtagcggactcgcaggtatcttgaagtcagtcatgatccttgagaaaggtatcattcccggcaatgcgttgttcgagaagctgaacccggccatcgacggtgatttcctacgtatcgaggtgccatcgtcgagtatcagatggcccacttcgggccttcgtcgaatttcagtcaattcatttgggttcggaggtacaaactcgcatgtcattctcgatagtgcctctcattttctcgcggaacgtggtctaacaggaaaccatatgtgcacgaagctctcgtcgcgtgaggaagagacgatcgatgcgccaaagcattatcacgtaggaccgccgtcagctaagagtggcttcagcaacactgccagattactcgtttggagtgccgcaagtgacacggctattcgccgtatgatttgtgaatatgagcactactatcaaactcaaaccgattgtgattccctgcatctggatcagcttgcctacactcttgctgctcggcgtagtaagatgagctggcgaacatttgccgtagttgatgaaagcgttagcattcgtgagaccgggcgattaccggccgtcgagcccacttattcagcgacacgaagtccaaaggctgcctttgtcttcaccggacagggagcccaatatgcaggtatggggctagagctgatgcgatatagtgctttccaacactccttgaagtgtggcgacttgattcttcgcagctttggatgccaatggactatattaggtatgctatcacaatatgcttatttgtccctggccttattgagactaacacaccaagacgagcttcagagtaaaagaaacattcatcggccagaatacagtcagcccttgacgactgcccttcaagtcgccttggtggacctaatgaaaagtcttgatgtcacgccatttaccgtggtcggccactcatcaggagaaattgcagcggcctatgcggcaggtgcgctgtctcaggagtcagcttacaagatagcgtactaccggggcaagatagcgaccaaaatcataaacaccaacccgcccagtgcgatgatgtccgtcagcctttcaaaagcagcctctatcgaacatttatcgaagcaagaattactatcttcggcagaaagactacaaattgcttgcgtgaatagtcccttcaattgcactctggctgggccggaaaaatcaattgatatctttcgcgccaagctaagccagagcaatatctttgctaaaaagctgagtacaggcgtggcatatcacacctcaatcatggaaaccgttgccactgagtatttggatctcataggcacgcttgagtccggctcacaagagacacatgctgcgtctatgatatcatcggtcactggacacgttatagtacctgagattttaagaacagcgcagtactgggtcaacaacctcacatctccagttcaattcttcgacgccatatcatcaactagtagcattgatgaattcatcgaagtagggccgagttcgacattgcgcaggtcggtgaaagagacgatagaccaaaagggagctagtaaaggcttagtcatctaccactcaatactgagaaggtccgagtctcccctccgaactactttagcacttatagggagattattctgtaatggtcatccggtatcagttgtgaacgcgaataaggaaggtcccgaggcagcggatagttccccttcattccttgccgattgtccaaaatatccatttgaccactcacgtcggtactggagcgaaggacggcttagtcgcgactatagactccgcggtaaaacgtttggtcagttcttgggaagacgatcacatgactggaatcccttagagccatgctggagaaacttctatagcatagagtcaacgccctggcttgcagatcatgtgatcagtggttttcatgttttccccggatcgggattattgatcatggcaatggaagcagtcagggaagtgtcgtcaactgatcgacatattattggatatctgatcaaagaggctcgttttctccgaccgctagtcgtatcagaagcgagccaacgcgccaccgaaactgttgtacggttgaaaaacgcgcgacaaacaagtgagaaaggatctccgtggtctgagataacgatattgtcttttagtcacagccagtggacggagtgcttttatggaagaatacaggtccaatatgaggaggccatcaccgaagtgggcggtggaagggctcaacgattggagcatgagcaaatttgcaggagtttcgtggaaatcaatgcttcatgcaagagtaccatcagttcacatacattttacagcttttgcaaggacattggcaatgattatggaacctcatttcaattgttggaaggagtccgctacacgcctaacaaatcagcaactgcttatatcaacacttctagaacttttggccagtctccggagatcgtacaccctaccgttcttgacgctgccttgcaactcactatcgcgccgatgtcagaccgcgcagctcgttcgactcctacgattgttgttcgccagttgatgaatgcgtggtttgcagctggcggactgcagacagcccgcattcaactaatgtccgtctctaccgcagaactaaatggaatcacacaggagagcagcttatttgggctagatgaaggtggatcggtagtgtgggctatcgagaatcttcacgttgcgcccgtggcgagagacgacacagggctcacccggcctgaaagcatattatatggaattgactggaagccccagttaagcttgtcaagtctcaaagatctgcaatcactatgtcctacttctcccactacacgcatggagatgcgtaaggagatgatggactgcttcctgagtctagactcggtgttgatcgatgtagtgagcatggcgctgagagagatatccgatgcagacgtcaggcgcgcggctcctcacctgcttcgttacgtggcggtcatgagaaaaacattcgggaatgaacgtcagattggcttgatgtcaaatattgacgaagaagaactatacctcaaagttgagcaatgtatcgcgcaatttgcgggtctggacttggctccacttgttgctcgcaacctcaaagcaattcttcgtggtgatatagatccgctagagcttatattctctacaggctctgcagggaggctctatgatgagatgtttctgttagtgtgtgatgaacgtctgggaagattcttggaattggctgcacacgaacatccagggcttaaaatacttgaagttggtgcaggtacaggatcagttactaatcacgttctctccttcctcgaccattttgaatcagaaaccggagcacgcctttttttagaatacgtatgtaccgatgcgtctcccagctttttcaatagtgccagagacagattccacaagttcgggcagagaatgaagttccaggttttggacttagagacaaaccctctacaacaaggcttcaaacctgctgcctacgacctcgtcattgcgggcagtgtgttgcatgctacatcgcacttgttagcaactatgcagaatatccgcaaaatggtcaaaccaggaggacatcttatcacccttgagatagtcgctcccgaggtagcttgcgttaatatcacgtttggtgtgcttcctgggtggtggctcggcaaagaagagtggagatcgaatagccccctggcgacagaagaacaatggcacgttatctcgaggaaagctggcttctctggtaatgatttaatcatcagagactttgaaggtgacacatggcacgcggccagtatcctaatcaccaaggccatcgaagacttccgaactgaggatcaaatcttgcacatcattatcgttgtcgaatctgcatctgatgaacaaattgccttagagaagatgttgttgagtaacaagagtgcgggaacagtgaaaaagactgtgagaatcgcgtatttgagcgacctggacaatctcgaagacaccttaatggtggataacaatagtatcatcgtcgttctccttgagctcggaagaacatatctctctggcatcacaaaacaaggcttccacagcatacaacgtctgatacgactctctaacaaccttttatgggttacatcttatagcgtgcaaagctcctcttcctcgaagcatagtttggcgctaggcatgttgagaacgatccgctcggaatcgagcgaaaagcatattgtaacacttctcattgaactacgagctcaagacacatcagaagagtgcgcgacatacattgccaaggtgatagaaaagacatttgcgtcaggatctccggagctcgaattcatcgctcgtgatggatgtctcctgacaggaagattagcaaaagagttgtcgttggaacgagagatgctatcgatgatgaagccatctctggaggcagggctttggctacctggaccggcgttgaaactcaaaatcgggacacccggatctctggatacgcttgtcttcgtcgaggatgatacggatgatggccagttggaagcggacggtatcgaaatacaagctacagtatggccgataagctttcgagatgttttcgtttcccttggacgcttgcctggagatgaactaggctttgaatgcgcaggtactgtgaggagagtcggttccaattgtccgaaaactattcatctcggacaaagagtttgtatgatagctccagggtgcatgcgtactttccctcgagcgacagctgaagacgtttatccaatccctgatgggataccagacgaggttgccgtgtccgctctcaatcctggtgcaacagcgtatcacgcgctgattaatctagcccaacttcagcgtggtgaaaaggttctcatacattcagcttctggtagtactggccaaatggccctctggattgcaaaaatgatcggtgcggaaatatttgctactgttgggttcgacgagaaaaaacagcgacttatggatcatttcaagattccggaagatcacatattctacagcagaaacacgtcttttgcgcaggctctcagacggcacaccgctgggaaaggagttgatgtagtgttgaactcactctccggtgataacctccacgcgtcttggggttgtatcgctccatatggtcggtttgtcgagatcggcagaacggacatctcccaaaacaccggtctgccaatgtcttcatttgctggaaacgttagcttcttcgctatggacttacatcacatggcattcacacgaagaagctttctacgatccattatagtatcactcatggacctccttgcccagaatcagatccattatccagacccaatccatagatatcctttgtcagatattcaaagggcattcagatacattcagagtggaaagaacactggccgaactgtcataaccgtgaatccttcaacaaccgtatctaaattgattcaagttcgaaagtcatggtcattcaatagtgatggaacatacatggtcgttggaggacttgggggaattggtcgtgcgataacaaagtggatggcatcgaaaggagctaagtacctcgtcttgccgtcgcggtcaggaccaacgtcactcgaagcatccagcctcattacccatcttaagagaagaggtattgaggtttcagcacccgtttgtgatacatccaacaagatatctctgtcgacattactccacgattgcgccaaaagcatgcccccaatcaaaggctgtattaatgccgctatggttcttcaggacgctatcttcgaaaacatgagccacgcacagtgggagctgacgatccaatccaaggttgacgtttcctggaatctggatcggttactccctgagcttgacttcttcgttcttctgtcttccttgtcaggaatatatggaggtgttgcgcaggccaactacgctgctggctgtactttccaggacgaattatccaggcgacgcacttctaacgggaaaaataccattagtcttgacttgggatggatgagaactatcgggatcgttgcggaaacggacaggtatcgatgggctagggctcatgcatccgacatgattgccttggaagaagaagagctaatggcagtcctagcactttactgttgtcctcccagccagaaacttcctccagaaaagagtcaactccttgttggcccagccacgccagcatattgtgttgctcataaccagacgcccgatgcatttgtattacgtccattattttccacaataacatcgcactcagaagaactctcatctagcacccgcaaactaaagtctggcgatccctctttcttattcaagcaagcgaagacgtctcgagaacagaaagatattgttaccagtgcattaaccacaaagctagcacacatcctctccatctccaaagagacaatgcagtcgtccgatcatttatctcgttatggagtagactcgttagtggcaatagaacttcgcaactggcttagaaacacatttgacgccagcgtcgctatttttgaaatgatgggcactgcgacagtcgcatctattagtggcctggttgctggtcgagcgatgggcaaaccccaatccgggacggatccaagtactaataaccctgcattagatcatcatcgagagaccgaagaacatgtgatgaaagctctcagggagaaatacaccagaaatcttcaatttcccaggctttctaatgggcgaagtgaggcccagagcgaggaacaagttgtgatactgacaggttcaactggctcactcggcttatacttgttagactgcatggtgaagagtcctcgggtcaaaaaaataatttgcttggacagagcggcggatggtggtgcaaaatatcatgcgttctttgcgcccaatttcgactccaaatgcactttccttcaagcagatctcagccatccatacttcggcttggatcctgctgcctactatgcgctgctacaagaggcagatcgcgttatacacaatgcttgggaagtaaacatatcgatcccgcttgaggcgtttgagccgctcatatgtgggacgcgccacatcgccgatttcgccgctacggcttccaagcgtgtcgtcgtcatttttatctcatccgctgccacctgtcatcgttgggacagttgtgtcgctggagcagttcccgagcatcgattggatgacttgaatctccctatcactggatacggccggagcaaattggtaggatgcctcttgcttgaagatgccgctaaagtaggcgattttcgtgtcgctatccttcgcatcgggcagattgctgggccgaaaagtggtatcagtacaacgacatggaataaacgagaatggctgccgacaatcatcgctcaaagtctccatcttagagtgctaccaagagaccttggacgcttgaacaacatagactggattcctattgagcaagttgcaaacatcgtgcttgagattgctggcgtgctacaagaagtctcgcctgaaactattcagggttattacaacgtagttagcccactaactacatcatgggacaatggctttgcttctgcaatccaagagttctacggtcacgaccgtgtcagacagctcgtgagcttcaaggaatgggttcacagactcgaggaaagcgaagcttacgggagtgatgagtgggaaagtcatcacctcgacgtaagtcctggcctcaagctgcttcctacgtatttggcggtagctgctggcaatgagggtgtcgtattcagtgcggagcgctccaaactagcgagcccaacgctaaggacaacgacagctataacgccatatttgatgaagtattggtgtcaacagtggaagttctag

SEQ ID NO: 34154 - protein, 3000 aa, Muscodor strobelii
  misc_feature: SGI Peptide ID NO. 571796
  misc_feature (576)..(924): Pfam Id: PF00698 Pfam Desc: Acyl transferase domain
  misc_feature (2210)..(2375): Pfam Id: PF00106 Pfam Desc: short chain dehydrogenase
  misc_feature (1999)..(2151): Pfam Id: PF00107 Pfam Desc: Zinc-binding dehydrogenase
  misc_feature (2632)..(2891): Pfam Id: PF01370 Pfam Desc: NAD dependent epimerase/dehydratase family
  misc_feature (2)..(252): Pfam Id: PF00109 Pfam Desc: Beta-ketoacyl synthase, N-terminal domain
  misc_feature (260)..(395): Pfam Id: PF02801 Pfam Desc: Beta-ketoacyl synthase, C-terminal domain
  misc_feature (2210)..(2388): Pfam Id: PF08659 Pfam Desc: KR domain
  misc_feature (1468)..(1579): Pfam Id: PF08241 Pfam Desc: Methyltransferase domain
  misc_feature (1468)..(1577): Pfam Id: PF08242 Pfam Desc: Methyltransferase domain
  misc_feature (2634)..(2869): Pfam Id: PF07993 Pfam Desc: Male sterility protein
  misc_feature (650)..(924): Pfam Id: PF00698 Pfam Desc: Acyl transferase domain
  misc_feature (576)..(603): Pfam Id: PF00698 Pfam Desc: Acyl transferase domain
  misc_feature (327)..(395): Pfam Id: PF02801 Pfam Desc: Beta-ketoacyl synthase, C-terminal domain
  misc_feature (260)..(310): Pfam Id: PF02801 Pfam Desc: Beta-ketoacyl synthase, C-terminal domain
  misc_feature (4)..(2579): NCBI GI: 256727768 Blast Desc: NECHADRAFT_46230 [Nectria haematococca mpVI 77-13-4]
  misc_feature (2)..(2574): NCBI GI: 145607551 Blast Desc: MGG_12214 [Magnaporthe grisea 70-15] gi|145015078|gb|EDJ99646.1| MGG_12214 [Magnaporthe grisea 70-15]
  misc_feature (1)..(2574): NCBI GI: 40806899 Blast Desc: polyketide synthase [Gibberella moniliformis]
  misc_feature (1)..(2574): NCBI GI: 46118226 Blast Desc: FG04694.1 [Gibberella zeae PH-1]
  misc_feature (1)..(2574): NCBI GI: 119497865 Blast Desc: polyketide synthase, [Neosartorya fischeri NRRL 181] gi|119413854|gb|EAW23793.1| polyketide synthase, [Neosartorya fischeri NRRL 181]
  misc_feature (61)..(2536): NCBI GI: 40787326 Blast Desc: polyketide synthase [Botryotinia fuckeliana]
  misc_feature (1)..(2574): NCBI GI: 159128679 Blast Desc: polyketide synthase, [Aspergillus fumigatus A1163]
  misc_feature (1)..(2574): NCBI GI: 146322741 Blast Desc: polyketide synthase [Aspergillus fumigatus Af293] gi|129556779|gb|EAL87227.2| polyketide synthase, [Aspergillus fumigatus Af293]
  misc_feature (3)..(2574): NCBI GI: 121711140 Blast Desc: polyketide synthase, [Aspergillus clavatus NRRL 1] gi|119401336|gb|EAW11760.1| polyketide synthase, [Aspergillus clavatus NRRL 1]
  misc_feature (1)..(2570): NCBI GI: 145259396 Blast Desc: An04g10030 [Aspergillus niger] gi|134074982|emb|CAK39062.1| protein product [Aspergillus niger]
  misc_feature (2)..(1828): SWISSPROT Homolog: EC 2.3.1.161 Lovastatin nonaketide synthase
  misc_feature: Useful for fungicidal and/or biocontrol applications
MEPIAIIGFSFKLPQGVNDESTLWDLLEKRKNAMTAWPETRISNQALLDDGPERDIKGRPRGGHFLAEDLACFDAPFFSLTAEEAASMDPQQRWALEATYHAFENAGIAVEGLRGSQTAVYGSSIADDYLRMVARDPDTMPTTAVTGTQTAILPNRISWFYDLTGPSVFVDTACSSSMVALDIACQSLRNSESSMALVFGSSLLLVPDGSLMLNNMQFTSPDSVCWSFDHRANGYGRGEGIIALVLKPVSRALEHGDMIRAIVRSSGCNQDGHTLGLTQPSFESQEKLIRHVYQKAGLDYGETRYVEAHGNILWHTVVAKRILTALGTGTPLGDPIEMRALGTVFRDNFSVEQPLYVGSIKSNIGHLEAGSGLAGILKSVMILEKGIIPGNALFEKLNPAIDGDFLRIEVPSSSIRWPTSGLRRISVNSFGFGGTNSHVILDSASHFLAERGLTGNHMCTKLSSREEETIDAPKHYHVGPPSAKSGFSNTARLLVWSAASDTAIRRMICEYEHYYQTQTDCDSLHLDQLAYTLAARRSKMSWRTFAVVDESVSIRETGRLPAVEPTYSATRSPKAAFVFTGQGAQYAGMGLELMRYSAFQHSLKCGDLILRSFGCQWTILGMLSQYAYLSLALLRLTHQDELQSKRNIHRPEYSQPLTTALQVALVDLMKSLDVTPFTVVGHSSGEIAAAYAAGALSQESAYKIAYYRGKIATKIINTNPPSAMMSVSLSKAASIEHLSKQELLSSAERLQIACVNSPFNCTLAGPEKSIDIFRAKLSQSNIFAKKLSTGVAYHTSIMETVATEYLDLIGTLESGSQETHAASMISSVTGHVIVPEILRTAQYWVNNLTSPVQFFDAISSTSSIDEFIEVGPSSTLRRSVKETIDQKGASKGLVIYHSILRRSESPLRTTLALIGRLFCNGHPVSVVNANKEGPEAADSSPSFLADCPKYPFDHSRRYWSEGRLSRDYRLRGKTFGQFLGRRSHDWNPLEPCWRNFYSIESTPWLADHVISGFHVFPGSGLLIMAMEAVREVSSTDRHIIGYLIKEARFLRPLVVSEASQRATETVVRLKNARQTSEKGSPWSEITILSFSHSQWTECFYGRIQVQYEEAITEVGGGRAQRLEHEQICRSFVEINASCKSTISSHTFYSFCKDIGNDYGTSFQLLEGVRYTPNKSATAYINTSRTFGQSPEIVHPTVLDAALQLTIAPMSDRAARSTPTIVVRQLMNAWFAAGGLQTARIQLMSVSTAELNGITQESSLFGLDEGGSVVWAIENLHVAPVARDDTGLTRPESILYGIDWKPQLSLSSLKDLQSLCPTSPTTRMEMRKEMMDCFLSLDSVLIDVVSMALREISDADVRRAAPHLLRYVAVMRKTFGNERQIGLMSNIDEEELYLKVEQCIAQFAGLDLAPLVARNLKAILRGDIDPLELIFSTGSAGRLYDEMFLLVCDERLGRFLELAAHEHPGLKILEVGAGTGSVTNHVLSFLDHFESETGARLFLEYVCTDASPSFFNSARDRFHKFGQRMKFQVLDLETNPLQQGFKPAAYDLVIAGSVLHATSHLLATMQNIRKMVKPGGHLITLEIVAPEVACVNITFGVLPGWWLGKEEWRSNSPLATEEQWHVISRKAGFSGNDLIIRDFEGDTWHAASILITKAIEDFRTEDQILHIIIVVESASDEQIALEKMLLSNKSAGTVKKTVRIAYLSDLDNLEDTLMVDNNSIIVVLLELGRTYLSGITKQGFHSIQRLIRLSNNLLWVTSYSVQSSSSSKHSLALGMLRTIRSESSEKHIVTLLIELRAQDTSEECATYIAKVIEKTFASGSPELEFIARDGCLLTGRLAKELSLEREMLSMMKPSLEAGLWLPGPALKLKIGTPGSLDTLVFVEDDTDDGQLEADGIEIQATVWPISFRDVFVSLGRLPGDELGFECAGTVRRVGSNCPKTIHLGQRVCMIAPGCMRTFPRATAEDVYPIPDGIPDEVAVSALNPGATAYHALINLAQLQRGEKVLIHSASGSTGQMALWIAKMIGAEIFATVGFDEKKQRLMDHFKIPEDHIFYSRNTSFAQALRRHTAGKGVDVVLNSLSGDNLHASWGCIAPYGRFVEIGRTDISQNTGLPMSSFAGNVSFFAMDLHHMAFTRRSFLRSIIVSLMDLLAQNQIHYPDPIHRYPLSDIQRAFRYIQSGKNTGRTVITVNPSTTVSKLIQVRKSWSFNSDGTYMVVGGLGGIGRAITKWMASKGAKYLVLPSRSGPTSLEASSLITHLKRRGIEVSAPVCDTSNKISLSTLLHDCAKSMPPIKGCINAAMVLQDAIFENMSHAQWELTIQSKVDVSWNLDRLLPELDFFVLLSSLSGIYGGVAQANYAAGCTFQDELSRRRTSNGKNTISLDLGWMRTIGIVAETDRYRWARAHASDMIALEEEELMAVLALYCCPPSQKLPPEKSQLLVGPATPAYCVAHNQTPDAFVLRPLFSTITSHSEELSSSTRKLKSGDPSFLFKQAKTSREQKDIVTSALTTKLAHILSISKETMQSSDHLSRYGVDSLVAIELRNWLRNTFDASVAIFEMMGTATVASISGLVAGRAMGKPQSGTDPSTNNPALDHHRETEEHVMKALREKYTRNLQFPRLSNGRSEAQSEEQVVILTGSTGSLGLYLLDCMVKSPRVKKIICLDRAADGGAKYHAFFAPNFDSKCTFLQADLSHPYFGLDPAAYYALLQEADRVIHNAWEVNISIPLEAFEPLICGTRHIADFAATASKRVVVIFISSAATCHRWDSCVAGAVPEHRLDDLNLPITGYGRSKLVGCLLLEDAAKVGDFRVAILRIGQIAGPKSGISTTTWNKREWLPTIIAQSLHLRVLPRDLGRLNNIDWIPIEQVANIVLEIAGVLQEVSPETIQGYYNVVSPLTTSWDNGFASAIQEFYGHDRVRQLVSFKEWVHRLEESEAYGSDEWESHHLDVSPGLKLLPTYLAVAAGNEGVVFSAERSKLASPTLRTTTAITPYLMKYWCQQWKF

SEQ ID NO: 34155 - DNA, 1878 bp, Muscodor strobelii
  misc_feature: SGI cDNA ID NO. 571797
  misc_feature: Encodes the peptide sequence at SEQ ID NO 34156
atggccatcttcactcagcttcctgagcatattcaagaggtggatatagttattgtcggagctggagcagcggggtgcgtagttgcctcaaggctcacagaggccgatcctaaactatcaattctcgtcatcgagcggggcccaaataatcgcgatgatcctaccgtaaggaccccgttcctctggatagcaagttacacgcccgatagtcctagggtcttaacgcacacggctggtaaagagccgcaactggctgaccgagagtgtattgtacatgttggtaatggggtaggaggagggacatccgtcaacctaatgatgtatacaagagctcagggggtcgactttgactcatgggctacggagggttggactgcaagtggccttttaccgtatctaaagaagcttgaaacataccatggtccgggtaaagaggagtaccatgggtatcatggacctgtgcaagtctccagtggaccgtttcgctcgatggacgcagagaatagtttcgtttccgctatgaaagaagtcggatatcccgagcctgaagatctccaagattttgaatctattggtgtagggcgtatccagaaatacgtgtctccagggggccaaaggcaggatgtcgcccacacgtatctgcatccgaagctcgaggatacgcaacacccgaatctccacgtcttagcagagacacaggttacaagggtcacttttgacagtgataatagggcttctggagttgaattccgatcaagttcgtttaccgagtctagctcggacgaagatcgtggaacgagaagggtaaaagtaaagaagcagatagttctctcagccggcacgctcagtacgccgtccatcttggagagatccggagttggtgacttcaatgtcctagaacaagcccggattaccggactcgttgacttacccggcgttggacacgattttcaggatcatcatatcactatgtacgtatacaaaacggagctgcctgcagatgctaccttcgataaaatgcataccggacaggtggatgttccatcgctcctgaccagtcaggataacatactcggatggaatggtatcgacgcgtcgtccaagcttcggcctacgccatctgagattgacgctctcggtcccaaattcagagaagcctgggatagggactataaagatagccctagcaagccccttggctctgtcatatttataacaggtctacttggcgaccgttccgacgctcctaccgaacagcacttctccatgggcgtgttcacaacttatccgtactctcggggccatattgtaagcggatccatcgtttctatgcgcataatcttctttctgtccattaactcacggttgaagcatgttactgggccgaatgcggaagacgcctctgatttcaagaccggctacctcagtgaccaagaccaccttgatttgaagacgcaagtgtggctatacaaggttcagcgcgatgtcgcgcgccggatgagcattaaccgtggccatgttccctaccgtcaccctattttctcacatgagtccaaggcggcttatgcaccacagctagatgctgagtctaatgaaaagattgattacagccctgaagacgacgcagttatcgaagattggatccgtcgaaacatgacaacatgctggcatggagtaggtacatgcaagatggcaccacgagagcaacgaggtgtggtagatgagacgttagcagtacatggcgttaggggtctgaagattgccgacttgagcatagtgccgcagaacgtctgtgcaaacacaatgaacacagcattggtaattggggaaaaggcggctgatatcatcatccaagaactaggtcttggtggcgagtag

SEQ ID NO: 34156 - protein, 625 aa, Muscodor strobelii
  misc_feature: SGI Peptide ID NO. 571797
  misc_feature (423)..(612): Pfam Id: PF05199 Pfam Desc: GMC oxidoreductase
  misc_feature (14)..(335): Pfam Id: PF00732 Pfam Desc: GMC oxidoreductase
  misc_feature (15)..(48): Pfam Id: PF01266 Pfam Desc: FAD dependent oxidoreductase
  misc_feature (15)..(51): Pfam Id: PF00890 Pfam Desc: FAD binding domain
  misc_feature (534)..(612): Pfam Id: PF05199 Pfam Desc: GMC oxidoreductase
  misc_feature (15)..(51): Pfam Id: PF05834 Pfam Desc: Lycopene cyclase protein
  misc_feature (15)..(47): Pfam Id: PF07992 Pfam Desc: Pyridine nucleotide-disulphide oxidoreductase
  misc_feature (1)..(622): NCBI GI: 46115592 Blast Desc: FG03638.1 [Gibberella zeae PH-1]
  misc_feature (1)..(623): NCBI GI: 256722595 Blast Desc: [Nectria haematococca mpVI 77-13-4]
  misc_feature (1)..(622): NCBI GI: 242821127 Blast Desc: glucose dehydrogenase, [Talaromyces stipitatus ATCC 10500] gi|218712539|gb|EED11964.1| glucose dehydrogenase, [Talaromyces stipitatus ATCC 10500]
  misc_feature (1)..(622): NCBI GI: 256730307 Blast Desc: NECHADRAFT_94976 [Nectria haematococca mpVI 77-13-4]
  misc_feature (1)..(620): NCBI GI: 189210457 Blast Desc: alcohol dehydrogenase [Pyrenophora tritici-repentis Pt-1C-BFP] gi|187977653|gb|EDU44279.1| alcohol dehydrogenase [Pyrenophora tritici-repentis Pt-1C-BFP]
  misc_feature (1)..(625): NCBI GI: 256723917 Blast Desc: NECHADRAFT_92276 [Nectria haematococca mpVI 77-13-4]
  misc_feature (1)..(622): NCBI GI: 145250491 Blast Desc: An15g02200 [Aspergillus niger] gi|134082279|emb|CAK42323.1| protein product [Aspergillus niger]
  misc_feature (1)..(622): NCBI GI: 261361015 Blast Desc: alcohol oxidase [Verticillium albo-atrum VaMs.102]
  misc_feature (1)..(623): NCBI GI: 171677813 Blast Desc: protein product [Podospora anserina] gi|170936975|emb|CAP61633.1| protein product [Podospora anserina]
  misc_feature (1)..(622): NCBI GI: 256725109 Blast Desc: NECHADRAFT_98136 [Nectria haematococca mpVI 77-13-4]
  misc_feature (36)..(624): SWISSPROT Homolog: EC 1.1.3.13 Alcohol oxidase
MAIFTQLPEHIQEVDIVIVGAGAAGCVVASRLTEADPKLSILVIERGPNNRDDPTVRTPFLWIASYTPDSPRVLTHTAGKEPQLADRECIVHVGNGVGGGTSVNLMMYTRAQGVDFDSWATEGWTASGLLPYLKKLETYHGPGKEEYHGYHGPVQVSSGPFRSMDAENSFVSAMKEVGYPEPEDLQDFESIGVGRIQKYVSPGGQRQDVAHTYLHPKLEDTQHPNLHVLAETQVTRVTFDSDNRASGVEFRSSSFTESSSDEDRGTRRVKVKKQIVLSAGTLSTPSILERSGVGDFNVLEQARITGLVDLPGVGHDFQDHHITMYVYKTELPADATFDKMHTGQVDVPSLLTSQDNILGWNGIDASSKLRPTPSEIDALGPKFREAWDRDYKDSPSKPLGSVIFITGLLGDRSDAPTEQHFSMGVFTTYPYSRGHIVSGSIVSMRIIFFLSINSRLKHVTGPNAEDASDFKTGYLSDQDHLDLKTQVWLYKVQRDVARRMSINRGHVPYRHPIFSHESKAAYAPQLDAESNEKIDYSPEDDAVIEDWIRRNMTTCWHGVGTCKMAPREQRGVVDETLAVHGVRGLKIADLSIVPQNVCANTMNTALVIGEKAADIIIQELGLGGE

SEQ ID NO: 34157 - DNA, 2169 bp, Muscodor strobelii
  misc_feature: SGI cDNA ID NO. 571798
  misc_feature: Encodes the peptide sequence at SEQ ID NO 34158
atgtcgacaatcaacgtttcggagctagtaattgctcatgacccgggcgaagtagtgcgtcaaaagtactctctggtcatgccaatgtatgtgaggataaaaaaccagtttccggatttgtggagggtattgccaaccaaccaacggaaagagatagtcgaactggtcatgcatggtttggattttccggatgaagagtatactagaattctccacgaagaactgtttagcgctcagattgtgaccgataatttcgtacccgaactagcccaacacgttttcacaacctctctccgcgaacagtgtctaactggccagaacggtcgaattggcgactgtgctaggatccaaaacctttgggaaaacgcacctgaaagccaaaaaacagaccccaacgagaagctctacacggtgtttgtatacaacgggccggacgaccattatggggttaaagttgacaaagctagttctaaaaaattggaacaaaacgaggatgctgtacgaaacggatattgcctgcttgaacaacctgctatagcacttatagatcggcagcattctcgtatcgtattcctgggaaatattttcaggcttgtcgaattaacactaccggagaacaggaatccggtgctcaatgacttcagacagcatacgttggcgcgcgttgctgaacttgagccagccgagggcgaagaaaacattgtcggacactttgcccgtcttgcaaaacaacagcacgatctacaagtaaccaatacgaccgagcctgaccccgaaaatccacgccttttacatcaattatattcagattggtccggaactaacattttgtccatagaagaccagaatggtaaggccaccagcctaaaatacgacgtctatgaggcaatcgacgcatatgttgatctccaatatgatattctccagtctcgctacacatggctctacatatacaatcttttggagacactcggcgcgactactaatgagaggcaacgtgatataccactattggacctcaccaatgcttgccattcagaatttgtccgattgacgacaaaattgaggcgtcattttgttgatgcatctaactgttctcgggcaacgcgcgattgtcttgctcgacgcgacgatggccagagccacatgctctacgtcggcagcattcctccagaaatggagaggaaggccccattatcatttttcctgttacagctatgccaaaacggggtgagtacggaggccgccctctcgttgcttgctaaaatcaatgctaatatacaaaagttgacggacgaagaagtatatacctcgaacccatccgttctccattgcattggcagcattaactttattgccagtttcatggaagcattgtcgaagcatgtgaaaatgcctcgctacaaaagcacgaaatctcaacggttccgggatgccattcgagccatcaaaacggatttagacaagatgaaaccgtctcttgagcttcatgaatttgtatttccgtatgggaagctcacaactcccggtaataacgaaaaggctgtccaggctctagatggcgccatttcgaaaaggcgcggcgttcaaacattagatgctttatttaacaatgttttaaatcaatgtgcgatctctctctcgactcgattaaaaaattgggctcagaaagagccggacagaaaggccgacgaagcacgcaagcagtctagtagcttcgtacctcttcctgcccgatcccctcctcggccggcctctcatccacgaggcgaacgcgacgagcagtcgggaaatgatgacgatgacatatccgccgaaccccctgcgggacagcctgcgaacattcccatccctccaccactccctgtagtatttaaagtcaccgctgagatcgtctccatagcggaggagttgtatgctcatggccatggctctatccggtggagtgattttgtaaaattaatgaccgctataggtttttcagtagtacccacgacaggctctgaattcaggtttatagcaccgcctactttggagaataactccccagcgattaccatacattctccgcatccggcaccgcaatgggagacaaagagaaggcaaagagttggaagacgcctaactcgcgtattcggtataaacggaaactcttttgtggaacaataa

SEQ ID NO: 34158 - protein, 722 aa, Muscodor strobelii
  misc_feature: SGI Peptide ID NO. 571798
  misc_feature (263)..(719): NCBI GI: 156031186 Blast Desc: SS1G_14201 [Sclerotinia sclerotiorum 1980] gi|154700592|gb|EDO00331.1| SS1G_14201 [Sclerotinia sclerotiorum 1980]
  misc_feature (261)..(719): NCBI GI: 238508370 Blast Desc: conserved [Aspergillus flavus NRRL3357] gi|220688899|gb|EED45251.1| conserved [Aspergillus flavus NRRL3357]
  misc_feature (91)..(719): NCBI GI: 119501795 Blast Desc: NFIA_045770 [Neosartorya fischeri NRRL 181] gi|119415820|gb|EAW25757.1| conserved [Neosartorya fischeri NRRL 181]
  misc_feature (261)..(713): NCBI GI: 169784480 Blast Desc: [Aspergillus oryzae RIB40] gi|83775448|dbj|BAE65568.1| protein product [Aspergillus oryzae]
  misc_feature (41)..(691): NCBI GI: 166163610 Blast Desc: ipa protein [Leptosphaeria maculans]
  misc_feature (17)..(634): NCBI GI: 169615022 Blast Desc: SNOG_10665 [Phaeosphaeria nodorum SN15] gi|160702866|gb|EAT82059.2| SNOG_10665 [Phaeosphaeria nodorum SN15]
  misc_feature (289)..(649): NCBI GI: 159121943 Blast Desc: conserved [Aspergillus fumigatus A1163]
  misc_feature (644)..(722): NCBI GI: 169612970 Blast Desc: SNOG_09613 [Phaeosphaeria nodorum SN15] gi|160702619|gb|EAT82878.2| SNOG_09613 [Phaeosphaeria nodorum SN15]
  misc_feature (602)..(719): NCBI GI: 115400411 Blast Desc: [Aspergillus terreus NIH2624] gi|114191460|gb|EAU33160.1| [Aspergillus terreus NIH2624]
  misc_feature (646)..(722): NCBI GI: 169847197 Blast Desc: [Coprinopsis cinerea okayama7#130] gi|116508562|gb|EAU91457.1| [Coprinopsis cinerea okayama7#130]
MSTINVSELVIAHDPGEVVRQKYSLVMPMYVRIKNQFPDLWRVLPTNQRKEIVELVMHGLDFPDEEYTRILHEELFSAQIVTDNFVPELAQHVFTTSLREQCLTGQNGRIGDCARIQNLWENAPESQKTDPNEKLYTVFVYNGPDDHYGVKVDKASSKKLEQNEDAVRNGYCLLEQPAIALIDRQHSRIVFLGNIFRLVELTLPENRNPVLNDFRQHTLARVAELEPAEGEENIVGHFARLAKQQHDLQVTNTTEPDPENPRLLHQLYSDWSGTNILSIEDQNGKATSLKYDVYEAIDAYVDLQYDILQSRYTWLYIYNLLETLGATTNERQRDIPLLDLTNACHSEFVRLTTKLRRHFVDASNCSRATRDCLARRDDGQSHMLYVGSIPPEMERKAPLSFFLLQLCQNGVSTEAALSLLAKINANIQKLTDEEVYTSNPSVLHCIGSINFIASFMEALSKHVKMPRYKSTKSQRFRDAIRAIKTDLDKMKPSLELHEFVFPYGKLTTPGNNEKAVQALDGAISKRRGVQTLDALFNNVLNQCAISLSTRLKNWAQKEPDRKADEARKQSSSFVPLPARSPPRPASHPRGERDEQSGNDDDDISAEPPAGQPANIPIPPPLPVVFKVTAEIVSIAEELYAHGHGSIRWSDFVKLMTAIGFSVVPTTGSEFRFIAPPTLENNSPAITIHSPHPAPQWETKRRQRVGRRLTRVFGINGNSFVEQ

SEQ ID NO: 34159 - DNA, 323 bp, Muscodor strobelii
  misc_feature: SGI EST ID NO. CUFF.80942.0
  misc_feature: Variant of the nucleotide sequence at SEQ ID NO 34157
cgggccggacgaccattatggggttaaagttgacaaagctagttctaaaaaattggaacaaaacgaggatgctgtacgaaacggatattgcctgcttgaacaacctgctatagcacttatagatcggcagcattctcgtatcgtattcctgggaaatattttcaggcttgtcgaattaacactaccggagaacaggaatccggtgctcaatgacttcagacagcatacgttggcgcgcgttgctgaacttgagccagccgagggcgaagaaaacattgtcggacactttgcccgtcttgcaaaacaacagcacgatctacaag

SEQ ID NO: 34160 - DNA, 831 bp, Muscodor strobelii
  misc_feature: SGI cDNA ID NO. 571799
  misc_feature: Encodes the peptide sequence at SEQ ID NO 34161
atgtcctacaagcagggttattcgagccacactacttcgacgcaggaaaaacggactgcagaaacgcatgccgcatttctcttgccctacatcaaagagacggataagattcttgatgttggttgtggccctggaaccatcacgactagcctcgccaaatatgtatcaaagggctgtgttattggtctcgatatgtcagctgaagtgctcgaaaaagcggaaactctagcggcacaacgtgaccatcccgcaacaggcgttaagactgtgaccttcaagcaggcaaatatcttagatggattgccttatccagatgagacattcgacatcgtctttagctcacaagtcctaggtcacatgccgctgccaactttacccagtaaagcgctcctcgagatgcgccgtgtcctgaaaccgggaggaattattgcatctcgtgacgcagtggcaaatcaatttcacccgcaacacctgaacctcgatcgcttgtggactcagaacgcgaccaaagtcttccgccaaggagcccctaagaatctgggttccactggtgcaagcttaccatcaatatgtgtcggatttgatcccgacggcgccaacttcaagatcagcttcggcaccatggcggtgtcaaacatccagactcgaaagtttcttgcggcccgagtagctggacagttacggcctgaggatccgttttatcataattggctcgaagcaggcattactgaagcggaaatgcaggagacaagagaggcagtagcaaagtgggccgaaacggacgatgcatggtacgcgggaatggagctcgagattcttgcatggaaatag

SEQ ID NO: 34161 - protein, 276 aa, Muscodor strobelii
  misc_feature: SGI Peptide ID NO. 571799
  misc_feature (38)..(145): Pfam Id: PF08241 Pfam Desc: Methyltransferase domain
  misc_feature (38)..(143): Pfam Id: PF08242 Pfam Desc: Methyltransferase domain
  misc_feature (2)..(276): NCBI GI: 242814941 Blast Desc: arsenite methyltransferase, [Talaromyces stipitatus ATCC 10500] gi|218714811|gb|EED14234.1| arsenite methyltransferase, [Talaromyces stipitatus ATCC 10500]
  misc_feature (3)..(276): NCBI GI: 145241390 Blast Desc: An09g00160 [Aspergillus niger] gi|134077878|emb|CAK40104.1| protein product [Aspergillus niger]
  misc_feature (2)..(276): NCBI GI: 39949332 Blast Desc: MGG_08768 [Magnaporthe grisea 70-15] gi|145009314|gb|EDJ94025.1| MGG_08768 [Magnaporthe grisea 70-15]
  misc_feature (2)..(272): NCBI GI: 261354027 Blast Desc: methyltransferase [Verticillium albo-atrum VaMs.102]
  misc_feature (3)..(126): NCBI GI: 212545214 Blast Desc: conserved [Penicillium marneffei ATCC 18224] gi|210065730|gb|EEA19824.1| conserved [Penicillium marneffei ATCC 18224]
  misc_feature (2)..(262): NCBI GI: 71020831 Blast Desc: UM04499.1 [Ustilago maydis 521] gi|46100148|gb|EAK85381.1| UM04499.1 [Ustilago maydis 521]
  misc_feature (3)..(276): NCBI GI: 119472194 Blast Desc: UbiE/COQ5 family methyltransferase, [Neosartorya fischeri NRRL 181] gi|119406443|gb|EAW16394.1| UbiE/COQ5 family methyltransferase, [Neosartorya fischeri NRRL 181]
  misc_feature (3)..(274): NCBI GI: 220914366 Blast Desc: Methyltransferase type 11 [Arthrobacter chlorophenolicus A6] gi|219861244|gb|ACL41586.1| Methyltransferase type 11 [Arthrobacter chlorophenolicus A6]
  misc_feature (3)..(274): NCBI GI: 116672357 Blast Desc: methyltransferase type 11 [Arthrobacter sp. FB24] gi|116612466|gb|ABK05190.1| Methyltransferase type 11 [Arthrobacter sp. FB24]
  misc_feature (3)..(276): NCBI GI: 255933734 Blast Desc: Pc12g14410 [Penicillium chrysogenum Wisconsin 54-1255] gi|211582865|emb|CAP81068.1| Pc12g14410 [Penicillium chrysogenum Wisconsin 54-1255]
MSYKQGYSSHTTSTQEKRTAETHAAFLLPYIKETDKILDVGCGPGTITTSLAKYVSKGCVIGLDMSAEVLEKAETLAAQRDHPATGVKTVTFKQANILDGLPYPDETFDIVFSSQVLGHMPLPTLPSKALLEMRRVLKPGGIIASRDAVANQFHPQHLNLDRLWTQNATKVFRQGAPKNLGSTGASLPSICVGFDPDGANFKISFGTMAVSNIQTRKFLAARVAGQLRPEDPFYHNWLEAGITEAEMQETREAVAKWAETDDAWYAGMELEILAWK

SEQ ID NO: 34162 - DNA, 2322 bp, Muscodor strobelii
  misc_feature: SGI cDNA ID NO. 571800
  misc_feature: Encodes the peptide sequence at SEQ ID NO 34163
atggagatgctttcgtatccatctcaggtgagacgtaacgacacgtggacgagcaacacgacatatcaatctgtagagcagatggaggatgacaggaaggctctcatcacagagaccgtcgtcgagtatggtcactcgtcgcatgaaccgacgaagaagccgttgaggactcgactcagtctgctgcatccgctagttcatatcttgcctgtacttgcaaccgcaggaattgtgcagctcagttttcgcaacatctactgggctgacgacgcacattattacaaagactggcagaccatcctgcaatttcccgcaaaagtgcacgagatcctaatctgcggctcattatctgcaataatcctccatgtatttcgtcgtatgttgctgggctcggatggcattcccctgggcctcatggtgggagcgttccagatcggttcggccgagtatattatgagtaagacctattggaagccgctcggcaatagcctgcgaaacatacgaaacggacggacgaagacatttttcgtcgctttattcctcggcttgtccatcatttacagcttcttggttggcccggcatctgctgcagtactgctcccaaaccttgggtggtggcgtatgcggaaccccttcaagggtcaaatgctccagagctatgttagtcgagacgttgcagagctttatccaactgcattatcggcggcggatattcacgagatctgcttcactaacgactactggaattcgttatcctgcccggcaggaggttacaattccctggtagactgggcctggactcgtagtcaggaaggcagttggtacaacgtgactgatagtcaacactacaatccgacaatgttaagttcgttctcgggtcaagcgcaaagggaaatcgtcactggaataatgaagacaaaaaatgcatcctctacagacactgccatcagtgcaacgcttcattccaccctgttagccttgactgatgcgttttggcattacgtgaataccaattctgttggtaaggtgaataatgctcagcagccacaattcataattcctcgagctcaggatgtatcgatccctctcgtacaagttcagtgtcaggcatacaaccttgcagcatcgatggatgatgctgcggagttgacgttcgagacccgagggttgatcggtgacttctcgaaatcggggtccaacccgtattggggggttaactggactgttccggattggtcgtggaactatgaccgacccgaaccttggaataggactaatatcacatggatcgatccggcgcaagtcgacaaggccaagggtagaacgttacccgcatcgctcgccgcagccgttactgtacccgccgtgtggacagttgacggcgtcgacgagcagggtagcgtcttaatgccttgcatcatcgatgcaaggtgggcgaagacagatatgtcattcgatattaccgagcccgtagtcagaactgggctgacagaatggcttgataacgcgaatcttacctcgggagacgtaaatatccaaaccgagctgtccaaatttgctgttggggacccgatcactatgtcaaaggattggcttcgcggcatcaacgacttgacgaataacaacggcgttctggagctgatcctggaacaattcgttacggaattttcctcagacgagcctggcttgttgagcttttttcctgcggcgattagtgccgacgactggacaagggcttatgccaacgccgtcgccattgttgtgagcacaaccattacagattggttatcgcgtacctctcttgcaggttccaactttaccaccgtgttgtcgcaagagaaagacggccacgtagacaccatcgacttgctcaatcaaaagaactcgaccgcatttcagaatctgcccgtatcctcgttcgacgatgaaactgaattcatctacaccgttcaacgatacgggtggggatatggcctcaactcgaagacgattcggttctctatcactaccctcctgatacacgtcgtgatggtcatagtctatttcgcctactcgtttgtcttctggtgccgcgcaaagggatggacgtcatcagcctggggggatattggcgaagtgctagcgttagcaaacacttcgccccctgccgatgagttcagaaatactggagccggtattgacaagtccgaaacctggatgaccccattacgcgttcgcgagtcgggttcagctcttgacaaagttgagctagttattggaacaaggggcggtacggtggtgccagatctcaataagatccagatcaacaagaaatacgcatag

SEQ ID NO: 34163 - protein, 773 aa, Muscodor strobelii
  misc_feature: SGI Peptide ID NO. 571800
  misc_feature (41)..(537): NCBI GI: 171680504 Blast Desc: protein product [Podospora anserina] gi|170939879|emb|CAP65105.1| protein product [Podospora anserina]
  misc_feature (26)..(261): NCBI GI: 255956735 Blast Desc: Pc21g21450 [Penicillium chrysogenum Wisconsin 54-1255] gi|77377683|gb|ABA70578.1| [Penicillium chrysogenum] gi|211590831|emb|CAP97042.1| Pc21g21450 [Penicillium chrysogenum
  misc_feature (26)..(261): NCBI GI: 148793080 Blast Desc: [Penicillium chrysogenum]
  misc_feature (65)..(753): NCBI GI: 256730158 Blast Desc: NECHADRAFT_82868 [Nectria haematococca mpVI 77-13-4]
  misc_feature (65)..(772): NCBI GI: 240106489 Blast Desc: CPC735_060520 [Coccidioides posadasii C735 delta SOWgp]
  misc_feature (33)..(311): NCBI GI: 256735672 Blast Desc: NECHADRAFT_75765 [Nectria haematococca mpVI 77-13-4]
  misc_feature (58)..(738): NCBI GI: 67902998 Blast Desc: AN8486.2 [Aspergillus nidulans FGSC A4] gi|40747952|gb|EAA67108.1| [Aspergillus nidulans FGSC A4]
  misc_feature (65)..(238): NCBI GI: 46113732 Blast Desc: FG02940.1 [Gibberella zeae PH-1]
  misc_feature (49)..(761): NCBI GI: 261355525 Blast Desc: conserved [Verticillium albo-atrum VaMs.102]
  misc_feature (56)..(270): NCBI GI: 116191233 Blast Desc: CHGG_05334 [Chaetomium globosum CBS 148.51] gi|88181247|gb|EAQ88715.1| CHGG_05334 [Chaetomium globosum CBS 148.51]
MEMLSYPSQVRRNDTWTSNTTYQSVEQMEDDRKALITETVVEYGHSSHEPTKKPLRTRLSLLHPLVHILPVLATAGIVQLSFRNIYWADDAHYYKDWQTILQFPAKVHEILICGSLSAIILHVFRRMLLGSDGIPLGLMVGAFQIGSAEYIMSKTYWKPLGNSLRNIRNGRTKTFFVALFLGLSIIYSFLVGPASAAVLLPNLGWWRMRNPFKGQMLQSYVSRDVAELYPTALSAADIHEICFTNDYWNSLSCPAGGYNSLVDWAWTRSQEGSWYNVTDSQHYNPTMLSSFSGQAQREIVTGIMKTKNASSTDTAISATLHSTLLALTDAFWHYVNTNSVGKVNNAQQPQFIIPRAQDVSIPLVQVQCQAYNLAASMDDAAELTFETRGLIGDFSKSGSNPYWGVNWTVPDWSWNYDRPEPWNRTNITWIDPAQVDKAKGRTLPASLAAAVTVPAVWTVDGVDEQGSVLMPCIIDARWAKTDMSFDITEPVVRTGLTEWLDNANLTSGDVNIQTELSKFAVGDPITMSKDWLRGINDLTNNNGVLELILEQFVTEFSSDEPGLLSFFPAAISADDWTRAYANAVAIVVSTTITDWLSRTSLAGSNFTTVLSQEKDGHVDTIDLLNQKNSTAFQNLPVSSFDDETEFIYTVQRYGWGYGLNSKTIRFSITTLLIHVVMVIVYFAYSFVFWCRAKGWTSSAWGDIGEVLALANTSPPADEFRNTGAGIDKSETWMTPLRVRESGSALDKVELVIGTRGGTVVPDLNKIQINKKYA

SEQ ID NO: 34164 - DNA, 2449 bp, Muscodor strobelii
  misc_feature: SGI EST ID NO. CUFF.80976.0
  misc_feature: Variant of the nucleotide sequence at SEQ ID NO 34162
cggagtttgtaatctctttttccttttgttttcatcgattttccatattccttaagcgatatcgtttgcccctcgtaccgcccgaccatggagatgctttcgtatccatctcaggtgagacgtaacgacacgtggacgagcaacacgacatatcaatctgtagagcagatggaggatgacaggaaggctctcatcacagagaccgtcgtcgagtatggtcactcgtcgcatgaaccgacgaagaagccgttgaggactcgactcagtctgctgcatccgctagttcatatcttgcctgtacttgcaaccgcaggaattgtgcagctcagttttcgcaacatctactgggctgacgacgcacattattacaaagactggcagaccatcctgcaatttcccgcaaaagtgcacgagatcctaatctgcggctcattatctgcaataatcctccatgtatttcgtcgtatgttgctgggctcggatggcattcccctgggcctcatggtgggagcgttccagatcggttcggccgagtatattatgagtaagacctattggaagccgctcggcaatagcctgcgaaacatacgaaacggacggacgaagacatttttcgtcgctttattcctcggcttgtccatcatttacagcttcttggttggcccggcatctgctgcagtactgctcccaaaccttgggtggtggcgtatgcggaaccccttcaagggtcaaatgctccagagctatgttagtcgagacgttgcagagctttatccaactgcattatcggcggcggatattcacgagatctgcttcactaacgactactggaattcgttatcctgcccggcaggaggttacaattccctggtagactgggcctggactcgtagtcaggaaggcagttggtacaacgtgactgatagtcaacactacaatccgacaatgttaagttcgttctcgggtcaagcgcaaagggaaatcgtcactggaataatgaagacaaaaaatgcatcctctacagacactgccatcagtgcaacgcttcattccaccctgttagccttgactgatgcgttttggcattacgtgaataccaattctgttggtaaggtgaataatgctcagcagccacaattcataattcctcgagctcaggatgtatcgatccctctcgtacaagttcagtgtcaggcatacaaccttgcagcatcgatggatgatgctgcggagttgacgttcgagacccgagggttgatcggtgacttctcgaaatcggggtccaacccgtattggggggttaactggactgttccggattggtcgtggaactatgaccgacccgaaccttggaataggactaatatcacatggatcgatccggcgcaagtcgacaaggccaagggtagaacgttacccgcatcgctcgccgcagccgttactgtacccgccgtgtggacagttgacggcgtcgacgagcagggtagcgtcttaatgccttgcatcatcgatgcaaggtgggcgaagacagatatgtcattcgatattaccgagcccgtagtcagaactgggctgacagaatggcttgataacgcgaatcttacctcgggagacgtaaatatccaaaccgagctgtccaaatttgctgttggggacccgatcactatgtcaaaggattggcttcgcggcatcaacgacttgacgaataacaacggcgttctggagctgatcctggaacaattcgttacggaattttcctcagacgagcctggcttgttgagcttttttcctgcggcgattagtgccgacgactggacaagggcttatgccaacgccgtcgccattgttgtgagcacaaccattacagattggttatcgcgtacctctcttgcaggttccaactttaccaccgtgttgtcgcaagagaaagacggccacgtagacaccatcgacttgctcaatcaaaagaactcgaccgcatttcagaatctgcccgtatcctcgttcgacgatgaaactgaattcatctacaccgttcaacgatacgggtggggatatggcctcaactcgaagacgattcggttctctatcactaccctcctgatacacgtcgtgatggtcatagtctatttcgcctactcgtttgtcttctggtgccgcgcaaagggatggacgtcatcagcctggggggatattggcgaagtgctagcgttagcaaacacttcgccccctgccgatgagttcagaaatactggagccggtattgacaagtccgaaacctggatgaccccattacgcgttcgcgagtcgggttcagctcttgacaaagttgagctagttattggaacaaggggcggtacggtggtgccagatctcaataagatccagatcaacaagaaatacgcataggataagatagataataagacatttggttatcgaaagttta

SEQ ID NO: 34165 - DNA, 729 bp, Muscodor strobelii
  misc_feature: SGI cDNA ID NO. 571801
  misc_feature: Encodes the peptide sequence at SEQ ID NO 34166
atgccttctcgcttagtcgagacatgtccaatacctggacatgacgacgcagtgcgcctaatcgagacatccaaccttcgaggctcacgcaattcagtacgttttgccacgctgagctactgctggggcccgcccggcgtcggagacgacggttcttggcgaacgatacaatcgaacttgaactcgcggtttgaggtaatgtcaatgaagacactacctagcacgctgcgagatagtattttgattgctcggaagttgaagattcaatacatctggattgacgcattgtgtattgtacaggacaatgccaacgactgggcgcgagagtccgtcaagatgaatgggatttatcttggttctattctcacgattgcagtagcgtcggccgtgtcggtaggcaacggctgcttcaatgtggaatctcaagccacaatcgaaacttccaagtttcgcgaagggtgggtggctattgaaagtacattggataacgggaaaggtagctgtctctacatctcgaagcttcaggagaactgggacaatttggatatgtaccaggaacaagtcctagatggccctcttgcgaaacgcgcatggacattacaggaacaggcccttccgcgaaggaccctctactacacatcgaaacagctcatgtggaaatgcgaacactgtcttcttagcgaagacaactttcctcagcggcagcaccgcgagctgtggtacgcatag

SEQ ID NO: 34166 - protein, 242 aa, Muscodor strobelii
  misc_feature: SGI Peptide ID NO. 571801
  misc_feature (35)..(202): Pfam Id: PF06985 Pfam Desc: Heterokaryon incompatibility protein (HET)
  misc_feature (35)..(134): Pfam Id: PF06985 Pfam Desc: Heterokaryon incompatibility protein (HET)
  misc_feature (1)..(239): NCBI GI: 46115654 Blast Desc: FG03669.1 [Gibberella zeae PH-1]
  misc_feature (1)..(229): NCBI GI: 171677722 Blast Desc: protein product [Podospora anserina] gi|170936929|emb|CAP61588.1| protein product [Podospora anserina]
  misc_feature (2)..(237): NCBI GI: 28881154 Blast Desc: related to tol protein [Neurospora crassa]
  misc_feature (1)..(221): NCBI GI: 256723638 Blast Desc: NECHADRAFT_52287 [Nectria haematococca mpVI 77-13-4]
  misc_feature (32)..(221): NCBI GI: 171685458 Blast Desc: protein product [Podospora anserina] gi|170942690|emb|CAP68343.1| protein product [Podospora anserina]
  misc_feature (35)..(229): NCBI GI: 145235131 Blast Desc: An03g03310 [Aspergillus niger] gi|134057894|emb|CAK38235.1| protein product [Aspergillus niger]
  misc_feature (1)..(228): NCBI GI: 145251023 Blast Desc: An15g04930 [Aspergillus niger] gi|134082553|emb|CAK42468.1| protein product [Aspergillus niger]
  misc_feature (2)..(231): NCBI GI: 256724784 Blast Desc: NECHADRAFT_48202 [Nectria haematococca mpVI 77-13-4]
  misc_feature (2)..(221): NCBI GI: 116179172 Blast Desc: CHGG_00214 [Chaetomium globosum CBS 148.51] gi|88184511|gb|EAQ91979.1| CHGG_00214 [Chaetomium globosum CBS 148.51]
  misc_feature (1)..(221): NCBI GI: 256722422 Blast Desc: NECHADRAFT_88961 [Nectria haematococca mpVI 77-13-4]
MPSRLVETCPIPGHDDAVRLIETSNLRGSRNSVRFATLSYCWGPPGVGDDGSWRTIQSNLNSRFEVMSMKTLPSTLRDSILIARKLKIQYIWIDALCIVQDNANDWARESVKMNGIYLGSILTIAVASAVSVGNGCFNVESQATIETSKFREGWVAIESTLDNGKGSCLYISKLQENWDNLDMYQEQVLDGPLAKRAWTLQEQALPRRTLYYTSKQLMWKCEHCLLSEDNFPQRQHRELWYA

SEQ ID NO: 34167 - DNA, 459 bp, Muscodor strobelii
  misc_feature: SGI cDNA ID NO. 571802
  misc_feature: Encodes the peptide sequence at SEQ ID NO 34168
atgcagtctacaaatactctggtcgctctcgtcgcctacctcagcgtcggtgcccacgctttgcctcagcttgagatcagccacgtgaacggcttcgaaacttgcaggagcccgacgctttgggattacccggatgacaagacaaccatacttgttgcaaattgcaagacagaggatggtaaagaggttgagtccttcatcagcctggatcactgcattgccaaccgaggcggcaacttagtgggagtgtctgaaggcaatttccgctcgacttgtaaagacattggcggttctagcacagataccatcatgacagccacttgccagaacgataaaggtggatggacaaatactcagatccaactcgccgacttcatttataacaagaacggtttggtatcttgctttgacaaggttggcgacaaatggcccttccgaagagaaaatgaggcctcttga

SEQ ID NO: 34168 - protein, 152 aa, Muscodor strobelii
  misc_feature: SGI Peptide ID NO. 571802
  misc_feature (30)..(135): Pfam Id: PF08881 Pfam Desc: CVNH domain
  misc_feature (49)..(135): Pfam Id: PF08881 Pfam Desc: CVNH domain
  misc_feature (49)..(131): NCBI GI: 218438877 Blast Desc: Cyanovirin-N domain protein [Cyanothece sp. PCC 7424] gi|218171605|gb|ACK70338.1| Cyanovirin-N domain protein [Cyanothece sp. PCC 7424]
  misc_feature (51)..(137): NCBI GI: 121711421 Blast Desc: glutamine-serine-proline rich protein, [Aspergillus clavatus NRRL 1] gi|119401477|gb|EAW11900.1| glutamine-serine-proline rich protein, [Aspergillus clavatus NRRL
  misc_feature (1)..(140): NCBI GI: 119174132 Blast Desc: [Coccidioides immitis RS]
  misc_feature (51)..(122): NCBI GI: 242216737 Blast Desc: [Postia placenta Mad-698-R] gi|220726719|gb|EED80660.1| [Postia placenta Mad-698-R]
  misc_feature (42)..(136): NCBI GI: 46138215 Blast Desc: FG10622.1 [Gibberella zeae PH-1]
  misc_feature (51)..(122): NCBI GI: 242208181 Blast Desc: [Postia placenta Mad-698-R] gi|220731004|gb|EED84853.1| [Postia placenta Mad-698-R]
  misc_feature (65)..(142): NCBI GI: 171687967 Blast Desc: protein product [Podospora anserina] gi|170943945|emb|CAP69597.1| protein product [Podospora anserina]
  misc_feature (65)..(140): NCBI GI: 119174136 Blast Desc: [Coccidioides immitis RS]
  misc_feature (7)..(109): NCBI GI: 116179130 Blast Desc: [Chaetomium globosum CBS 148.51] gi|88184490|gb|EAQ91958.1| [Chaetomium globosum CBS 148.51]
  misc_feature (65)..(140): NCBI GI: 240106706 Blast Desc: CPC735_014910 [Coccidioides posadasii C735 delta SOWgp]
MQSTNTLVALVAYLSVGAHALPQLEISHVNGFETCRSPTLWDYPDDKTTILVANCKTEDGKEVESFISLDHCIANRGGNLVGVSEGNFRSTCKDIGGSSTDTIMTATCQNDKGGWTNTQIQLADFIYNKNGLVSCFDKVGDKWPFRRENEAS

SEQ ID NO: 34169 - DNA, 984 bp, Muscodor strobelii
  misc_feature: SGI cDNA ID NO. 571803
  misc_feature: Encodes the peptide sequence at SEQ ID NO 34170
atggcttgtaatagtttcatctgcaatagcgaggctgccctcactgccgaacaatggcctgtcatcgcagcaagcgcttttggtggtattgttggctttttgttcatattggcttggtgctaccagcgacgctcccgcaagacagcccacagccagactagagctggtagggtggaccctggagacccacgaaagactatgtacgaagccgatgaggaggatatggaggtggcgctggtttggaaccctagggcctttcaggctgcgtatcttggcgaccaagagctcttgaagactgggatcttatctgatgtcaagattgtctgcggaactcaggagtggcaggcacactctgtcattctcgcttctcgaagcaaatggtttgccacagcgctactggggagatttcgcgaggctgaaacaaaggtcatagagtttcctgaattggaaccggatgcaatcgaggtcgtcctgaactggatttatacccaacttgacatctatcttggccttggaaatgttcatttcaaggattatcgtggaagtctcatgagcacgatccacacttggcaagctgcccacttcctaatgctcgatgatctccgcgggagagccgaagaggttttctcggatatcgtgttctactattgggacttaatttgcgagccgatcgacgagctcgaagatagacatgagcaatttgtcctcgacatttgcaaggcagtaaaatatgtctacgaagctgacattgagattctacgagagcatatcgtagacacaatgtttgcgacggatatgatggcgatgaaagttcccgccatgcagcgtctcgcgagagaagtcccggagttcggagaggatctgttcaaaaatatccacaagcacatcgcaaagaagaagactgcgagcgatcgcgaaatctcggagttgaaggacaaaattaaagcccagagcaccaccatagaaatgcaacgacaagggtga

SEQ ID NO: 34170 - protein, 327 aa, Muscodor strobelii
  misc_feature: SGI Peptide ID NO. 571803
  misc_feature (93)..(213): Pfam Id: PF00651 Pfam Desc: BTB/POZ domain
  misc_feature (94)..(163): Pfam Id: PF00651 Pfam Desc: BTB/POZ domain
  misc_feature (92)..(293): NCBI GI: 171680598 Blast Desc: protein product [Podospora anserina] gi|170939926|emb|CAP65152.1| protein product [Podospora anserina]
  misc_feature (93)..(294): NCBI GI: 116179034 Blast Desc: CHGG_00145 [Chaetomium globosum CBS 148.51] gi|88184442|gb|EAQ91910.1| CHGG_00145 [Chaetomium globosum CBS 148.51]
  misc_feature (93)..(165): NCBI GI: 85079439 Blast Desc: NCU05044 [Neurospora crassa OR74A] gi|28917412|gb|EAA27116.1| [Neurospora crassa OR74A]
  misc_feature (96)..(162): NCBI GI: 189192190 Blast Desc: PTRG_02101 [Pyrenophora tritici-repentis Pt-1C-BFP] gi|187974040|gb|EDU41539.1| PTRG_02101 [Pyrenophora tritici-repentis Pt-1C-BFP]
  misc_feature (95)..(164): NCBI GI: 46115930 Blast Desc: FG03807.1 [Gibberella zeae PH-1]
  misc_feature (96)..(163): NCBI GI: 256727319 Blast Desc: NECHADRAFT_33838 [Nectria haematococca mpVI 77-13-4]
  misc_feature (94)..(211): NCBI GI: 260831334 Blast Desc: BRAFLDRAFT_202556 [Branchiostoma floridae] gi|229295981|gb|EEN66624.1| BRAFLDRAFT_202556 [Branchiostoma floridae]
  misc_feature (69)..(163): NCBI GI: 115460680 Blast Desc: Os04g0625600 [Oryza sativa (japonica cultivar-group)] gi|113565511|dbj|BAF15854.1| Os04g0625600 [Oryza sativa Japonica Group]
  misc_feature (69)..(163): NCBI GI: 32488782 Blast Desc: OSJNBb0060E08.3 [Oryza sativa (japonica cultivar-group)] gi|38344189|emb|CAE03520.2| OSJNBa0053K19.28 [Oryza sativa (japonica cultivar-group)] OsJ_16244 [Oryza sativa
  misc_feature (69)..(163): NCBI GI: 125549808 Blast Desc: OsI_17487 [Oryza sativa Indica Group]
MACNSFICNSEAALTAEQWPVIAASAFGGIVGFLFILAWCYQRRSRKTAHSQTRAGRVDPGDPRKTMYEADEEDMEVALVWNPRAFQAAYLGDQELLKTGILSDVKIVCGTQEWQAHSVILASRSKWFATALLGRFREAETKVIEFPELEPDAIEVVLNWIYTQLDIYLGLGNVHFKDYRGSLMSTIHTWQAAHFLMLDDLRGRAEEVFSDIVFYYWDLICEPIDELEDRHEQFVLDICKAVKYVYEADIEILREHIVDTMFATDMMAMKVPAMQRLAREVPEFGEDLFKNIHKHIAKKKTASDREISELKDKIKAQSTTIEMQRQG

SEQ ID NO: 34171 - DNA, 2901 bp, Muscodor strobelii
  misc_feature: SGI cDNA ID NO. 571804
  misc_feature: Encodes the peptide sequence at SEQ ID NO 34172
atggcgctcgaagcaatggacggcttcgttgccgccaacggggcgcacgagctcgcggacgagagcctgcccatcttcgacgtcgagcccgtccagctgcagttctccatcgcggctgactttgtcgccgcccaggtagctaataatgttctaatactcgctctttcgaacgggcgcatactgcgcatcgatctgaacaggccagaggacatagacgacatcgacctccccaagcgcgtctcggaagtcggcataatatcccgcatgttcctcgatcctacggcttctcacctcataatatgcacttccctcggcgagaactactacctccacacccagtcccgacagccccgtgccctcggtcgattacgcggcatctccatcgaatccgtagcatggaacccctcactccctacatcaacgacacgcgagatcctcatcggagcttcagacgggaatatatacgagaccttcatcgagccatccactgagttctaccgcaaggaggagaaatacttaaaggcactacagaaactgcccgatggacctgtcacgggtctatgggttgacgacatgggtgggaggccggatataaggagggtcgttatttgcacacaaaccagactgtttcatctcgttggacgggttggaaggagtggccatgaaggcgcaggatctatctacaccaagctattcgataccgaacaccccgtcatccacgaaatctcgagaggctccgcgacggcccccaccgctctcgctataacgccagacccgcctaatagtgcagcccacgaggcttcgacaccagatagagcatttgcctggctgtctgctcagggtgtttaccatgggaggctgttgacctcatcaggcagcaatgatctggggaaccaggtgtatgccgaggctaagctgctacctagggcacagattgtgtcctctgagatgtcgggaaggagaaagggctcagcagaggtcgttgatgcaaccgcactaacgcaatggcatatcgtcaacttggttggtgggcgcatagtagctgccaatcgtctgacaggggccatcgtctacgatcaggttgtccttgaccaagggcaaaaggcactaggactttacgttgatcagcagaagaacactttttggctgtttactgcgcaagagatatttgagattgtggtcagagacgaggatcgtgatatctggcgcatcatgctgcaacggcaacagtttgacacggctctgcggtatgcacatactgccgcccagaaagatgcggtcgctacggcttctggtgattatctcgccgagaagggcctgttcatcgaagctgcgggcgtgtacggaaagagcacgaagcctttcgaggaagtcgctttatcatttatcgacaacggtcagaacgatgcactacggaaatacctgatcacgaaactcaacacatataacaggtcctacatcatgcagaggatgatgattgcgacatggctggtcgaggtcttcatggcgaaactcaactcacttgaagataccatcgcagtggaggcagaggcatcgggaaacgcgaactccactgatactaagcaacagcttgcttcgatccgagaagagtttcacagcttcgtcaataagcataaatccgatttagaccgcaagaccgtatacgacgtcatcagcagccatgctcgagaagaggagctgctattcttcgctaacgcagtcaacgactacaactacgaactctcttactgggtgcagcgagagagatggacagaagctctgggcgtgcttaagcggcagactgaccccgaggttttctaccgttacagtagtgtgctcatgacacacgtcgcgaacgaggtcgtcgagattctgacgagacatcctaagctggagccaaggaagataataccggctcttctggactatagtcggaactttaatggaccattgcttcagaaccaggcagtgagatatctgcaattcgtcatcaaccaacttcagtcaacagacgctgctgtacacaacacactcgtatccatatacgcctcgcacgaatcaaaagatgaatcgggactcatggcatacctagaatcccaaggcgacgaaccaaatttcgatcctgatttcgcactccgtttatgtattcaacacaagagaacactatcctgcgtacgcatatacacaaacatgggacaatacattcaagccgtcgacctcgccctctcacacaacgaaatagaatacgcatccataatcgccgaccgccctcaatccaatcctgtactacgaaagaaactctggctcgcaatagcgaagaaagttatttctcaatctaatggcatcaaagcagcgattgaatttctccgccgttgcgaactcctaaaaatagaagacttaattccgtttttcccagatttcgtagtaatcgacgatttccgggaggaaatctgcacagcgctcgaagattacagccataatatcgatgcgctgaagaaggaaatggacgagagtgagtcgacggcgcagaatattaaagcggatattaaggagttggataggaggtatgcgattgtgttgccgggggagaaatgctatgagtgtggattaccgttgttgagtagacagttttttgtttttccttgccagcatgcttttcactctgattgtctgggcaggaaggtgttggagggcagtggtgtggggttgggaaggaggattagggagttgcaggttaaggttagtaaggggttggttgggggcagggagaaggatgatgctgtgaaagagctggatcgggttattggggggtgttgcatattgtgcagcgacttcgccatcaaacggatcgatgagccgtttgttgggcctgaggatgacgttaatgagtgggctttgtag

SEQ ID NO: 34172 - protein, 966 aa, Muscodor strobelii
  misc_feature: SGI Peptide ID NO. 571804
  misc_feature (281)..(438): Pfam Id: PF05131 Pfam Desc: Pep3/Vps18/deep orange family
  misc_feature (1)..(966): NCBI GI: 46122183 Blast Desc: FG05469.1 [Gibberella zeae PH-1]
  misc_feature (1)..(966): NCBI GI: 261358246 Blast Desc: vacuolar membrane protein pep3 [Verticillium albo-atrum VaMs.102]
  misc_feature (1)..(966): NCBI GI: 145608844 Blast Desc: MGG_06325 [Magnaporthe grisea 70-15] gi|145016276|gb|EDK00766.1| MGG_06325 [Magnaporthe grisea 70-15]
  misc_feature (1)..(938): NCBI GI: 156065195 Blast Desc: SS1G_00608 [Sclerotinia sclerotiorum 1980] gi|154691467|gb|EDN91205.1| SS1G_00608 [Sclerotinia sclerotiorum 1980]
  misc_feature (1)..(966): NCBI GI: 116207958 Blast Desc: CHGG_03272 [Chaetomium globosum CBS 148.51] gi|88183869|gb|EAQ91337.1| CHGG_03272 [Chaetomium globosum CBS 148.51]
  misc_feature (1)..(966): NCBI GI: 164425273 Blast Desc: NCU06183 [Neurospora crassa OR74A] gi|157070860|gb|EAA33759.2| NCU06183 [Neurospora crassa OR74A]
  misc_feature (20)..(966): NCBI GI: 169611999 Blast Desc: SNOG_09114 [Phaeosphaeria nodorum SN15] gi|160702413|gb|EAT83306.2| SNOG_09114 [Phaeosphaeria nodorum SN15]
  misc_feature (1)..(966): NCBI GI: 240274038 Blast Desc: vacuolar sorting protein [Ajellomyces capsulatus H143]
  misc_feature (1)..(966): NCBI GI: 261198407 Blast Desc: vacuolar protein sorting protein DigA [Ajellomyces dermatitidis SLH14081] gi|239594757|gb|EEQ77338.1| vacuolar protein sorting protein DigA [Ajellomyces dermatitidis SLH14081]
  misc_feature (1)..(966): NCBI GI: 225557846 Blast Desc: vacuolar sorting-associated protein [Ajellomyces capsulatus G186AR]
MALEAMDGFVAANGAHELADESLPIFDVEPVQLQFSIAADFVAAQVANNVLILALSNGRILRIDLNRPEDIDDIDLPKRVSEVGIISRMFLDPTASHLIICTSLGENYYLHTQSRQPRALGRLRGISIESVAWNPSLPTSTTREILIGASDGNIYETFIEPSTEFYRKEEKYLKALQKLPDGPVTGLWVDDMGGRPDIRRVVICTQTRLFHLVGRVGRSGHEGAGSIYTKLFDTEHPVIHEISRGSATAPTALAITPDPPNSAAHEASTPDRAFAWLSAQGVYHGRLLTSSGSNDLGNQVYAEAKLLPRAQIVSSEMSGRRKGSAEVVDATALTQWHIVNLVGGRIVAANRLTGAIVYDQVVLDQGQKALGLYVDQQKNTFWLFTAQEIFEIVVRDEDRDIWRIMLQRQQFDTALRYAHTAAQKDAVATASGDYLAEKGLFIEAAGVYGKSTKPFEEVALSFIDNGQNDALRKYLITKLNTYNRSYIMQRMMIATWLVEVFMAKLNSLEDTIAVEAEASGNANSTDTKQQLASIREEFHSFVNKHKSDLDRKTVYDVISSHAREEELLFFANAVNDYNYELSYWVQRERWTEALGVLKRQTDPEVFYRYSSVLMTHVANEVVEILTRHPKLEPRKIIPALLDYSRNFNGPLLQNQAVRYLQFVINQLQSTDAAVHNTLVSIYASHESKDESGLMAYLESQGDEPNFDPDFALRLCIQHKRTLSCVRIYTNMGQYIQAVDLALSHNEIEYASIIADRPQSNPVLRKKLWLAIAKKVISQSNGIKAAIEFLRRCELLKIEDLIPFFPDFVVIDDFREEICTALEDYSHNIDALKKEMDESESTAQNIKADIKELDRRYAIVLPGEKCYECGLPLLSRQFFVFPCQHAFHSDCLGRKVLEGSGVGLGRRIRELQVKVSKGLVGGREKDDAVKELDRVIGGCCILCSDFAIKRIDEPFVGPEDDVNEWAL

SEQ ID NO: 34173 - DNA, 3424 bp, Muscodor strobelii
  misc_feature: SGI EST ID NO. CUFF.80991.0
  misc_feature: Variant of the nucleotide sequence at SEQ ID NO 34171
ccgacgtcaacgtcaacgtcaacacacctcgacatttagaccagcaacagcacgcgcgcgaacagtttgacgtgctgaagctgtgtagagagatcagtatgcccagataaacagtgcgatggcgctcgaagcaatggacggcttcgttgccgccaacggggcgcacgagctcgcggacgagagcctgcccatcttcgacgtcgagcccgtccagctgcagttctccatcgcggctgactttgtcgccgcccaggtagctaataatgttctaatactcgctctttcgaacgggcgcatactgcgcatcgatctgaacaggccagaggacatagacgacatcgacctccccaagcgcgtctcggaagtcggcataatatcccgcatgttcctcgatcctacggcttctcacctcataatatgcacttccctcggcgagaactactacctccacacccagtcccgacagccccgtgccctcggtcgattacgcggcatctccatcgaatccgtagcatggaacccctcactccctacatcaacgacacgcgagatcctcatcggagcttcagacgggaatatatacgagaccttcatcgagccatccactgagttctaccgcaaggaggagaaatacttaaaggcactacagaaactgcccgatggacctgtcacgggtctatgggttgacgacatgggtgggaggccggatataaggagggtcgttatttgcacacaaaccagactgtttcatctcgttggacgggttggaaggagtggccatgaaggcgcaggatctatctacaccaagctattcgataccgaacaccccgtcatccacgaaatctcgagaggctccgcgacggcccccaccgctctcgctataacgccagacccgcctaatagtgcagcccacgaggcttcgacaccagatagagcatttgcctggctgtctgctcagggtgtttaccatgggaggctgttgacctcatcaggcagcaatgatctggggaaccaggtgtatgccgaggctaagctgctacctagggcacagattgtgtcctctgagatgtcgggaaggagaaagggctcagcagaggtcgttgatgcaaccgcactaacgcaatggcatatcgtcaacttggttggtgggcgcatagtagctgccaatcgtctgacaggggccatcgtctacgatcaggttgtccttgaccaagggcaaaaggcactaggactttacgttgatcagcagaagaacactttttggctgtttactgcgcaagagatatttgagattgtggtcagagacgaggatcgtgatatctggcgcatcatgctgcaacggcaacagtttgacacggctctgcggtatgcacatactgccgcccagaaagatgcggtcgctacggcttctggtgattatctcgccgagaagggcctgttcatcgaagctgcgggcgtgtacggaaagagcacgaagcctttcgaggaagtcgctttatcatttatcgacaacggtcagaacgatgcactacggaaatacctgatcacgaaactcaacacatataacaggtcctacatcatgcagaggatgatgattgcgacatggctggtcgaggtcttcatggcgaaactcaactcacttgaagataccatcgcagtggaggcagaggcatcgggaaacgcgaactccactgatactaagcaacagcttgcttcgatccgagaagagtttcacagcttcgtcaataagcataaatccgatttagaccgcaagaccgtatacgacgtcatcagcagccatgctcgagaagaggagctgctattcttcgctaacgcagtcaacgactacaactacgaactctcttactgggtgcagcgagagagatggacagaagctctgggcgtgcttaagcggcagactgaccccgaggttttctaccgttacagtagtgtgctcatgacacacgtcgcgaacgaggtcgtcgagattctgacgagacatcctaagctggagccaaggaagataataccggctcttctggactatagtcggaactttaatggaccattgcttcagaaccaggcagtgagatatctgcaattcgtcatcaaccaacttcagtcaacagacgctgctgtacacaacacactcgtatccatatacgcctcgcacgaatcaaaagatgaatcgggactcatggcatacctagaatcccaaggcgacgaaccaaatttcgatcctgatttcgcactccgtttatgtattcaacacaagagaacactatcctgcgtacgcatatacacaaacatgggacaatacattcaagccgtcgacctcgccctctcacacaacgaaatagaatacgcatccataatcgccgaccgccctcaatccaatcctgtactacgaaagaaactctggctcgcaatagcgaagaaagttatttctcaatctaatggcatcaaagcagcgattgaatttctccgccgttgcgaactcctaaaaatagaagacttaattccgtttttcccagatttcgtagtaatcgacgatttccgggaggaaatctgcacagcgctcgaagattacagccataatatcgatgcgctgaagaaggaaatggacgagagtgagtcgacggcgcagaatattaaagcggatattaaggagttggataggaggtatgcgattgtgttgccgggggagaaatgctatgagtgtggattaccgttgttgagtagacagttttttgtttttccttgccagcatgcttttcactctgattgtctgggcaggaaggtgttggagggcagtggtgtggggttgggaaggaggattagggagttgcaggttaaggttagtaaggggttggttgggggcagggagaaggatgatgctgtgaaagagctggatcgggttattggggggtgttgcatattgtgcagcgacttcgccatcaaacggatcgatgagccgtttgttgggcctgaggatgacgttaatgagtgggctttgtagtgtggtgggctgcatcattgcttgctatgcagatggagagggtatgggaagagtgaagagagagtgtgagagacttagataagaagggagagatggcagatagcgtgtatgtctatggcattttgagaattgaagtcgatacccattaactgagtgttctacgtgtggtggggtgtgacttgcatcttggtgccttttctcgtggataaactgcactgagacggggcggaggagactacagcgaaacagtacctgtattgacgatcatggcgaattctagtcatgcagcttgagctacccaggtaggtattagctatgagattggagaacacctctgtcattagtgatgtagccagacgctaatagtagtcacatgatcacctcaacctcgacctcaacgtcaac

SEQ ID NO: 34174 - DNA, 1677 bp, Muscodor strobelii
  misc_feature: SGI cDNA ID NO. 571805
  misc_feature: Encodes the peptide sequence at SEQ ID NO 34175
atgccatcgcactcgtaccaatcatccacctcattttccgatggcttcagcgcctcgactcggcccaactctgactcagaagtccccggactggaacctgatctatcgtcgaccgaagacctcacaagtgactacctgagcacgaggacgagaagtgtcttagggcctataatcgaccaggacgactattccaacccgtatggtacctcgatctatgcaggcagccattacccagcgatatccatcacacatcagtctatcgatcgatcctgggaggatgcagaaactctcgactcgactcgatcgataacggaccgggacgtgaactacgtgatagaaaatgggcgacggtactgcggatcatattacatgccgaacgacgaagatgagcaggtgcggcttcagttactcaaccaagtctatctcaaaattttcgatggagaattaacgacggtgcctttggaatgcccgagtcatattctcgacgtcggtacggctgctggcgagtgggccatcgacatggccgagtcttatccggaatgcgacgttacaggaacagatatatctaatatttttgaacgaagggtaccgcaaaatgtttattgggagatcgacgacgcagagatggaatgggagagaccatcagattactacgacttggtacactttcgcgatatgactggcgccttttcagactgggaagctgtctacaagtctgcttttcggtgcttaaagcccggcggctggatagaggtgttggattttgatgacaagaaggggatggcagatttgtttgcatacttcgaacctgagtcggtgctttacaaattagcgcgagacatcgtagaagcggcaacaatgtcgggaaaaccgcggggaatcggccatctggaaccaagactactcgtcaacgctggctatgtcgacgtcaagctcactgagtactcgataccactgaaaacagcagatggctcgacagggaagttctggctgctatcgtgtctcaacgggatggagcccacatgtatgaggttgctcacgaaatacaaagggtggacgccggatgaggtccggaatgcctgtgagatggttggcgaagagttgatgactctggctcaagaccccaagctcgcaagaaatttcgtcacgacattgagagtactcacggggcggaagccggggtgctggtctaggcggccgttcagcaactcgctcgacgacatcatggaggacagcacgcagttagacgcagaacttttggatctgccagaagacacgaaaccgaagttgccgatcgatctggcttcacggatgacacagggaccaccgacaaagggtacgcagggtgatgttgagatggccgaacggccacatacaacagaagcctgggtgcgcaacgtggttcctgctgactaccagacggacgacggaagagtggatgatgccatggaggcggggaccgatgcagatacggaagctgacgcagacgacgacgataccatgatggatgatagatcagaaaccgcagcgtcgatggatgaatccaatccaagcacgactaagggaaggccattatcaatgggaggaccggcagtcatctcacaagtcccaaggccggcacccgagcctccatcatcgacatcaagaacaaataggacgaggaccttcacattatag

SEQ ID NO: 34175 - protein, 558 aa, Muscodor strobelii
  misc_feature: SGI Peptide ID NO. 571805
  misc_feature (161)..(252): Pfam Id: PF08241 Pfam Desc: Methyltransferase domain
  misc_feature (161)..(250): Pfam Id: PF08242 Pfam Desc: Methyltransferase domain
  misc_feature (70)..(442): NCBI GI: 46122181 Blast Desc: FG05468.1 [Gibberella zeae PH-1]
  misc_feature (97)..(393): NCBI GI: 261358247 Blast Desc: conserved [Verticillium albo-atrum VaMs.102]
  misc_feature (69)..(393): NCBI GI: 85084289 Blast Desc: NCU00401 [Neurospora crassa OR74A] gi|28918376|gb|EAA28051.1| [Neurospora crassa OR74A]
  misc_feature (19)..(393): NCBI GI: 116207956 Blast Desc: CHGG_03271 [Chaetomium globosum CBS 148.51] gi|88183868|gb|EAQ91336.1| CHGG_03271 [Chaetomium globosum CBS 148.51]
  misc_feature (67)..(404): NCBI GI: 171686506 Blast Desc: protein product [Podospora anserina] gi|170943214|emb|CAP68867.1| protein product [Podospora anserina]
  misc_feature (18)..(394): NCBI GI: 154311281 Blast Desc: BC1G_06493 [Botryotinia fuckeliana B05.10] gi|150850890|gb|EDN26083.1| BC1G_06493 [Botryotinia fuckeliana B05.10]
  misc_feature (77)..(418): NCBI GI: 115438422 Blast Desc: conserved [Aspergillus terreus NIH2624] gi|114188877|gb|EAU30577.1| conserved [Aspergillus terreus NIH2624]
  misc_feature (124)..(394): NCBI GI: 156065267 Blast Desc: SS1G_00644 [Sclerotinia sclerotiorum 1980] gi|154691503|gb|EDN91241.1| SS1G_00644 [Sclerotinia sclerotiorum 1980]
  misc_feature (92)..(393): NCBI GI: 242793845 Blast Desc: conserved [Talaromyces stipitatus ATCC 10500] gi|218718836|gb|EED18256.1| conserved [Talaromyces stipitatus ATCC 10500]
  misc_feature (93)..(419): NCBI GI: 67903692 Blast Desc: AN8833.2 [Aspergillus nidulans FGSC A4] gi|40740931|gb|EAA60121.1| AN8833.2 [Aspergillus nidulans FGSC A4] gi|259482956|tpe|CBF77925.1| TPA: conserved [Aspergillus FGSC
MPSHSYQSSTSFSDGFSASTRPNSDSEVPGLEPDLSSTEDLTSDYLSTRTRSVLGPIIDQDDYSNPYGTSIYAGSHYPAISITHQSIDRSWEDAETLDSTRSITDRDVNYVIENGRRYCGSYYMPNDEDEQVRLQLLNQVYLKIFDGELTTVPLECPSHILDVGTAAGEWAIDMAESYPECDVTGTDISNIFERRVPQNVYWEIDDAEMEWERPSDYYDLVHFRDMTGAFSDWEAVYKSAFRCLKPGGWIEVLDFDDKKGMADLFAYFEPESVLYKLARDIVEAATMSGKPRGIGHLEPRLLVNAGYVDVKLTEYSIPLKTADGSTGKFWLLSCLNGMEPTCMRLLTKYKGWTPDEVRNACEMVGEELMTLAQDPKLARNFVTTLRVLTGRKPGCWSRRPFSNSLDDIMEDSTQLDAELLDLPEDTKPKLPIDLASRMTQGPPTKGTQGDVEMAERPHTTEAWVRNVVPADYQTDDGRVDDAMEAGTDADTEADADDDDTMMDDRSETAASMDESNPSTTKGRPLSMGGPAVISQVPRPAPEPPSSTSRTNRTRTFTL

SEQ ID NO: 34176 - DNA, 2872 bp, Muscodor strobelii
  misc_feature: SGI EST ID NO. CUFF.80988.0
  misc_feature: Variant of the nucleotide sequence at SEQ ID NO 34174
gttcgcttgttcggctcgtgtactttcgacacttggcgatagcgtgagtctaggcgttgacgctagaaacatcgtggtttaaccgcgtggactgcacgtcgcttgtactagtatagacaatatgaccataggcggcaaggtagcatcgtgtcgcactccgcatcacacctcgaggcatgcccccagccctgtccgcagcacgatccaggctatgagagacacatcaggggtgctcattggcctgctaatctgcaatgctgcatgtcagtaggtaggtacacccatgcaacaccaccgggcgtcccatggtgatcaatcactgcgttcttcctttacgtcttccctcattgctctctctcactaagcgaacggccggttatctcccacttgaagacatctcgtgcccccattcttcccaactggtaggaagagggattagctggcggccgcatacgaaagccatcaaccattcatcaacggaatactgtaatcgctcctcttcgcgtgaaccggaccttatccggactgctttcccgagcccgtagccctcctgggagtacccgcaccgcaccaaactagtttcttagacatagtctagaagttggttccagcaagcgttcttttgagaatcttgcttctaggcaagatttcattcgagcaacatacccaatagcaacggcgtagactattttgtccagaccctatgcggtagaggtgttgctgtccgccatgcatgtcggtagaagacagagagacccaacgaatactcgcgcttcggatatacacaggacgatcgatgctgctacactatatttgaggaacaggtagtcgacatcacacaagcgacaagcgtagcggccgtaaaggatccgatcgaaaacatgccatcgcactcgtaccaatcatccacctcattttccgatggcttcagcgcctcgactcggcccaactctgactcagaagtccccggactggaacctgatctatcgtcgaccgaagacctcacaagtgactacctgagcacgaggacgagaagtgtcttagggcctataatcgaccaggacgactattccaacccgtatggtacctcgatctatgcaggcagccattacccagcgatatccatcacacatcagtctatcgatcgatcctgggaggatgcagaaactctcgactcgactcgatcgataacggaccgggacgtgaactacgtgatagaaaatgggcgacggtactgcggatcatattacatgccgaacgacgaagatgagcaggtgcggcttcagttactcaaccaagtctatctcaaaattttcgatggagaattaacgacggtgcctttggaatgcccgagtcatattctcgacgtcggtacggctgctggcgagtgggccatcgacatggccgagtcttatccggaatgcgacgttacaggaacagatatatctaatatttttgaacgaagggtaccgcaaaatgtttattgggagatcgacgacgcagagatggaatgggagagaccatcagattactacgacttggtacactttcgcgatatgactggcgccttttcagactgggaagctgtctacaagtctgcttttcggtgcttaaagcccggcggctggatagaggtgttggattttgatgacaagaaggggatggcagatttgtttgcatacttcgaacctgagtcggtgctttacaaattagcgcgagacatcgtagaagcggcaacaatgtcgggaaaaccgcggggaatcggccatctggaaccaagactactcgtcaacgctggctatgtcgacgtcaagctcactgagtactcgataccactgaaaacagcagatggctcgacagggaagttctggctgctatcgtgtctcaacgggatggagcccacatgtatgaggttgctcacgaaatacaaagggtggacgccggatgaggtccggaatgcctgtgagatggttggcgaagagttgatgactctggctcaagaccccaagctcgcaagaaatttcgtcacgacattgagagtactcacggggcggaagccggggtgctggtctaggcggccgttcagcaactcgctcgacgacatcatggaggacagcacgcagttagacgcagaacttttggatctgccagaagacacgaaaccgaagttgccgatcgatctggcttcacggatgacacagggaccaccgacaaagggtacgcagggtgatgttgagatggccgaacggccacatacaacagaagcctgggtgcgcaacgtggttcctgctgactaccagacggacgacggaagagtggatgatgccatggaggcggggaccgatgcagatacggaagctgacgcagacgacgacgataccatgatggatgatagatcagaaaccgcagcgtcgatggatgaatccaatccaagcacgactaagggaaggccattatcaatgggaggaccggcagtcatctcacaagtcccaaggccggcacccgagcctccatcatcgacatcaagaacaaataggacgaggaccttcacattataggatataggaaatatcatgttagaggaaagaaagggaagactggacttgcatgggatggcgaaccgacttatttacagggagcgccaggcgtttgtcgattgcacttttgctcagagtgaggcgtaacgggagatcatacccccagagtcagactcatcggtcattcatattataccgggaccaatacctgttgaaccaacagcgatgatttatttgataatttgaaatattagtagttgctggcggtgtccgcaatgaagtttacagcatgccgcatggcaaatgatgagtatgagcctaaagcagtgtcttct

SEQ ID NO: 34177 - DNA, 1248 bp, Muscodor strobelii
  misc_feature: SGI cDNA ID NO. 571806
  misc_feature: Encodes the peptide sequence at SEQ ID NO 34178
atgacccattcagcgcacacggatggaacgaatggggtacattctacttcgaatgctagaaaaacctcccgttattttgaagactatggagtatggaaagaagcaccggttctggtcggctcaactagatatgagccattacctgatgtcaaaaacatcatgatcacaggcggtgccgggttcatcgcttgttggcttgttcgacatctcacactgacatacccccacgcctataacattatatcattcgataaactagactactgctcttcactgaacaatacgcgcatgctcaatgacaagcggaacttcaccttttatcatggcgacatcaccaatccttctgaagtgcttgactgcatagagaggtacaacatcgacacgatatttcacttcgcagctcagtcccatgtggacttgagtttcggaaactcatatgggttcactcatactaatgtgtatggcactcatgttatgctcgagagcgcaaagaaggttgggatcaggcggttcatacatatctccaccgacgaggtatatggtgaagtcaaggacgatgacgacgacctattggagacaagcatactggcaccgaccaatccatacgctgccagtaaagccgctgctgagatgctcgtcaattcgtataataagagtttcaaacttcctgtcattatcgtgagaagcaataatgtatacggaccacaccaataccccgaaaaaatcattcccaagtttacttgcctgttgaataggaaacgaccggcggtaatacacggggatggcagcccgactcgacgatatctttatgccggcgatgctgctgatgcatttgacacgattctacacaaaggtgaccttggacacatctataatgtcggatcatatgatgagatctccaacatcgacttgtgtaagatgttgttgaaggagttggggctcccacacgagaatcaatccgatgtcaacaaatggatcaagtatactcacgatcgtccttttaatgaccaccgctacgcagtcgatggcaccaagctccggcaactggggtgggagcagaagacaactttctccgagggtctcaagatgactgtcgactggtataaaagatttggagaggagtggtggggtgacattagtaaggttctcagtccctttccaattgttatcgagaccgaagtgcactccgacaaagaagagatctgcgatgagccacaggtagcgaagaagaggaaggtttcggactga

SEQ ID NO: 34178 - protein, 415 aa, Muscodor strobelii
  misc_feature: SGI Peptide ID NO. 571806
  misc_feature (54)..(322): Pfam Id: PF01073 Pfam Desc: 3-beta hydroxysteroid dehydrogenase/isomerase family
  misc_feature (53)..(294): Pfam Id: PF01370 Pfam Desc: NAD dependent epimerase/dehydratase family
  misc_feature (55)..(344): Pfam Id: PF07993 Pfam Desc: Male sterility protein
  misc_feature (53)..(295): Pfam Id: PF02719 Pfam Desc: Polysaccharide biosynthesis protein
  misc_feature (51)..(370): Pfam Id: PF04321 Pfam Desc: RmlD substrate binding domain
  misc_feature (54)..(213): Pfam Id: PF01073 Pfam Desc: 3-beta hydroxysteroid dehydrogenase/isomerase family
  misc_feature (125)..(228): Pfam Id: PF07993 Pfam Desc: Male sterility protein
  misc_feature (109)..(177): Pfam Id: PF02719 Pfam Desc: Polysaccharide biosynthesis protein
  misc_feature (12)..(413): NCBI GI: 145608848 Blast Desc: MGG_06324 [Magnaporthe grisea 70-15] gi|145016278|gb|EDK00768.1| MGG_06324 [Magnaporthe grisea 70-15]
  misc_feature (9)..(414): NCBI GI: 154311283 Blast Desc: conserved [Botryotinia fuckeliana B05.10] gi|150850891|gb|EDN26084.1| conserved [Botryotinia fuckeliana B05.10]
  misc_feature (7)..(397): NCBI GI: 156065271 Blast Desc: conserved [Sclerotinia sclerotiorum 1980] gi|154691505|gb|EDN91243.1| conserved [Sclerotinia sclerotiorum 1980]
  misc_feature (10)..(413): NCBI GI: 261358248 Blast Desc: dTDP-D-glucose 4,6-dehydratase [Verticillium albo-atrum VaMs.102]
  misc_feature (15)..(405): NCBI GI: 256725444 Blast Desc: NECHADRAFT_45636 [Nectria haematococca mpVI 77-13-4]
  misc_feature (1)..(405): NCBI GI: 46122179 Blast Desc: FG05467.1 [Gibberella zeae PH-1]
  misc_feature (9)..(408): NCBI GI: 116207954 Blast Desc: CHGG_03270 [Chaetomium globosum CBS 148.51] gi|88183867|gb|EAQ91335.1| CHGG_03270 [Chaetomium globosum CBS 148.51]
  misc_feature (12)..(415): NCBI GI: 256729918 Blast Desc: [Nectria haematococca mpVI 77-13-4]
  misc_feature (8)..(376): NCBI GI: 189203413 Blast Desc: dTDP-D-glucose 4,6-dehydratase [Pyrenophora tritici-repentis Pt-1C-BFP] gi|187985141|gb|EDU50629.1| dTDP-D-glucose 4,6-dehydratase [Pyrenophora tritici-repentis
  misc_feature (13)..(394): NCBI GI: 119500660 Blast Desc: dtdp-glucose 4,6-dehydratase [Neosartorya fischeri NRRL 181] gi|119415252|gb|EAW25190.1| dtdp-glucose 4,6-dehydratase [Neosartorya fischeri NRRL 181]
  misc_feature (51)..(388): SWISSPROT Homolog: EC 4.2.1.46 dTDP-glucose 4,6-dehydratase
MTHSAHTDGTNGVHSTSNARKTSRYFEDYGVWKEAPVLVGSTRYEPLPDVKNIMITGGAGFIACWLVRHLTLTYPHAYNIISFDKLDYCSSLNNTRMLNDKRNFTFYHGDITNPSEVLDCIERYNIDTIFHFAAQSHVDLSFGNSYGFTHTNVYGTHVMLESAKKVGIRRFIHISTDEVYGEVKDDDDDLLETSILAPTNPYAASKAAAEMLVNSYNKSFKLPVIIVRSNNVYGPHQYPEKIIPKFTCLLNRKRPAVIHGDGSPTRRYLYAGDAADAFDTILHKGDLGHIYNVGSYDEISNIDLCKMLLKELGLPHENQSDVNKWIKYTHDRPFNDHRYAVDGTKLRQLGWEQKTTFSEGLKMTVDWYKRFGEEWWGDISKVLSPFPIVIETEVHSDKEEICDEPQVAKKRKVSD

SEQ ID NO: 34179 - DNA, 2695 bp, Muscodor strobelii
  misc_feature: SGI EST ID NO. CUFF.81066.2
  misc_feature: Variant of the nucleotide sequence at SEQ ID NO 34177
gggattcaacaccatggaactttcacactcactcaacgcccagagcgcacaagcattccttacgttctcttttcatgttcatagctctgtgcacttggtcttcgtcggttctgccattcccttcagccagttctctgtaccaaattactgaaccaaaattgcttgccttcagtcatctacatcagcgcatacggacggcataagacaagacgccgcttcatcgtggaaaatcgatgcgcatacgcctcggcacgtaggatacgttgtacgaacattgttacaccacctcggtactcactacctattgcccatcttcaattgctttgcgcttgactgttcacggcgttagtcgcgcaaacatagtacctacctgtccagactatgatcccgtaggactcagcaatctactctcattggtgctacgaaacgagtgactgtcgccgccctccttttgaggtatctgctgtgccttcattcacactttatatgctctctgagctcaacttggagatgctaaagtgatctagcctattgcattcctttactgtacatcgcagcttcactgcaacgaagatatcaccatctttcaacatgacccattcagcgcacacggatggaacgaatggggtacattctacttcgaatgctagaaaaacctcccgttattttgaagactatggagtatggaaagaagcaccggttctggtcggctcaactagatatgagccattacctgatgtcaaaaacatcatgatcacaggcggtgccgggttcatcgcttgttggcttgttcgacatctcacactgacatacccccacgcctataacattatatcattcgataaactagactactgctcttcactgaacaatacgcgcatgctcaatgacaagcggaacttcaccttttatcatggcgacatcaccaatccttctgaagtgcttgactgcatagagaggtacaacatcgacacgatatttcacttcgcagctcagtcccatgtggacttgagtttcggaaactcatatgggttcactcatactaatgtgtatggcactcatgttatgctcgagagcgcaaagaaggttgggatcaggcggttcatacatatctccaccgacgaggtatatggtgaagtcaaggacgatgacgacgacctattggagacaagcatactggcaccgaccaatccatacgctgccagtaaagccgctgctgagatgctcgtcaattcgtataataagagtttcaaacttcctgtcattatcgtgagaagcaataatgtatacggaccacaccaataccccgaaaaaatcattcccaagtttacttgcctgttgaataggaaacgaccggcggtaatacacggggatggcagcccgactcgacgatatctttatgccggcgatgctgctgatgcatttgacacgattctacacaaaggtgaccttggacacatctataatgtcggatcatatgatgagatctccaacatcgacttgtgtaagatgttgttgaaggagttggggctcccacacgagaatcaatccgatgtcaacaaatggatcaagtatactcacgatcgtccttttaatgaccaccgctacgcagtcgatggcaccaagctccggcaactggggtgggagcagaagacaactttctccgagggtctcaagatgactgtcgactggtataaaagatttggagaggagtggtggggtgacattagtaaggttctcagtccctttccaattgttatcgagaccgaagtgcactccgacaaagaagagatctgcgatgagccacaggtagcgaagaagaggaaggtttcggactgaccggtgttggcatcgtgcttttcgagaactggcgattctgatcggcaatgctctgtatcactacattagaacagtatttggtttggagttgggaagaatgcggtcatccaaaatacccgagaccaagagccacgttgaaacctacgaatacgcgacaggcatgatgcatatgcaatggcaacatgagatgacagatgacggaggtcggaaaggaagtccgatagaagcgatgcgacgagttgcaacagacatttccgataccattattgagcattcatatccccatgagaggtctcatactgtccatctgtcctgttttcaagacatagttgttgcatcctccaaaagcccccacgccaatctggttgcatgacccgccttccaaatcttaagccacacatccaaatgactgttcgctctcaccacctggatcgcgcgaaagaggagtccatcaacaattgaccagggcatctgtgaaatcattctacagtagacacacatttagagtgcaacgtattaagcgaaccatagctttatgatgcatcattgcgtatgtattgataaaacaccttttatacacatatgctcaggggaaccacgtggccgaaaagaaacaggagaacgaactgcattggcctgcagacctcccctgaaacagacgtgcgtgggcagaatgcgcgactctttctagacccattggaaagcggcccactcacggagcggatcgccaatctagacatgttgccgagagagttgcgaaacactttgatgaatttcttgagaatcacaactgtatgaccacattcgtagaagcgacgtcaaacacgagtgtgggatgtcagatctttaatctcac

SEQ ID NO: 34180 - DNA, 1167 bp, Muscodor strobelii
  misc_feature: SGI cDNA ID NO. 571807
  misc_feature: Encodes the peptide sequence at SEQ ID NO 34181
atgaacttttcccatggtcagatcgggcgagcgagatcaccgcgatcaccatattccgataccacgcaagatatcgatgatacgcctcaagagcctcgtaggtttgatgggataagcaatggcgacatccccttacggcacgtcgcgatcagtgaaggtggaagaccgcgggatgaagaaagtgcgagtcttcgggagaagaatcaacaagacgctccgattcccaatctggcgtcgaggacaagcttcgccgcagctaccttctggatcgtggtgaacacgttggcaaccataggcattgtcttcacgaataaagctatcttctccgatcccgacttgaagctagttcagctcaccttcgcagcattccatttcttcatgacgtggctgctcctatacaccctttcgcgacctcgatttgcctactttgtgccgcggaggaccacgatatggcaggtcgtcccgctctctatagccatgtgtctcaacgtgatcctaccgaacctatccttggccttctcatccgttacattctaccaggttgcgcgcatcctgctgactcccaccgtcgcaactatggactacgttttatacaagacgaccctgtcccggaatgccctcgtagctttaattcccgcctgtctaggcgttggacttgtgtcgtattatgactcgctgcccacggacgacgctaatgtgaaaaacacaacggggctgggagtcgtctttgccttctctggcattttcgcctcttcgctctacacggtgtggatcaagagctatcagcgaaagctacagatctcgagcatgcagctcctcttcaaccaggctcccgtctcggcctttctcctgctctacgccatcccgtttattgacacctttcccacgtggtctgaggtgccggtaaatcggtggctaatgattctcatgtcgggcatgtttgcagcgttgatcaacctgtctcaattcttcatcgtggggcagacaggaccagtgtcgagcacagtagtagggcatctcaagacgtgcctcatcgtagctctagggtggataacgtcggggaggtctgttggggacaaatccatccttggtgtcttcatcgccattggaggcatcatctgttattctgtcgtcatgctcaggcaagccgcctctacctccaagtag

SEQ ID NO: 34181 - protein, 388 aa, Muscodor strobelii
  misc_feature: SGI Peptide ID NO. 571807
  misc_feature (249)..(377): Pfam Id: PF00892 Pfam Desc: Integral membrane protein DUF6
  misc_feature (240)..(377): Pfam Id: PF03151 Pfam Desc: Triose-phosphate Transporter family
  misc_feature (19)..(388): NCBI GI: 154311287 Blast Desc: BC1G_06496 [Botryotinia fuckeliana B05.10] gi|150850893|gb|EDN26086.1| BC1G_06496 [Botryotinia fuckeliana B05.10]
  misc_feature (4)..(382): NCBI GI: 39976841 Blast Desc: MGG_06323 [Magnaporthe grisea 70-15] gi|145016280|gb|EDK00770.1| MGG_06323 [Magnaporthe grisea 70-15]
  misc_feature (27)..(374): NCBI GI: 156065275 Blast Desc: SS1G_00648 [Sclerotinia sclerotiorum 1980] gi|154691507|gb|EDN91245.1| SS1G_00648 [Sclerotinia sclerotiorum 1980]
  misc_feature (65)..(386): NCBI GI: 261358250 Blast Desc: solute carrier family 35 member E3 [Verticillium albo-atrum VaMs.102]
  misc_feature (86)..(372): NCBI GI: 256725313 Blast Desc: NECHADRAFT_45826 [Nectria haematococca mpVI 77-13-4]
  misc_feature (58)..(375): NCBI GI: 46127727 Blast Desc: FG08241.1 [Gibberella zeae PH-1]
  misc_feature (88)..(373): NCBI GI: 256729722 Blast Desc: NECHADRAFT_46748 [Nectria haematococca mpVI 77-13-4]
  misc_feature (44)..(382): NCBI GI: 238505807 Blast Desc: conserved [Aspergillus flavus NRRL3357] gi|220690222|gb|EED46572.1| conserved [Aspergillus flavus NRRL3357]
  misc_feature (64)..(388): NCBI GI: 261193457 Blast Desc: integral membrane protein [Ajellomyces dermatitidis SLH14081] gi|239588739|gb|EEQ71382.1| integral membrane protein [Ajellomyces dermatitidis SLH14081]
  misc_feature (64)..(388): NCBI GI: 239613936 Blast Desc: integral membrane protein [Ajellomyces dermatitidis ER-3]
MNFSHGQIGRARSPRSPYSDTTQDIDDTPQEPRRFDGISNGDIPLRHVAISEGGRPRDEESASLREKNQQDAPIPNLASRTSFAAATFWIVVNTLATIGIVFTNKAIFSDPDLKLVQLTFAAFHFFMTWLLLYTLSRPRFAYFVPRRTTIWQVVPLSIAMCLNVILPNLSLAFSSVTFYQVARILLTPTVATMDYVLYKTTLSRNALVALIPACLGVGLVSYYDSLPTDDANVKNTTGLGVVFAFSGIFASSLYTVWIKSYQRKLQISSMQLLFNQAPVSAFLLLYAIPFIDTFPTWSEVPVNRWLMILMSGMFAALINLSQFFIVGQTGPVSSTVVGHLKTCLIVALGWITSGRSVGDKSILGVFIAIGGIICYSVVMLRQAASTSK

SEQ ID NO: 34182 - DNA, 2117 bp, Muscodor strobelii
  misc_feature: SGI EST ID NO. CUFF.81180.0
  misc_feature: Variant of the nucleotide sequence at SEQ ID NO 34180
ctgccacgaggcagctggaaatccgacaacccccggtcgttggtgttaatgcgccaccaccccaagatatcgttccgtcttccccagatggttccaagctgcggggtggatccgtttgttcctgaagctcttgcccaaatctggtgcaaaagtccctggccccaaataaaaatgccaccccgtcgtcatcgcagggtctttgcggccgacaagccaccactctcttgagcacaggtcgacacaacttgacgtcgtagacccctccctcaatcctattacaacgatagcccatcatttgctacttcgagtcctatttttcgaaagcctaagctttgtgttgatcacagagcttggcggcagtgtttatctttctttctcctgttgctcttgcgccagccatacctcgtccgagctatccatctgcctacctagtctaggtacctctacacagctccgtcaacacacgaaatctagctctatccgctctaccaagcactcatgctgcctcaacacgacgagctctcatgctgcccataatccagtatgaacttttcccatggtcagatcgggcgagcgagatcaccgcgatcaccatattccgataccacgcaagatatcgatgatacgcctcaagagcctcgtaggtttgatgggataagcaatggcgacatccccttacggcacgtcgcgatcagtgaaggtggaagaccgcgggatgaagaaagtgcgagtcttcgggagaagaatcaacaagacgctccgattcccaatctggcgtcgaggacaagcttcgccgcagctaccttctggatcgtggtgaacacgttggcaaccataggcattgtcttcacgaataaagctatcttctccgatcccgacttgaagctagttcagctcaccttcgcagcattccatttcttcatgacgtggctgctcctatacaccctttcgcgacctcgatttgcctactttgtgccgcggaggaccacgatatggcaggtcgtcccgctctctatagccatgtgtctcaacgtgatcctaccgaacctatccttggccttctcatccgttacattctaccaggttgcgcgcatcctgctgactcccaccgtcgcaactatggactacgttttatacaagacgaccctgtcccggaatgccctcgtagctttaattcccgcctgtctaggcgttggacttgtgtcgtattatgactcgctgcccacggacgacgctaatgtgaaaaacacaacggggctgggagtcgtctttgccttctctggcattttcgcctcttcgctctacacggtgtggatcaagagctatcagcgaaagctacagatctcgagcatgcagctcctcttcaaccaggctcccgtctcggcctttctcctgctctacgccatcccgtttattgacacctttcccacgtggtctgaggtgccggtaaatcggtggctaatgattctcatgtcgggcatgtttgcagcgttgatcaacctgtctcaattcttcatcgtggggcagacaggaccagtgtcgagcacagtagtagggcatctcaagacgtgcctcatcgtagctctagggtggataacgtcggggaggtctgttggggacaaatccatccttggtgtcttcatcgccattggaggcatcatctgttattctgtcgtcatgctcaggcaagccgcctctacctccaagtagctatgaacctgggatggaagcggatcatgactgtagatttcgtcgcatgtttggagccaagggtaggcaacaagtcacgatgcctagagttttacgattagatggtggcccacattgatagatcgggcgtacttcaaaggtgctccgtgagcggtccttgatgtttagaggcgatgcatttcagcaatactttctatgccatacaattagatgatacccctatgatgcaaatacaattgcaaccttcgtttcaccaaatcagtgtcccaacaaaatgtcagcgtgacatcattttgagatgttgtagtagaccctctccgtttagtcaagacttgttgctggttccttcgaatgcatattccaaacgtcaacatactacaattgaaagaagaactgttggaaatctg

SEQ ID NO: 34183 - DNA, 534 bp, Muscodor strobelii
  misc_feature: SGI cDNA ID NO. 571809
  misc_feature: Reduced expression when VOC is produced
  misc_feature: Encodes the peptide sequence at SEQ ID NO 34184
atggaccaatatccgatgtcagatttaatgatggaggaactatacaatccgcgctgtccaatatacgcctcattcttcggagccttaggctgcgcagcatcaatagtattcaccgtaataggcgcatcctacgggaccgcgaaatccgcaacagccatcttctcatcaggcatcatccggcctgagaggttgatgcagaattcactatgcgcaataatggcccaaatcctcagtatatacggcctagtaacagccgtaataatccaaggtggcatccaagagaaaatgcccctctacagcggtttcatgcagctcggcgccgggatatccgtcggtctatgcggtctagctgcgggttttgctataggaattgttggggatgccggtgtccgcgcaagcacgcaacaaccacgcctctacatcggcatggtgctcatcctgatcttcgccgaagttctcggtctatacggcgtcgtggtagcagttttgatgaataccagagggactactaacgtcactgtttgtcctaagtaa

SEQ ID NO: 34184 - protein, 177 aa, Muscodor strobelii
  misc_feature: SGI Peptide ID NO. 571809
  misc_feature (102)..(167): Pfam Id: PF00137 Pfam Desc: ATP synthase subunit C
  misc_feature (26)..(91): Pfam Id: PF00137 Pfam Desc: ATP synthase subunit C
  misc_feature (18)..(169): NCBI GI: 46122185 Blast Desc: FG05470.1 [Gibberella zeae PH-1]
  misc_feature (26)..(175): NCBI GI: 261358245 Blast Desc: vacuolar ATP synthase subunit c [Verticillium albo-atrum VaMs.102]
  misc_feature (1)..(167): NCBI GI: 171686502 Blast Desc: protein product [Podospora anserina] gi|170943212|emb|CAP68865.1| protein product [Podospora anserina]
  misc_feature (19)..(173): NCBI GI: 261352097 Blast Desc: vacuolar ATP synthase 16 kDa proteolipid subunit [Verticillium albo-atrum VaMs.102]
  misc_feature (6)..(173): NCBI GI: 126275492 Blast Desc: vacuolar ATPase V0 domain subunit c [Pichia stipitis CBS 6054] gi|126212961|gb|EAZ63069.1| vacuolar ATPase V0 domain subunit c [Pichia stipitis CBS 6054]
  misc_feature (6)..(173): NCBI GI: 254572345 Blast Desc: Proteolipid subunit of the vacuolar H(+)-ATPase V0 sector [Pichia pastoris GS115] gi|238033080|emb|CAY71103.1| Proteolipid subunit of the vacuolar H(+)-ATPase V0 sector [Pichia
  misc_feature (6)..(173): NCBI GI: 50424561 Blast Desc: DEHA0F12683g [Debaryomyces hansenii CBS767] gi|49656538|emb|CAG89219.1| DEHA2F11638p [Debaryomyces hansenii]
  misc_feature (19)..(172): NCBI GI: 50556846 Blast Desc: YALI0F24475p [Yarrowia lipolytica] gi|49651701|emb|CAG78642.1| YALI0F24475p [Yarrowia lipolytica]
  misc_feature (19)..(173): NCBI GI: 19115711 Blast Desc: V-type ATPase subunit c [Schizosaccharomyces pombe] gi|1718096|sp|P50515.1|VATL_SCHPO RecName: Full=V-type proton ATPase 16 kDa proteolipid subunit; Short=V-ATPase 16 kDa subunit;
  misc_feature (19)..(172): NCBI GI: 156835852 Blast Desc: Kpol_170p3 [Vanderwaltozyma polyspora DSM 70294] gi|156841084|ref|XP_001643918.1| Kpol_1067p33 [Vanderwaltozyma polyspora DSM 70294] gi|156112630|gb|EDO14327.1| Kpol_170p3 DSM
  misc_feature: Useful for introducing or modulating the production of volatile compounds
MDQYPMSDLMMEELYNPRCPIYASFFGALGCAASIVFTVIGASYGTAKSATAIFSSGIIRPERLMQNSLCAIMAQILSIYGLVTAVIIQGGIQEKMPLYSGFMQLGAGISVGLCGLAAGFAIGIVGDAGVRASTQQPRLYIGMVLILIFAEVLGLYGVVVAVLMNTRGTTNVTVCPK

SEQ ID NO: 34185 - DNA, 4534 bp, Muscodor strobelii
  misc_feature: SGI EST ID NO. CUFF.81331.1
  misc_feature: Variant of the nucleotide sequence at SEQ ID NO 34183
tagatagaaaagtccttggcaggaacaaagattgatgcctgaagccttatcgagctcttaaatcctcctcgtgatctgacgtctcttcatcaattgtgcaccttgatacctcaagtagagcttgcgattgaactcaatcgtcgaaaaatcatacatccaactacttctaacttgcaaaggacacgtacacttcgagatggaccaatatccgatgtcagatttaatgatggaggaactatacaatccgcgctgtccaatatacgccgtacgtcattccaaagtctcgcacactatccttcagttcctcttagccgaagagctcaacaacagagcaacaccagctcccctacgataccgatccatcagtatcacagtcaactgagaaaccttactgccccaaccacaccacactcctcaccacccgcacatgcacaatctggcgcactagcttgtaagcaatctgagaacgagatgctaacaatccctagtcattcttcggagccttaggctgcgcagcatcaatagtattcaccgtaataggcgcatcctacgggaccgcgaaatccgcaacagccatcttctcatcaggcatcatccggcctgagaggttgatgcagaattcactatgcgcaataatggcccaaatcctcagtatatacggcctagtaacagccgtaataatccaaggtggcatccaagagaaaatgcccctctacagcggtttcatgcagctcggcgccgggatatccgtcggtctatgcggtctagctgcgggttttgctataggaattgttggggatgccggtgtccgcgcaagcacgcaacaaccacgcctctacatcggcatggtgctcatcctgatcttcgccgaagttctcggtctatacggcgtcgtggtagcagttttgatgaataccagagggactactaacgtcactgtttgtcctaagtaatgtctaataaggcattgacgtggaacatgccgacgtagaagctataagagaaggaaagaaggaccatgtcaagaacatgtctagaggcgctaatggctaccccggtggcttgactaagagactacatgctccggaggatatacgatggaataatgggataatgaaccgcggttagaaggtctgggtgtctgggttagtaacatatatggaaacgtttggatatatgaggcagacaatgcgaattttcgtctagcacaaaagccatcaccgcactaccagcgaagagagaataataatgctgctaacatctatttccactacggacttattgcccattcatggaccctcaaacacatccatcatcttatgaccaaggtgagaaatacgcatgcatgctctcccattcattaccctatccatgcggttcattccagaatcaaaactttctagattatgatattaaacagccatacagctccggactccttcgacatctccgctttcaatccgagtgatgtgttttggcagtttcgaaagaagccgggccctcctattccggttctgcattcgagtctgcacccagatctaagtccagatctccgtttctgcctgcatccaggtcccaccggtgtcgtccccgaacgagctcgaaagacccatccatctgaggcggtgacgaacctgtctcctctgcatcttgggttttgtcgaggcgatcctatacctcgtcgattttctcgatctccgacttggcctcctcccacgtctctttgttcttcttggcccactcgacctggctcttggcatatgcaatctactcgcaccattagtcctcatatcccatgatacagaacaaacccgacgtgacttaccatataccgtttcagatcatcctctttctctgtctgaaatctcttgaggtcctgaagaatattcgcacttgcggccttgacatcctgtgcagcggccacttgagcttgttcaagctgttcaatgctctcccgcgtcttcccaatggtatcacgcctggtcctctcaggatctacatccgcgacaccctgaatagcatgacggatcgggccaaatatcttgttggtaattgagttgccactagcagccttcctgtgtgttgggtttgacgtcgaacgctccggcaccccgaccttagcggatggtgcggacgagacatcgccgtgcgtctgcgggaaatccgaatcgatggaagcagtatcctcgccactaccctccctatggtgtgtcgaggtttctcgcatacttgtcgatcttctaggcggcggggcatgtgaaggtctggcaatttgctgactgctactcagatattgctcaattcttttcgcctctgcctcgctgctttccaactgctctaagagtgccttctttttgataagatcatcgtttgtcatttcttgctgcactctcttcagcactcgatagcgaagaacgcttcggacgacaccagcgaactgggcattctctctcatcggctcagcaaagtttgcccccagtgagcttgacaattcttcggtggctatgtaagacgagtctgcagcttggccgactctctcaatcgcagctgcgagagaccccgatggctccgagagcgcaaaagcattgaacttggcgccaagatcggaaagatccccagctagcgaactcaagtggctcaatgtccgacgattaaccttctccataggtcccgtcaaggcagtctccaattccttaatggaagcctcgaaggcaatgaagtagggatccaattcctgctcggaaaggccatgggtatcgggaggaaatcggcgaaggacctgagaggcgaaagtattggcgccttcgaagacaggagccgggggtgggttgacggggctcttgagcttggccgaagaaccaggaactggcagataggaatgcgcttgggtcgggtttgctgtgtccaacgggggcgccttcaggatagatttgggtatggatgatagaggatgagagtgaagaatctcgttctatgtgatgcaattagcaacaaaacactatacatgggaggcaaagcgcttacccagctgacattagggtcaaggaatctccagagaatgccgtcctctctcacttggtccattctgcgacagcgattcaagaagacggccagcatgcgcttgcgcaagtctatgatctgctgatcttgtttggcgtttgtggggttcgcggcatagtcggccatggtgtgcttctcgggaatcggagggatgatgagagtggggtgcagcttggtcagggcatcacgaaacgaggcgaattcggagtagcgacggcggacttccagatcctagtatttaacgtgagtgatgagaagcatagcgagtgaagtcaggatattgcatacgcctgtgcggatcgtatagactatgtacttccctccgctctccatgctcttgccggcatcggttatgaggatggggagctcggggctctcgtagaggatctgctcgatgcgactgtcgtaaccgcccggcttcctcctgggggttggctggccaaagtcatcgccatcgtcgctatctggggcaccggactggggctgatatgtgtcgggaggaggtgcatcttccgaggtgtttgaaggagtgttgggggtctcgaagcggtgttggtctacaaaatgccagtcaggaccactctcatcatcggagtcgtcaaatgctatagtgttccacatggtgtctcgtcggtcccagatcgcaataccagaaggtgggcagcaggcagtgacttacagtcgcgagagggagaggcgggattggccgaggacgaggtcatcgagtctcggcggtcgaagctggtgccgtacggattattgtcctcttcgtcgttccacatgttgaatatcagtcaccgtcgcggtgagcaacagtgtggcaagtcagtgctgatcagtcgataaggcgagtgagtgagttggggtattattatgccgtcattcacggggcggcggtgcgacgacggcgacagttgaggcgaatatcaaggcaatgacggcgaggcggggcagggcggcgggacggagtaggttgtttgctagacagggatgaggtatgcacctaagttcgcatggccagatagtatcaggggtagatgaattgactatgcagagactgtcattttcaatcgcgaagtcaccgaacggaaaggtgttgattatgcggcggcgacggcgaggatgaggatgagcatcatgttcggaagcttgggagcctagaaagtcgagctaatcctccccaagctattgcggctgcggctcctgccctgcgactgcgtcatgggctccagcctctcaccagctgcgcaagaacgctcgggccctcgatcgtcactggcccgcctagccgcccatccgttcacctactccactcgaggtccccaccttcctcagtctcgtcagtgggaagtgtctctgcgcatgcgatttcccgggtagccctcaggcttcacaatatgaacacagctatttatttgatgattcttcagtattttgcaatcccaaacactctgaaagacctcttgcatcttta

SEQ ID NO: 34186 - DNA, 765 bp, Muscodor strobelii
  misc_feature: SGI cDNA ID NO. 571810
  misc_feature: Encodes the peptide sequence at SEQ ID NO 34187
atggatgacccgaatgaacggcctgtcttcgaaaagctgtgcggcaacagacctgttatgctgttcaatgggtctaacgaggctccagaaatgacgcccgaaagtcggttgatcaagcggcagataatcaacatgaacaatgctatcgcacacttgcgcgatcagggctatacatggctactacacattgacacagatgagctgctctacggaccaggtccagacttcatggcctggtcgaaagacccagaggtcggactagtgaacttcgtcaatcatgaagctatccccgtcgctttcaacacgaccaatcctttcgcagactgtacatacttctgggtcaacggcatagatcggaacaagaacttcatggcatacggcaacggcaaaagtgccgtgcgactcggttctggcgtcgagccgcgcggaccgcataacttcactagtcgcactggaaaaacgctttcgccgcctgggcatcaggttatgatcctgcactatcctcatccatcatatgagagctggcaaaggaaatttgcgttttacgggaggttcccggatacttggtttggagataaacgcgccccgaagatcattgactttatgagggagtcgagagatgtggtccagaagtgtgttaagaagggcgattgggcgaaggctaagaaattcttcgcgaagcgcatactcggtgagaaggggagagcgagggaagttaagaggggggcagtcaggaggtattctccgcttcttgttagattctag

SEQ ID NO: 34187 - protein, 254 aa, Muscodor strobelii
  misc_feature: SGI Peptide ID NO. 571810
  misc_feature (36)..(248): NCBI GI: 86605707 Blast Desc: CYA_1008 [Synechococcus sp. JA-3-3Ab] gi|86554249|gb|ABC99207.1| CYA_1008 [Synechococcus sp. JA-3-3Ab]
  misc_feature (36)..(246): NCBI GI: 86607968 Blast Desc: CYB_0474 [Synechococcus sp. JA-2-3B'a(2-13)] gi|86556510|gb|ABD01467.1| CYB_0474 [Synechococcus sp. JA-2-3B'a(2-13)]
  misc_feature (34)..(245): NCBI GI: 284035815 Blast Desc: Slin_0892 [Spirosoma linguale DSM 74] gi|283815108|gb|ADB36946.1| Slin_0892 [Spirosoma linguale DSM 74]
  misc_feature (37)..(171): NCBI GI: 145340499 Blast Desc: [Ostreococcus lucimarinus CCE9901] gi|144575584|gb|ABO93653.1| [Ostreococcus lucimarinus CCE9901]
  misc_feature (35)..(168): NCBI GI: 116000234 Blast Desc: protein product [Ostreococcus tauri]
  misc_feature (35)..(173): NCBI GI: 255070639 Blast Desc: [Micromonas sp. RCC299] gi|226522676|gb|ACO68659.1| [Micromonas sp. RCC299]
  misc_feature (37)..(172): NCBI GI: 168038853 Blast Desc: [Physcomitrella patens subsp. patens] gi|162676865|gb|EDQ63343.1| [Physcomitrella patens subsp. patens]
  misc_feature (37)..(252): NCBI GI: 133711813 Blast Desc: sdl1-like protein [Solanum lycopersicum]
  misc_feature (37)..(252): NCBI GI: 15231932 Blast Desc: KOB1 (KOBITO) [Arabidopsis thaliana] gi|12322724|gb|AAG51348.1|AC012562_9 ; 7436-10438 [Arabidopsis thaliana] gi|23452834|gb|AAN33186.1| elongation defective 1
  misc_feature (37)..(172): NCBI GI: 238010284 Blast Desc: [Zea mays]
MDDPNERPVFEKLCGNRPVMLFNGSNEAPEMTPESRLIKRQIINMNNAIAHLRDQGYTWLLHIDTDELLYGPGPDFMAWSKDPEVGLVNFVNHEAIPVAFNTTNPFADCTYFWVNGIDRNKNFMAYGNGKSAVRLGSGVEPRGPHNFTSRTGKTLSPPGHQVMILHYPHPSYESWQRKFAFYGRFPDTWFGDKRAPKIIDFMRESRDVVQKCVKKGDWAKAKKFFAKRILGEKGRAREVKRGAVRRYSPLLVRF

SEQ ID NO: 34188 - DNA, 1504 bp, Muscodor strobelii
  misc_feature: SGI EST ID NO. CUFF.81334.0
  misc_feature: Variant of the nucleotide sequence at SEQ ID NO 34186
gtattgtatgctttttgatgaggttaagtttgaagtgggacataggtgtacagtcgccatatgcagtcgcaatatcgtctatattccttctgagtgagatgcgatacggctgcagttgtcactcctctacttgatggtctattacgcaaagctgactgatgggattggcatcagaatttgatcgtaggttgacagaggatgagcagctcatcgactcgaaggctgacagcatccccgcgcatacatctctttgctcaacttcttctcgttgctcttctctgcctaggttgcagagcactcgcagataaaaatggcgacgagattttcttaggcggtgagggatatgaaggtgtcagcgaggggagcctggagactgtctcgatcgcgatagcgacgaccatcttacgtcctgacccttcactctttccgatatggttggactatcatttccgcttcgtgcagcaagtggtcgtgtacatggatgacccgaatgaacggcctgtcttcgaaaagctgtgcggcaacagacctgttatgctgttcaatgggtctaacgaggctccagaaatgacgcccgaaagtcggttgatcaagcggcagataatcaacatgaacaatgctatcgcacacttgcgcgatcagggctatacatggctactacacattgacacagatgagctgctctacggaccaggtccagacttcatggcctggtcgaaagacccagaggtcggactagtgaacttcgtcaatcatgaagctatccccgtcgctttcaacacgaccaatcctttcgcagactgtacatacttctgggtcaacggcatagatcggaacaagaacttcatggcatacggcaacggcaaaagtgccgtgcgactcggttctggcgtcgagccgcgcggaccgcataacttcactagtcgcactggaaaaacgctttcgccgcctgggcatcaggttatgatcctgcactatcctcatccatcatatgagagctggcaaaggaaatttgcgttttacgggaggttcccggatacttggtttggagataaacgcgccccgaagatcattgactttatgagggagtcgagagatgtggtccagaagtgtgttaagaagggcgattgggcgaaggctaagaaattcttcgcgaagcgcatactcggtgagaaggggagagcgagggaagttaagaggggggcagtcaggaggtattctccgcttcttgttagattctagagcgtcagaaaggaaggaagctcaacagtgacaatttgcttaaatacgtgtctagaaaactggccaggacatggctgtaagtatattaattgcgggaaaggttatgaattatcgcagaactcgcccacttgaccatacacaacggttgtggaacatccgagttgatgtattaagttgtagattgcacaaggcgattatgtactgatcactatatgccacgaagtggctcacatattaagtcgttagtcagagagttatccca

SEQ ID NO: 34189 - DNA, 522 bp, Muscodor strobelii
  misc_feature: SGI cDNA ID NO. 571811
  misc_feature: Encodes the peptide sequence at SEQ ID NO 34190
atgaaggtcgctttcttcttcggcctctttgcctcgctcttcgcgatgacggttctggctatgccctatgataccggcgttctgtctcctgacgtcgacgtcgatccgatgaccaacagcagctcttatctcgttgccgacattcaagaccgatctttccctcttcgcgctcgttccggtgctttctccgccagctgtggccagccctttgtacagaatccctccggacagtacgatctagtcggtaattgcctgaagaagaacggcgatcgtctatgctccaccgtcaacttggacagatgcctcgcggttgaggatcgccgtatcgttgcgaagaacaactgggtagacggcggtggtcttgctagagcccactgctccagctgtacactctcggattccattcttcgctgcaattgtgccgatgatccattcgatctaaacaatgttatcggcaacgacgatggctatctgacttgcttcgagcacgccaatcgcttcacctcagacgggtgccgttaa

SEQ ID NO: 34190 - protein, 173 aa, Muscodor strobelii
  misc_feature: SGI Peptide ID NO. 571811
MKVAFFFGLFASLFAMTVLAMPYDTGVLSPDVDVDPMTNSSSYLVADIQDRSFPLRARSGAFSASCGQPFVQNPSGQYDLVGNCLKKNGDRLCSTVNLDRCLAVEDRRIVAKNNWVDGGGLARAHCSSCTLSDSILRCNCADDPFDLNNVIGNDDGYLTCFEHANRFTSDGCR

SEQ ID NO: 34191 - DNA, 594 bp, Muscodor strobelii
  misc_feature: SGI cDNA ID NO. 571812
  misc_feature: Encodes the peptide sequence at SEQ ID NO 34192
atgtcgttgataccgccatggaactccaggaaagttcttcccaagtatgcaatcaacggagaattcgagttccttcagtggtataacccgaacctcgattggagcggcaatttatgggaaatccataactttgatggtaattacagggcagtctcaacatttgctacttcaccgggacatttcatctgttttactatcaatacgaatatcataaatcaccaggtcaatgcagtcaatctcatgcagactgaatatcagctgaaagaaccaatggacaataacccctactacgctcccctaaagtgggttgtattcaatgatgttgtccacaacagctccaaagatgccattatgaatgcactccggctcactaagcggcacaagacagtgggaatatggcacaagttttccgaagatcaatcgggttgggaaaaactaatagagaaaaacacgcttctccggattgctaaggatctggccaagaacatggggggccaagtcggcggtgtctgggcgcttttccaacctcacgtgggtggtgacaacaatatcaacaagtccaacatccacatgaaggtcgaaatatcatattaa

SEQ ID NO: 34192 - protein, 197 aa, Muscodor strobelii
  misc_feature: SGI Peptide ID NO. 571812
MSLIPPWNSRKVLPKYAINGEFEFLQWYNPNLDWSGNLWEIHNFDGNYRAVSTFATSPGHFICFTINTNIINHQVNAVNLMQTEYQLKEPMDNNPYYAPLKWVVFNDVVHNSSKDAIMNALRLTKRHKTVGIWHKFSEDQSGWEKLIEKNTLLRIAKDLAKNMGGQVGGVWALFQPHVGGDNNINKSNIHMKVEISY

SEQ ID NO: 34193 - DNA, 3681 bp, Muscodor strobelii
  misc_feature: SGI cDNA ID NO. 571813
  misc_feature: Encodes the peptide sequence at SEQ ID NO 34194
atggtgcagccatcgatgcccaagcgaggttttgatgatgatgacgagctcgatacggcagccggtgagggtgcgaagaggaggaaggtaatttccgaatacgcgaaagttaatgaaagcaacatatgtgatcgaaagtcaaatgaccaatatactgttgggtggatctgcgctttaagtacggagtacgttgcggcacaagcctttctcgatgaaacacatagtaggccagagtatgtgtctcctgatgataacaatgactacacgcttgggaaagtagggagacataacgtcgttattgccgtcctgcctggcggagagtatggtatatcgtcggctgctattgtggccaaagatatgctgcacagcttccacaatgttagaattggcttaatggttggcattggtggcggggcgccaagccaaaagcatgatatccgtctcggcgacatcgtgataagtgaacctagggaagacattggcggcatattccagtacgacttcggcaaactgatacagggccaaggatttgactcaaccggctttttaaatcagccaccacgtgccctgcgagctgcggtgaacggactaaaggcgcagtatgaaattgagggccatcatatccaagagaatatcgatgccgtcatcaagaagtggccgagactgaaagagaagtatcagcgaccggacccagcgtcggatatactatatcggagcactattattcacgcttcagattactcaagttgttcagatgtatgtggtagtgatccgtcaagactagtatcaagacttgaacggactaaaagagaagatagtccaaagattcattacggtctgatcgcttctgcaaatcaactcatgaaggatgctttaatgcgtgatgccttggcaggacaaaaacataccatcaccagaggaatcaagggaaaggaggtgctttgttttgagatggaggcggctggcctgatgaatcactttccatgtttggttattcgcggtatatgtgactactcagatacgcacaaaaacaagcagtggcaaggttatgcagcaatggcggctgctgcatataccaaagatctcctctatcgaattcctcagagcataattgacgccgaggaaaggattggcgatattttgcttggtgtccaagagcatgttgatgaacttatcctccagcaacacaatgtagagtgtgaatctatcttagagtggcttgcacccattgactacacacttcagcatggagactacctcaggaggcgacagtccgggactgggcaatggctgttaaactcgcgagagtatcaagtctggcaaaagggtgataaccagacgctgctttgctctggtatcccaggcgcaggcaaaactatactaacatcgatagtggtcgaagatgtctgttcccgttttcataatgaagacgtcggtattgcattcctcttttgcaattttcagcaccaggacaagcagaagccagatgatattcttgcaaatatactgaagcagttggctcgtggtcgaccgtctttgccagacagcgtaaagacactctataatagacataaaagcagtaatacattaccaaaactggccgaaatctcgtctattcttctgtctgtagctggctcttacacaagagtcttcattgctgtcgacggacttgatgaatgcaacatgtcaggaaagattctgtcacacatattcaaccttcaagccaagaccggtgcaaacatattcgcgacttctcggccgatgcaagatatcgagaaggcatttgatggaagaagtgtaattctgaaaattcgtgccagagacgaagatgtggagaagtatgtcgacggtcatgttcttgagctacctctgctggacgaaaccaaccgagacatctcaaaggaaacgaaagaaagtttcaagcagttaattaaaaaaagtattgtggaagcttccaatggaatgtttcttctagcatatcttcacctcgagtcactcatcgataagacaacactgcacgatttgagttccgcattgaaattgctcccaaagggagagtacgcacttaaccaagcatatgggatgaatgtcaaaaggatcagaagccagaacgatggctttcgtctacttgctgaaagagtactattgatcctgacgtgcgtggagagaccacttacgagttcagaacttcgagaagcgcttgcaataaggcccaatagctcaaggatcgatgaaaacaaacgagaaagtaccagcatcatgattatggcctgtgtaggattagtcgttatcgacgaaaacagcagcatcatacgtttggtccacgacacaacaagggaatatttggcaacgcacatgttttgccttatcccttcaaaacatatcctggacatggaagatcctctgagaaacgacccacagcagacttgttttgccatggctgaagctcataaagccatgacgatgatctgcgttacatatctctcgttcgataccttcaaaggcgggatttgtcgcacggcgtgtgactttgaggagagactacgaacgaacccgttctatgattatgctgcacgttactggggtcaccatgcccgtgcagcatcatacgcagccgtgacctacccgaagagtacaatcgcagtcgatacctcaaatcaggccgtgatggcaaccgttgcttttctccaaagcgaagcacatctaacttcatcaagccaagcacttatgaccatcaaatcgcacttgaactataggccagagcttccaaccaaaataacggggcttcatctagcagcctattttggaataagtagagtggtaagcactctacttacacatgagtgtcacccagatccaaaggacagttacggtcggacgccgctattatatgcagctgcaagaggacacggtgccactgttaagttgcttctcgagacaaacaaagtcgatcccaactcagcaaccactagcgagcctgatataggttggacatcacttctatatgctgcggccaatgggcatgaggctattgtgaagcttctccttggcacacccaaagttgaccctaacttggaagacagaagaggtagaacagccctgtcgtgggctgctggaaacgggcataacactattgtcgatattttgttgaagatccccgagattaaagtagatttgaagaattcaggcaataggactccattatggtatgcagctgcaaatggaaacgaactcattatcaagctacttttagaaacgagaaaggccaatataaacgcgacagacgagagcgagcggacgccgttgtggtgtgccgccgcaaatgggaaccaggccattgttagaatgttacttgaaacaggcaaagctgatgtcgacaagagggatgaaaataactggaccccgctatggtatactgccacaaatgggcatacaagcatggccaagttattgcttgagatggggaaggctaatgccgactcacgtgatgacaatggccgaactcctttatggtgtgctgctgcaaatggacatttggaggttgttcaactacttctcgattacggcgctgacattgatgccaaggacaattacgcccaaagcgcactgttcgtagcggatcagaaagagcatgacgatattctacagttactacttggggaaggcgctcagttaggttaa

SEQ ID NO: 34194 - protein, 1226 aa, Muscodor strobelii
  misc_feature: SGI Peptide ID NO. 571813
  misc_feature (1165)..(1197): Pfam Id: PF00023 Pfam Desc: Ankyrin repeat
  misc_feature (1063)..(1096): Pfam Id: PF00023 Pfam Desc: Ankyrin repeat
  misc_feature (957)..(990): Pfam Id: PF00023 Pfam Desc: Ankyrin repeat
  misc_feature (1097)..(1130): Pfam Id: PF00023 Pfam Desc: Ankyrin repeat
  misc_feature (1131)..(1164): Pfam Id: PF00023 Pfam Desc: Ankyrin repeat
  misc_feature (995)..(1028): Pfam Id: PF00023 Pfam Desc: Ankyrin repeat
  misc_feature (47)..(1224): NCBI GI: 116194308 Blast Desc: CHGG_03752 [Chaetomium globosum CBS 148.51] gi|88179665|gb|EAQ87133.1| CHGG_03752 [Chaetomium globosum CBS 148.51]
  misc_feature (48)..(1225): NCBI GI: 169782465 Blast Desc: [Aspergillus oryzae RIB40] gi|83774438|dbj|BAE64562.1| protein product [Aspergillus oryzae]
  misc_feature (46)..(1193): NCBI GI: 171693393 Blast Desc: protein product [Podospora anserina] gi|170946645|emb|CAP73448.1| protein product [Podospora anserina]
  misc_feature (46)..(1189): NCBI GI: 238491078 Blast Desc: ankyrin repeat-containing protein, [Aspergillus flavus NRRL3357] gi|220697189|gb|EED53530.1| ankyrin repeat-containing protein, [Aspergillus flavus NRRL3357]
  misc_feature (46)..(1168): NCBI GI: 169773129 Blast Desc: [Aspergillus oryzae RIB40] gi|83768894|dbj|BAE59031.1| protein product [Aspergillus oryzae]
  misc_feature (51)..(1076): NCBI GI: 46117326 Blast Desc: FG04505.1 [Gibberella zeae PH-1]
  misc_feature (132)..(1186): NCBI GI: 119479349 Blast Desc: Ankyrin repeat protein [Neosartorya fischeri NRRL 181] gi|119407857|gb|EAW17806.1| Ankyrin repeat protein [Neosartorya fischeri NRRL 181]
  misc_feature (49)..(1185): NCBI GI: 169784486 Blast Desc: [Aspergillus oryzae RIB40] gi|83775451|dbj|BAE65571.1| protein product [Aspergillus oryzae]
  misc_feature (27)..(1225): NCBI GI: 212528994 Blast Desc: Pfs, NACHT and Ankyrin domain protein [Penicillium marneffei ATCC 18224] gi|210074052|gb|EEA28139.1| Pfs, NACHT and Ankyrin domain protein [Penicillium marneffei ATCC 18224]
  misc_feature (49)..(1185): NCBI GI: 238508362 Blast Desc: vps9-ankyrin repeat-containing protein, [Aspergillus flavus NRRL3357] gi|220688895|gb|EED45247.1| vps9-ankyrin repeat-containing protein, [Aspergillus flavus NRRL3357]
MVQPSMPKRGFDDDDELDTAAGEGAKRRKVISEYAKVNESNICDRKSNDQYTVGWICALSTEYVAAQAFLDETHSRPEYVSPDDNNDYTLGKVGRHNVVIAVLPGGEYGISSAAIVAKDMLHSFHNVRIGLMVGIGGGAPSQKHDIRLGDIVISEPREDIGGIFQYDFGKLIQGQGFDSTGFLNQPPRALRAAVNGLKAQYEIEGHHIQENIDAVIKKWPRLKEKYQRPDPASDILYRSTIIHASDYSSCSDVCGSDPSRLVSRLERTKREDSPKIHYGLIASANQLMKDALMRDALAGQKHTITRGIKGKEVLCFEMEAAGLMNHFPCLVIRGICDYSDTHKNKQWQGYAAMAAAAYTKDLLYRIPQSIIDAEERIGDILLGVQEHVDELILQQHNVECESILEWLAPIDYTLQHGDYLRRRQSGTGQWLLNSREYQVWQKGDNQTLLCSGIPGAGKTILTSIVVEDVCSRFHNEDVGIAFLFCNFQHQDKQKPDDILANILKQLARGRPSLPDSVKTLYNRHKSSNTLPKLAEISSILLSVAGSYTRVFIAVDGLDECNMSGKILSHIFNLQAKTGANIFATSRPMQDIEKAFDGRSVILKIRARDEDVEKYVDGHVLELPLLDETNRDISKETKESFKQLIKKSIVEASNGMFLLAYLHLESLIDKTTLHDLSSALKLLPKGEYALNQAYGMNVKRIRSQNDGFRLLAERVLLILTCVERPLTSSELREALAIRPNSSRIDENKRESTSIMIMACVGLVVIDENSSIIRLVHDTTREYLATHMFCLIPSKHILDMEDPLRNDPQQTCFAMAEAHKAMTMICVTYLSFDTFKGGICRTACDFEERLRTNPFYDYAARYWGHHARAASYAAVTYPKSTIAVDTSNQAVMATVAFLQSEAHLTSSSQALMTIKSHLNYRPELPTKITGLHLAAYFGISRVVSTLLTHECHPDPKDSYGRTPLLYAAARGHGATVKLLLETNKVDPNSATTSEPDIGWTSLLYAAANGHEAIVKLLLGTPKVDPNLEDRRGRTALSWAAGNGHNTIVDILLKIPEIKVDLKNSGNRTPLWYAAANGNELIIKLLLETRKANINATDESERTPLWCAAANGNQAIVRMLLETGKADVDKRDENNWTPLWYTATNGHTSMAKLLLEMGKANADSRDDNGRTPLWCAAANGHLEVVQLLLDYGADIDAKDNYAQSALFVADQKEHDDILQLLLGEGAQLG

SEQ ID NO: 34195 - DNA, 1425 bp, Muscodor strobelii
  misc_feature: SGI cDNA ID NO. 571814
  misc_feature: Encodes the peptide sequence at SEQ ID NO 34196
atgcgatccgtacaattatgtgccgcggttgcaggtcttctttcctacgcggctcatgcgcgtaatttacccagtctcaaccagcaacccaaagttgtccaactatcaacgcagcgaaataccgtcacgaatccattgactcgtgacagattgcggcgtcgtggctcagtccaggccggtctatcaaatgaggaaactttatactacataaatacaacgataggcacgccaacacaatccataagactacagctcgacaccggtagtagcgatctttgggtcaatacacccacttcgaatgagtgcaaagcatctggcagtccttgtgcgagcaccggcacttacagcgccaatgactcgtcaacttacgagtatgttgggagctggtttaacatctcatatgtcgacgggacatctgctggaggagactacgtgaaggatacagtgacggtcggatcaactacattggaccagttgcagttcggtataggttatacgagctcttcttctcaaggtattcttggcataggatacccatccaatgaggtacaggtgggcagagcaggcaaaaaagcatacgacaatctgccagcggcattagttacggcgggatctatctcccggaatgcatacagtctttggttgaacgacctcgatgctagcagtgggagcatcctattcggtggtatcgacacggcccagtatactggaaccttatcgacactacccatccaaacctacgacaactcatattccgagttcctcgttacactgactgaagtgtctttcggaaatgaatcgatagcgaccgacgaggcattggccgttctactcgattcggggtcatcactgacttatcttccggactcttggactcagagcattttcaaccaggtagatgctcaatatgactcgagctcgggcgcggcttacgtcctctgctccctacgcaactcagacatggtactcgacttcacgttcagctcaccaaccattactgtcacaatggacgagctcgttattgacgtcacatcaggcggccagcccctgaaattttctgacggtcaagacgcatgtcttttcggcatcgccccggccggctcaggcaccagtgtgctcggtgacaccttccttcgatccgcctacgtcgtttacgatattgccaataacgagatctccattgcgcagaccaacttcaacgccacaacgaccagtatccaggagatcccaacgggcacgtctctgccaggtgcaacgtttgtgtccaactccgtcaaagctaccggtggcgtcccgagtagctctggcataaatacgggttccggtgatttccagaacgccgcaccgtctgtggctgcgtcagcatctgtgctgacttcgtgcatcatcattggagtagcaatttttggcactgttatgctttaa

SEQ ID NO: 34196 - protein, 474 aa, Muscodor strobelii
  misc_feature: SGI Peptide ID NO. 571814
  misc_feature (67)..(397): Pfam Id: PF00026 Pfam Desc: Eukaryotic aspartyl protease
  misc_feature (1)..(449): NCBI GI: 156065227 Blast Desc: SS1G_00624 [Sclerotinia sclerotiorum 1980] gi|154691483|gb|EDN91221.1| SS1G_00624 [Sclerotinia sclerotiorum 1980]
  misc_feature (24)..(437): NCBI GI: 171686500 Blast Desc: protein product [Podospora anserina] gi|170943211|emb|CAP68864.1| protein product [Podospora anserina]
  misc_feature (1)..(427): NCBI GI: 154311375 Blast Desc: BC1G_06540 [Botryotinia fuckeliana B05.10] gi|114149215|gb|AAR87747.3| aspartic proteinase precursor [Botryotinia fuckeliana] gi|150850937|gb|EDN26130.1| BC1G_06540
  misc_feature (30)..(463): NCBI GI: 39976849 Blast Desc: MGG_06327 [Magnaporthe grisea 70-15] gi|145016274|gb|EDK00764.1| MGG_06327 [Magnaporthe grisea 70-15]
  misc_feature (1)..(431): NCBI GI: 116207960 Blast Desc: CHGG_03273 [Chaetomium globosum CBS 148.51] gi|88183870|gb|EAQ91338.1| CHGG_03273 [Chaetomium globosum CBS 148.51]
  misc_feature (1)..(431): NCBI GI: 261358244 Blast Desc: candidapepsin-3 [Verticillium albo-atrum VaMs.102]
  misc_feature (15)..(464): NCBI GI: 121703500 Blast Desc: aspartic-type endopeptidase (OpsB), [Aspergillus clavatus NRRL 1] gi|119398158|gb|EAW08588.1| aspartic-type endopeptidase (OpsB), [Aspergillus clavatus NRRL 1]
  misc_feature (29)..(473): NCBI GI: 255931549 Blast Desc: Pc12g04620 [Penicillium chrysogenum Wisconsin 54-1255] gi|211581950|emb|CAP80089.1| Pc12g04620 [Penicillium chrysogenum Wisconsin 54-1255]
  misc_feature (19)..(425): NCBI GI: 115398434 Blast Desc: ATEG_05628 [Aspergillus terreus NIH2624] gi|114191689|gb|EAU33389.1| ATEG_05628 [Aspergillus terreus NIH2624]
  misc_feature (28)..(440): NCBI GI: 189195264 Blast Desc: candidapepsin-4 precursor [Pyrenophora tritici-repentis Pt-1C-BFP] gi|187979849|gb|EDU46475.1| candidapepsin-4 precursor [Pyrenophora tritici-repentis
  misc_feature (25)..(399): SWISSPROT Homolog: EC 3.4.23.24 Candidapepsin
MRSVQLCAAVAGLLSYAAHARNLPSLNQQPKVVQLSTQRNTVTNPLTRDRLRRRGSVQAGLSNEETLYYINTTIGTPTQSIRLQLDTGSSDLWVNTPTSNECKASGSPCASTGTYSANDSSTYEYVGSWFNISYVDGTSAGGDYVKDTVTVGSTTLDQLQFGIGYTSSSSQGILGIGYPSNEVQVGRAGKKAYDNLPAALVTAGSISRNAYSLWLNDLDASSGSILFGGIDTAQYTGTLSTLPIQTYDNSYSEFLVTLTEVSFGNESIATDEALAVLLDSGSSLTYLPDSWTQSIFNQVDAQYDSSSGAAYVLCSLRNSDMVLDFTFSSPTITVTMDELVIDVTSGGQPLKFSDGQDACLFGIAPAGSGTSVLGDTFLRSAYVVYDIANNEISIAQTNFNATTTSIQEIPTGTSLPGATFVSNSVKATGGVPSSSGINTGSGDFQNAAPSVAASASVLTSCIIIGVAIFGTVML

SEQ ID NO: 34197 - DNA, 2596 bp, Muscodor strobelii
  misc_feature: SGI EST ID NO. CUFF.81053.1
  misc_feature: Variant of the nucleotide sequence at SEQ ID NO 34195
cgacgggccgcgcgtcaattctgaaatggggagtgatcaacctctctgattggctccttccactacgacgccgtgcactacggagacctcatccctgtcttttcatagactaaaggcacattatggtcgcttgtttggtatcttcgttacagatttgcaggacgagatatttttatgaaacggctcccatcgttcattggatttgcctggttacttagagtcgcagtctacccgaaccgggcgagtggcgtgtgcaactgtcggcaggcgcacgatgccgtctgggcgcagcgtttctaagttcgctcagcctctctgtgaggatgcgtattccgagggcatagacggtgtaacggtcacgacgaatgatgacatggcttgtcaaagccgttggtgtcttacgttagctgtccgttcctctctgtcatcctcgttttagagttcccatgcctctgctttgttcctctctcgtcccgatatctcggcgtagtgcgccacgcccaacttgcacgtacccgtcacgccacggacggcttacgagtcctgtcccaccagactgggagagtttccaccacacacacgtctctctgagtcgtgcgcaacggtgagaatataacatcaccgtaacctcctagattcttggctgcatttcgatgtaggaattacacagagatctacaagtactaccggattgtggtgtcgaatctctgatcacccaatacttccgtcagccagacattcagacacgggacggagacttcagtgccgagtaacgcatatagacgccgcacccaaatatgcgatccgtacaattatgtgccgcggttgcaggtcttctttcctacgcggctcatgcgcgtaatttacccagtctcaaccagcaacccaaagttgtccaactatcaacgcagcgaaataccgtcacgaatccattgactcgtgacagattgcggcgtcgtggctcagtccaggccggtctatcaaatgaggaaactttatactacataaatacaacgataggcacgccaacacaatccataagactacagctcgacaccggtagtagcgatctttgggtcaatacacccacttcgaatgagtgcaaagcatctggcagtccttgtgcgagcaccggcacttacagcgccaatgactcgtcaacttacgagtatgttgggagctggtttaacatctcatatgtcgacgggacatctgctggaggagactacgtgaaggatacagtgacggtcggatcaactacattggaccagttgcagttcggtataggttatacgagctcttcttctcaaggtattcttggcataggatacccatccaatgaggtacaggtgggcagagcaggcaaaaaagcatacgacaatctgccagcggcattagttacggcgggatctatctcccggaatgcatacagtctttggttgaacgacctcgatgctagcagtgggagcatcctattcggtggtatcgacacggcccagtatactggaaccttatcgacactacccatccaaacctacgacaactcatattccgagttcctcgttacactgactgaagtgtctttcggaaatgaatcgatagcgaccgacgaggcattggccgttctactcgattcggggtcatcactgacttatcttccggactcttggactcagagcattttcaaccaggtagatgctcaatatgactcgagctcgggcgcggcttacgtcctctgctccctacgcaactcagacatggtactcgacttcacgttcagctcaccaaccattactgtcacaatggacgagctcgttattgacgtcacatcaggcggccagcccctgaaattttctgacggtcaagacgcatgtcttttcggcatcgccccggccggctcaggcaccagtgtgctcggtgacaccttccttcgatccgcctacgtcgtttacgatattgccaataacgagatctccattgcgcagaccaacttcaacgccacaacgaccagtatccaggagatcccaacgggcacgtctctgccaggtgcaacgtttgtgtccaactccgtcaaagctaccggtggcgtcccgagtagctctggcataaatacgggttccggtgatttccagaacgccgcaccgtctgtggctgcgtcagcatctgtgctgacttcgtgcatcatcattggagtagcaatttttggcactgttatgctttaaggttttggcttcatggttaccatttttttcatatgtcaaacggccagatttgtcattaccaagtggagtaagagtcacatcataatattgcattgcatggctggcgttagaaactagtgcactgtcatttgggagggacttcgacatatggagaaagggagtttgggtaatttcattctctaagatacccagatagaaaagcatatgcttcatggagtaaatttcactgtcattctcacacttcccactctctattgtctttataagttctgttggcgaaacctcacgacctcgtgcttcatatctagaagagttctttgtttcaatatgcagcaagaactcctgctagccgagtggaggaagaagaagataga

SEQ ID NO: 34198 - DNA, 1749 bp, Muscodor strobelii
  misc_feature: SGI cDNA ID NO. 571815
  misc_feature: Elevated expression when VOC is produced
  misc_feature: Encodes the peptide sequence at SEQ ID NO 34199
atgggcatgaggctcataaataccgacactcgtgcactgcatgagttcttcgtccagcagcccttccagccgccaccgaagtatgcgatcttgtcccatacttggggagaagaggaagtctcatacaaagattacatcggcggcaactaccgccacctcaagggctttgctaaaattgataatgcttgtcgtctcgcagcatcagctcatctcaactatttgtgggtggatacctgctgcatcgataagagcagcagcgccgagctgtcggaagcaatcaactctatgtatgcatattatagctatagcgacctttgcttcgcgtttctgtccgatctcgatggaaattcgtgtgaagagaacctgggaaattgccgctggttttggcgcggatggactcttcaggagctgattgccccccgaatcgtccgtttttacgatgggacttggaatctgtttggcgataaagatcaaatggtatcgaggttatccgaagtcactggaatcgatgaggatattttactacacagagtttcttgttccgagagatccgttgcatgcagaatgtcatgggccgcgcataggaaaactactcgagaagaagacactgcatactgtctgatggggctttttgaaatcaacatgtctttgctctacggcgaggggggtaaggctttccgtcggcttcaagatgaaattattagagcgtcgcaagacgggagtatccttgcttggaccatatctgccacaacccgcacacaccagccagtcgactattctggtattctagccacttctccagaacagtttgcttccgggggctccatatcattatctagcccctcaaatgtcatgtttggaagagagcttgcggtcggaactatcggtctcatgatgagaagcctattacatctgcgcggtcgcccggggacatctgagtgccgctatgttttaccactgtattgccaagagaactctcgtctaggtagtcggagtgtaggtctcggaatacagctccgaaagattggacaggatacttttctccgagacgatccgaccatcctgcacaaatttacgcgacgcctaaagacttatacagctcgcgagagaacacttctcttcatactaccacgggctttgctatacggcaaaattaatatcaatcttagacggcacgttctaggcatctcgttggcctgtcaaaacctgcaactcgtcgatgactggggttgctttgacgcccaggaccaatgcttctttaccactacgatgtactcctcagactttgctgctctgagattcaagatcgtcattactagtaatgagacacacatgaggtcagtgcgaaaggctgaagttgactgcgtcttgtttgcttttgggtgggcatctccgtatccagacaaggtgtggcatcttctcttcgacaatcaacgctaccagctccaattgtcactcatacggcagagtttcaaagacttgacatttgtccaacggggtgagtttctgaacatgattcagagcctagggatacccctcaattccgatagcatatcgattccgattgaagatactgcgatgagcgcacacatcatgatagaacatgtggtgatggagaatgcggccatgtgcaagcggcccttttgccagctaagtatttcatatgaactggaaaagacaactgaccctactcaaaactacggagtcgagacaattcccaatttcaatgaaagcagtactttcttgtga

SEQ ID NO: 34199 - protein, 582 aa, Muscodor strobelii
  misc_feature: SGI Peptide ID NO. 571815
  misc_feature (28)..(136): Pfam Id: PF06985 Pfam Desc: Heterokaryon incompatibility protein (HET)
  misc_feature (28)..(114): Pfam Id: PF06985 Pfam Desc: Heterokaryon incompatibility protein (HET)
  misc_feature (116)..(136): Pfam Id: PF06985 Pfam Desc: Heterokaryon incompatibility protein (HET)
  misc_feature (3)..(557): NCBI GI: 169615661 Blast Desc: SNOG_10991 [Phaeosphaeria nodorum SN15] gi|111060370|gb|EAT81490.1| SNOG_10991 [Phaeosphaeria nodorum SN15]
  misc_feature (26)..(393): NCBI GI: 256734168 Blast Desc: NECHADRAFT_78015 [Nectria haematococca mpVI 77-13-4]
  misc_feature (3)..(355): NCBI GI: 169620574 Blast Desc: SNOG_13489 [Phaeosphaeria nodorum SN15] gi|160704067|gb|EAT78936.2| SNOG_13489 [Phaeosphaeria nodorum SN15]
  misc_feature (3)..(359): NCBI GI: 46126619 Blast Desc: FG07687.1 [Gibberella zeae PH-1]
  misc_feature (3)..(297): NCBI GI: 145605569 Blast Desc: MGG_09177 [Magnaporthe grisea 70-15] gi|145013388|gb|EDJ98029.1| MGG_09177 [Magnaporthe grisea 70-15]
  misc_feature (3)..(349): NCBI GI: 171689682 Blast Desc: protein product [Podospora anserina] gi|170944803|emb|CAP70915.1| protein product [Podospora anserina]
  misc_feature (10)..(408): NCBI GI: 171677823 Blast Desc: protein product [Podospora anserina] gi|170936980|emb|CAP61638.1| protein product [Podospora anserina]
  misc_feature (3)..(276): NCBI GI: 256722053 Blast Desc: NECHADRAFT_16940 [Nectria haematococca mpVI 77-13-4]
  misc_feature (3)..(292): NCBI GI: 256721662 Blast Desc: NECHADRAFT_18017 [Nectria haematococca mpVI 77-13-4]
  misc_feature (3)..(361): NCBI GI: 238485594 Blast Desc: ankyrin repeat-containing protein, [Aspergillus flavus NRRL3357] gi|220698914|gb|EED55253.1| ankyrin repeat-containing protein, [Aspergillus flavus NRRL3357]
  misc_feature: Useful for introducing or modulating the production of volatile compounds
MGMRLINTDTRALHEFFVQQPFQPPPKYAILSHTWGEEEVSYKDYIGGNYRHLKGFAKIDNACRLAASAHLNYLWVDTCCIDKSSSAELSEAINSMYAYYSYSDLCFAFLSDLDGNSCEENLGNCRWFWRGWTLQELIAPRIVRFYDGTWNLFGDKDQMVSRLSEVTGIDEDILLHRVSCSERSVACRMSWAAHRKTTREEDTAYCLMGLFEINMSLLYGEGGKAFRRLQDEIIRASQDGSILAWTISATTRTHQPVDYSGILATSPEQFASGGSISLSSPSNVMFGRELAVGTIGLMMRSLLHLRGRPGTSECRYVLPLYCQENSRLGSRSVGLGIQLRKIGQDTFLRDDPTILHKFTRRLKTYTARERTLLFILPRALLYGKININLRRHVLGISLACQNLQLVDDWGCFDAQDQCFFTTTMYSSDFAALRFKIVITSNETHMRSVRKAEVDCVLFAFGWASPYPDKVWHLLFDNQRYQLQLSLIRQSFKDLTFVQRGEFLNMIQSLGIPLNSDSISIPIEDTAMSAHIMIEHVVMENAAMCKRPFCQLSISYELEKTTDPTQNYGVETIPNFNESSTFL

SEQ ID NO: 34200 - DNA, 684 bp, Muscodor strobelii
  misc_feature: SGI cDNA ID NO. 571816
  misc_feature: Elevated expression when VOC is produced
  misc_feature: Encodes the peptide sequence at SEQ ID NO 34201
atggcatcaccacttacagcgtcgtcctcgtcgccgccgaccttctcaatcagcctagcgactcgggatgacctgcccgaactcgcagcaatcaatcgctcagcatactcacaagagctcccttcgcgattcgcacacaagcattgggatgacgtgagccacatgctcagcttcttcaaaggtcgcctagaaactcggttcgatcaccctggtacgcaaatattcaaggcatgtgatcccgcgaccgggaaaatcgccgggttcgcatgctggacccacgaaatgcctactgaagaggtggcgccaacaccgacgagtgcgatggcgcagaagatgccgccgggtctgaacatcgagtttatcaagactgttggtgccgagattgagcagcttagggatcatatgcggcgcgaggagcattattatctctcggctttcgctgtcgcgcttgatcagcagaatagagggattggttcgcaattactggagcattgtctgcagattgctgacgcagcagcgttgtcatcttttctcatctcattccctggctctcatagcttatatctccgatttggattctccgatgttgatcatcgcgatgtcgatctcaacgcatgggacggcaacaaattcagagggtttggcatttatcgtcaatatgcgatggtccggcggttgaaatga

SEQ ID NO: 34201 - protein, 227 aa, Muscodor strobelii
  misc_feature: SGI Peptide ID NO. 571816
  misc_feature (77)..(194): Pfam Id: PF00583 Pfam Desc: Acetyltransferase (GNAT) family
  misc_feature (15)..(227): NCBI GI: 256728221 Blast Desc: NECHADRAFT_54033 [Nectria haematococca mpVI 77-13-4]
  misc_feature (12)..(227): NCBI GI: 212533197 Blast Desc: conserved [Penicillium marneffei ATCC 18224] gi|210072119|gb|EEA26208.1| conserved [Penicillium marneffei ATCC 18224]
  misc_feature (13)..(227): NCBI GI: 242777499 Blast Desc: conserved [Talaromyces stipitatus ATCC 10500] gi|218722665|gb|EED22083.1| conserved [Talaromyces stipitatus ATCC 10500]
  misc_feature (11)..(224): NCBI GI: 240111563 Blast Desc: GNAT family acetyltransferase, [Coccidioides posadasii C735 delta SOWgp]
  misc_feature (7)..(214): NCBI GI: 258563766 Blast Desc: [Uncinocarpus reesii 1704] gi|237908135|gb|EEP82536.1| [Uncinocarpus reesii 1704]
  misc_feature (13)..(223): NCBI GI: 169785523 Blast Desc: [Aspergillus oryzae RIB40] gi|238506537|ref|XP_002384470.1| conserved [Aspergillus flavus NRRL3357] gi|83775970|dbj|BAE66089.1| protein product oryzae]
  misc_feature (11)..(224): NCBI GI: 119188563 Blast Desc: [Coccidioides immitis RS]
  misc_feature (14)..(195): NCBI GI: 46115680 Blast Desc: FG03682.1 [Gibberella zeae PH-1]
  misc_feature (13)..(223): NCBI GI: 67525409 Blast Desc: AN3162.2 [Aspergillus nidulans FGSC A4] gi|40744557|gb|EAA63733.1| AN3162.2 [Aspergillus nidulans FGSC A4] gi|259485882|tpe|CBF83282.1| TPA: conserved [Aspergillus FGSC
  misc_feature (10)..(212): NCBI GI: 226289570 Blast Desc: conserved [Paracoccidioides brasiliensis Pb18]
  misc_feature: Useful for introducing or modulating the production of volatile compounds
MASPLTASSSSPPTFSISLATRDDLPELAAINRSAYSQELPSRFAHKHWDDVSHMLSFFKGRLETRFDHPGTQIFKACDPATGKIAGFACWTHEMPTEEVAPTPTSAMAQKMPPGLNIEFIKTVGAEIEQLRDHMRREEHYYLSAFAVALDQQNRGIGSQLLEHCLQIADAAALSSFLISFPGSHSLYLRFGFSDVDHRDVDLNAWDGNKFRGFGIYRQYAMVRRLK

SEQ ID NO: 34202 - DNA, 7209 bp, Muscodor strobelii
  misc_feature: SGI EST ID NO. CUFF.81041.0
  misc_feature: Variant of the nucleotide sequence at SEQ ID NO 34200
gaaaactcaatcaccaccagcagcgagattgtgaaacattacagataccgcaattgctactcaatacttgccgaaagctatctgctctcgtcaatcactctgctactgattgagattgggaatgggcatgaggctcataaataccgacactcgtgcactgcatgagttcttcgtccagcagcccttccagccgccaccgaagtatgcgatcttgtcccatacttggggagaagaggaagtctcatacaaagattacatcggcggcaactaccgccacctcaagggctttgctaaaattgataatgcttgtcgtctcgcagcatcagctcatctcaactatttgtgggtggatacctgctgcatcgataagagcagcagcgccgagctgtcggaagcaatcaactctatgtatgcatattatagctatagcgacctttgcttcgcgtttctgtccgatctcgatggaaattcgtgtgaagagaacctgggaaattgccgctggtatggaaatgcctcacaaaccgacatcttcatctgcttacatggtttgaaggttttggcgcggatggactcttcaggagctgattgccccccgaatcgtccgtttttacgatgggacttggaatctgtttggcgataaagatcaaatggtatcgaggttatccgaagtcactggaatcgatgaggatattttactacacagagtttcttgttccgagagatccgttgcatgcagaatgtcatgggccgcgcataggaaaactactcgagaagaagacactgcatactgtctgatggggctttttgaaatcaacatgtctttgctctacggcgaggggggtaaggctttccgtcggcttcaagatgaaattattagagcgtcgcaagacgggagtatccttgcttggaccatatctgccacaacccgcacacaccagccagtcgactattctggtattctagccacttctccagaacagtttgcttccgggggctccatatcattatctagcccctcaaatgtcatgtttggaagagagcttgcggtcggaactatcggtctcatgatgagaagcctattacatctgcgcggtcgcccggggacatctgagtgccgctatgttttaccactgtattgccaagagaactctcgtctaggtagtcggagtgtaggtctcggaatacagctccgaaagattggacaggatacttttctccgagacgatccgaccatcctgcacaaatttacgcgacgcctaaagacttatacagctcgcgagagaacacttctcttcatactaccacgggctttgctatacggcaaaattaatatcaatcttagacggcacgttctaggcatctcgttggcctgtcaaaacctgcaactcgtcgatgactggggttgctttgacgcccaggaccaatgcttctttaccactacgatgtactcctcagactttgctgctctgagattcaagatcgtcattactagtaatgagacacacatgaggtcagtgcgaaaggctgaagttgactgcgtcttgtttgcttttgggtgggcatctccgtatccagacaaggtgtggcatcttctcttcgacaatcaacgctaccagctccaattgtcactcatacggcagagtttcaaagacttgacatttgtccaacggggtgagtttctgaacatgattcagagcctagggatacccctcaattccgatagcatatcgattccgattgaagatactgcgatgagcgcacacatcatgatagaacatgtggtgatggagaatgcggccatgtgcaagcggcccttttgccagctaagtatttcatatgaactggaaaagacaactgaccctactcaaaactacggagtcgagacaattcccaatttcaatgaaagcagtactttcttgtgagatgtgtccgtttagatctccaggcaagcatctcgtcacttcctcaagcccatattgccagcagttcttagcgctttcatctgcatttagactacgaatactttcaaagagaggttgaaactgagaatttagcgatgcttgccgggaatagctgtagattttggttctgtacattctatcttcagaaaagaacgagtgttccaaactaccgggtctcatcctaaagttccccagagtggggtattgcgttgacatagccacgatacaagacacgacaatttgttgcctgcaacaacggctgctcaaagggaacatttgatcccatattttgaatgtgtgccttcactttacctaaattctgcggcggacaattgagcgttttacagcctggcaatggcatcaccacttacagcgtcgtcctcgtcgccgccgaccttctcaatcagcctagcgactcgggatgacctgcccgaactcgcagcaatcaatcgctcagcatactcacaagagctcccttcgcgattcgcacacaagcattgggatgacgtgagccacatgctcagcttcttcaaaggtcgcctagaaactcggttcgatcaccctggtacgcaaatattcaaggcatgtgatcccgcgaccgggaaaatcgccgggttcgcatgctggacccacgaaatgcctactgaagaggtggcgccaacaccgacgagtgcgatggcgcagaagatgccgccgggtctgaacatcgagtttatcaagactgttggtgccgagattgagcagcttagggatcatatgcggcgcgaggagcattattatctctcggctttcgctgtcgcgcttgatcagcagaatagagggattggttcgcaattactggagcattgtctgcagattgctgacgcagcagcgttgtcatcttttctcatctcattccctggctctcatagcttatatctccgatttggattctccgatgttgatcatcgcgatgtcgatctcaacgcatgggacggcaacaaattcagagggtttggcatttatcgtcaatatgcgatggtccggcggttgaaatgagagagtagagaaccgaagcgcaatgatttgatgatcttcttgccatacgatcagacaaaatgactgctgaaaacagtcagaatagttgattttgtggtatatctaggttattttgtttgtttttattttcagtattcgtcgagggcggacacatcaaccgagaaatctatcgatccgtgattaagtgaacggatctgatgatatgcaatgatatcctcgtcttcttcagcttcgtctccaaaataatcctcgagtccatgatcaaaattatactcttgatagaattctgatccatcctctgatccatcctctgatccatcctctaatccatcctctaatccatcctctaattcatcctctgatccacccactgatccatcctctaattcatcctcgagctcttgttcttgatcttcttcttcatcaaagaaatccggcccgccgaagtcatcatcagtttccatctcatccagctcgctctcatcatcagagtcgtctggcgcagtgattttccctctcaataccggggtcgagtccttgatgaaatgtgcaagaagatcctgccatacttcagcacgtttttgacgtaatgcgcaatccccggagtagtagagcgactggagtacacgatcaagaccggaaacgcccttgttgttcttcttctcatacgaaacattccattttagacatactatgatggagagggcagatcgcattgcaatagattcgaccgacgacccaggatcgtctggatcgtcactgggcttcaatgtttccacgtggtcgcatatcatgtgtatcatggtgtttccatcgtcgtcacgaatagccggtccaatgcccttcttgaagagtagagacaacattgtggctttctggcggcgacacgcggcttgtgcatattctagcatcaatcccagcctcgtttcatgcgaattcggcatctgattaacaatatatgggtcaaaaattgcgccatctccgatcattgctcgaactacagattttgaggagtgttcaattgaccagcccaacggagtcgtgccttggaatggggggccgccttcgggatcgaagtcagagatagcaatcgcagagtcgctggaatccacaaccagacgtttatggatatcggcatagttgaatgtcaacgcctcgatgaacttggtcgtgctcgcggagataccagtgaacgcagctaaatgcagcggggttgcggttgttgttttgcccttgtcgttcttgatggtcagtatctcattaggagaaaacccttcgagaccaatgagtaagtcaaacatgcgatcgagtacgatagtacgttgcaatgctgaggactttacaaaaaaagaccaatgtccagtagtctcttcctcgttgggagcacagtatttatcgtggaaaattatcgcttttatgacgtccgttagcccgtgtataatggcgacatcaagaagtcccaaacatgataaatccgcatcctgtccagctggaatgctatgaattgaggctctgtggtctagtaaaagctcaatgaaagaagttccgtcgtgaaaggcagctatggccgccagtggttttccttcaaaacaatcatttggatctgccccgttctccaacaaaatcttggcagtatcgacatcatctgccatacaagcttcataaagcatgctaggtccgctttcatcccgaaagtttaccgagaccccttccttaaacaacatttcagtgcattttgaggctccagcctggacagcctgtcgaaggccgccaccggatcgaatatgttgagcatcgtccggaaaacgagttaggagataacgtagtccgtcagggatatcctcgtctagatacgagcgtataagattcaccaactgcgattcgtttggtctagcgaagccatgttcaagcagaagatcagaagcctcatagtttgttcccatcaaacagccgaagacgaggtcgggttctactttcgccaattcaacagccctgtcgtgcatgagcaaaagagctactacgtcaaacttgtcctcgtgttttgagtataccgagcagactaattgtaagggcttccatatgtcgacatcgtcagtagtatgtgactcgttgacattagtgtccgcggctctgtcactggcagctgctgatggagattccgccattgctccgagcaaggccttaaaagtaccgagaacagatcctttcggcgttcccgtctgacatgatgaaagttccgcggccgccagtagtggggagatgccttgggaattacgaacccggacatttgcgcctgcacccagtagagatgtaaccacttcagttctgtggaatctggccgcttctacgagtgcgaaagacccatccatggcttgtaggtttacgtccattccgcatttgatcagccggttcacaagctctattcgtaaacttctttgttcgaacgaacgatgggaagggatggacggagctcccgcggccgctacgaggtggggataagtatcatccatgtcggcgtccaattcgaaagcggcgccgaggtcaagaagcctaagggcctcggcaaaataacccaagaagcaggcatgaccaagaggagtgagagtgccaagtctcatattgatatcggcaccgtgttctagcaggaaatcaatcatcgcccaactgcccaggaaaaatgcataatccaacggcgagcgtccgtcatgatcctttacggtgacatccgcttggtagcctccgtcgactatggcccgcgcggcgtccagcagatcagctgcacatgcagaatggagagcagtgaaccgttgctcttcatagggcccagtattcgacgtggtgacgttggtggaagcgccacgtgataacagcagttttgctgcggacgcatgaccaaaacagatagaggtatggagaggcctccatagaggagcaaagttgcggtgcggagcaatggcacattcgcaaaaaagcctggatggagcgttgatgtcggctccattactcaacaacaagtcgaggagctcgaggttgcccctggcagcggcgatatgaagcggggtccagaagcatctctctggaaaggtcttgacggtgcggtaggggtccccgtaataatctattgcgtttccttccagcttcagacctagtttggcaattccatatacttcgtatatgtttacggtatggaagtctggctcaaagctgtacagcgtagctgcagagacagggccgtatagtgtcgtctgccgtgccaagagctccttacggcacatagagcgaaatctctgtcggtctccgtgaagaatttcacggcggtcaaagatgccgtgtccttcgtctggttggaggtctgctggttgtcgaagatgtggtgggaactcttcctctggcacaggaagcggcgggcgccagagctttgtctgtgaacaggcgtgaagcatccaggctcttggtttacttcccgagaaggcagtatttggattggcacccgcgtttaacaatcggcggacagtgccgatacgatcttcgtcgcaagcccaacataggacatcgggatcgtctttgacatcgaggtagagaatcggagcaacggcggcatgaaaagcacgacacgacctgctccatgatgacaagtcggcagtgtctagggacttagatatgatgtggaggagctctataggtagatggaatgcgggagacatggcgagtattgtcgggctgtgaatcactcagatggtgctaaaagagttatgggggtatgtcccgcggtcaacatagaagctttctgtccgtaacatattattctgtggataagtagagataattgtaaagtgattgcagtgtagattacgagacgcgtcgtgagacaacacgcgacgtgccgaacgacgttacattttaagattagttgattggcacagaccctaacgctgtgtcaacgtctacctacattaggtactttacgtggagaacggatgggctagtacggattacactgtgttcggtctcccccacctaacaattgaaaattagccttatgctatcaaattacttgcctcaattgtttgaagcgattgactaagtatgctggcgagttttattgccttagcagtggagcagtgacagggcgcccagaaataagtgagaggtagatgttcactagataggggtcccaaatatgacgtcaaccacaaattatctggtacgt

SEQ ID NO: 34203 - DNA, 3576 bp, Muscodor strobelii
  misc_feature: SGI cDNA ID NO. 571817
  misc_feature: Encodes the peptide sequence at SEQ ID NO 34204
atgtctcccgcattccatctacctatagagctcctccacatcatatctaagtccctagacactgccgacttgtcatcatggagcaggtcgtgtcgtgcttttcatgccgccgttgctccgattctctacctcgatgtcaaagacgatcccgatgtcctatgttgggcttgcgacgaagatcgtatcggcactgtccgccgattgttaaacgcgggtgccaatccaaatactgccttctcgggaagtaaaccaagagcctggatgcttcacgcctgttcacagacaaagctctggcgcccgccgcttcctgtgccagaggaagagttcccaccacatcttcgacaaccagcagacctccaaccagacgaaggacacggcatctttgaccgccgtgaaattcttcacggagaccgacagagatttcgctctatgtgccgtaaggagctcttggcacggcagacgacactatacggccctgtctctgcagctacgctgtacagctttgagccagacttccataccgtaaacatatacgaagtatatggaattgccaaactaggtctgaagctggaaggaaacgcaatagattattacggggacccctaccgcaccgtcaagacctttccagagagatgcttctggaccccgcttcatatcgccgctgccaggggcaacctcgagctcctcgacttgttgttgagtaatggagccgacatcaacgctccatccaggcttttttgcgaatgtgccattgctccgcaccgcaactttgctcctctatggaggcctctccatacctctatctgttttggtcatgcgtccgcagcaaaactgctgttatcacgtggcgcttccaccaacgtcaccacgtcgaatactgggccctatgaagagcaacggttcactgctctccattctgcatgtgcagctgatctgctggacgccgcgcgggccatagtcgacggaggctaccaagcggatgtcaccgtaaaggatcatgacggacgctcgccgttggattatgcatttttcctgggcagttgggcgatgattgatttcctgctagaacacggtgccgatatcaatatgagacttggcactctcactcctcttggtcatgcctgcttcttgggttattttgccgaggcccttaggcttcttgacctcggcgccgctttcgaattggacgccgacatggatgatacttatccccacctcgtagcggccgcgggagctccgtccatcccttcccatcgttcgttcgaacaaagaagtttacgaatagagcttgtgaaccggctgatcaaatgcggaatggacgtaaacctacaagccatggatgggtctttcgcactcgtagaagcggccagattccacagaactgaagtggttacatctctactgggtgcaggcgcaaatgtccgggttcgtaattcccaaggcatctccccactactggcggccgcggaactttcatcatgtcagacgggaacgccgaaaggatctgttctcggtacttttaaggccttgctcggagcaatggcggaatctccatcagcagctgccagtgacagagccgcggacactaatgtcaacgagtcacatactactgacgatgtcgacatatggaagcccttacaattagtctgctcggtatactcaaaacacgaggacaagtttgacgtagtagctcttttgctcatgcacgacagggctgttgaattggcgaaagtagaacccgacctcgtcttcggctgtttgatgggaacaaactatgaggcttctgatcttctgcttgaacatggcttcgctagaccaaacgaatcgcagttggtgaatcttatacgctcgtatctagacgaggatatccctgacggactacgttatctcctaactcgttttccggacgatgctcaacatattcgatccggtggcggccttcgacaggctgtccaggctggagcctcaaaatgcactgaaatgttgtttaaggaaggggtctcggtaaactttcgggatgaaagcggacctagcatgctttatgaagcttgtatggcagatgatgtcgatactgccaagattttgttggagaacggggcagatccaaatgattgttttgaaggaaaaccactggcggccatagctgcctttcacgacggaacttctttcattgagcttttactagaccacagagcctcaattcatagcattccagctggacaggatgcggatttatcatgtttgggacttcttgatgtcgccattatacacgggctaacggacgtcataaaagcgataattttccacgataaatactgtgctcccaacgaggaagagactactggacattggtctttttttgtaaagtcctcagcattgcaacgtactatcgtactcgatcgcatgtttgacttactcattggtctcgaagggttttctcctaatgagatactgaccatcaagaacgacaagggcaaaacaacaaccgcaaccccgctgcatttagctgcgttcactggtatctccgcgagcacgaccaagttcatcgaggcgttgacattcaactatgccgatatccataaacgtctggttgtggattccagcgactctgcgattgctatctctgacttcgatcccgaaggcggccccccattccaaggcacgactccgttgggctggtcaattgaacactcctcaaaatctgtagttcgagcaatgatcggagatggcgcaatttttgacccatatattgttaatcagatgccgaattcgcatgaaacgaggctgggattgatgctagaatatgcacaagccgcgtgtcgccgccagaaagccacaatgttgtctctactcttcaagaagggcattggaccggctattcgtgacgacgatggaaacaccatgatacacatgatatgcgaccacgtggaaacattgaagcccagtgacgatccagacgatcctgggtcgtcggtcgaatctattgcaatgcgatctgccctctccatcatagtatgtctaaaatggaatgtttcgtatgagaagaagaacaacaagggcgtttccggtcttgatcgtgtactccagtcgctctactactccggggattgcgcattacgtcaaaaacgtgctgaagtatggcaggatcttcttgcacatttcatcaaggactcgaccccggtattgagagggaaaatcactgcgccagacgactctgatgatgagagcgagctggatgagatggaaactgatgatgacttcggcgggccggatttctttgatgaagaagaagatcaagaacaagagctcgaggatgaattagaggatggatcagtgggtggatcagaggatgaattagaggatggattagaggatggattagaggatggatcagaggatggatcagaggatggatcagaattctatcaagagtataattttgatcatggactcgaggattattttggagacgaagctgaagaagacgaggatatcattgcatatcatcagatccgttcacttaatcacggatcgatagatttctcggttgatgtgtccgccctcgacgaatactga

SEQ ID NO: 34204 - protein, 1191 aa, Muscodor strobelii
  misc_feature: SGI Peptide ID NO. 571817
  misc_feature (212)..(244): Pfam Id: PF00023 Pfam Desc: Ankyrin repeat
  misc_feature (334)..(366): Pfam Id: PF00023 Pfam Desc: Ankyrin repeat
  misc_feature (263)..(291): Pfam Id: PF00023 Pfam Desc: Ankyrin repeat
  misc_feature (447)..(479): Pfam Id: PF00023 Pfam Desc: Ankyrin repeat
  misc_feature (212)..(710): NCBI GI: 46123501 Blast Desc: FG06128.1 [Gibberella zeae PH-1]
  misc_feature (212)..(710): NCBI GI: 256731441 Blast Desc: NECHADRAFT_48607 [Nectria haematococca mpVI 77-13-4]
  misc_feature (201)..(516): NCBI GI: 171688040 Blast Desc: protein product [Podospora anserina] gi|170943982|emb|CAP70092.1| protein product [Podospora anserina]
  misc_feature (7)..(490): NCBI GI: 85091880 Blast Desc: NCU04861 [Neurospora crassa OR74A] gi|28920518|gb|EAA29882.1| [Neurospora crassa OR74A]
  misc_feature (215)..(735): NCBI GI: 189502738 Blast Desc: Aasi_1435 [Candidatus Amoebophilus asiaticus 5a2] gi|189498179|gb|ACE06726.1| Aasi_1435 [Candidatus Amoebophilus asiaticus 5a2]
  misc_feature (215)..(975): NCBI GI: 119720190 Blast Desc: ankyrin [Thermofilum pendens Hrk 5] gi|119525310|gb|ABL78682.1| Ankyrin [Thermofilum pendens Hrk 5]
  misc_feature (215)..(735): NCBI GI: 189502738 Blast Desc: Aasi_1435 [Candidatus Amoebophilus asiaticus 5a2] gi|189498179|gb|ACE06726.1| Aasi_1435 [Candidatus Amoebophilus asiaticus 5a2]
  misc_feature (215)..(740): NCBI GI: 123437955 Blast Desc: ankyrin repeat protein [Trichomonas vaginalis G3] gi|121891508|gb|EAX96837.1| ankyrin repeat protein, [Trichomonas vaginalis G3]
  misc_feature (210)..(736): NCBI GI: 123437955 Blast Desc: ankyrin repeat protein [Trichomonas vaginalis G3] gi|121891508|gb|EAX96837.1| ankyrin repeat protein, [Trichomonas vaginalis G3]
  misc_feature (209)..(999): NCBI GI: 123507472 Blast Desc: ankyrin repeat protein [Trichomonas vaginalis G3] gi|121912377|gb|EAY17199.1| ankyrin repeat protein, [Trichomonas vaginalis G3]
MSPAFHLPIELLHIISKSLDTADLSSWSRSCRAFHAAVAPILYLDVKDDPDVLCWACDEDRIGTVRRLLNAGANPNTAFSGSKPRAWMLHACSQTKLWRPPLPVPEEEFPPHLRQPADLQPDEGHGIFDRREILHGDRQRFRSMCRKELLARQTTLYGPVSAATLYSFEPDFHTVNIYEVYGIAKLGLKLEGNAIDYYGDPYRTVKTFPERCFWTPLHIAAARGNLELLDLLLSNGADINAPSRLFCECAIAPHRNFAPLWRPLHTSICFGHASAAKLLLSRGASTNVTTSNTGPYEEQRFTALHSACAADLLDAARAIVDGGYQADVTVKDHDGRSPLDYAFFLGSWAMIDFLLEHGADINMRLGTLTPLGHACFLGYFAEALRLLDLGAAFELDADMDDTYPHLVAAAGAPSIPSHRSFEQRSLRIELVNRLIKCGMDVNLQAMDGSFALVEAARFHRTEVVTSLLGAGANVRVRNSQGISPLLAAAELSSCQTGTPKGSVLGTFKALLGAMAESPSAAASDRAADTNVNESHTTDDVDIWKPLQLVCSVYSKHEDKFDVVALLLMHDRAVELAKVEPDLVFGCLMGTNYEASDLLLEHGFARPNESQLVNLIRSYLDEDIPDGLRYLLTRFPDDAQHIRSGGGLRQAVQAGASKCTEMLFKEGVSVNFRDESGPSMLYEACMADDVDTAKILLENGADPNDCFEGKPLAAIAAFHDGTSFIELLLDHRASIHSIPAGQDADLSCLGLLDVAIIHGLTDVIKAIIFHDKYCAPNEEETTGHWSFFVKSSALQRTIVLDRMFDLLIGLEGFSPNEILTIKNDKGKTTTATPLHLAAFTGISASTTKFIEALTFNYADIHKRLVVDSSDSAIAISDFDPEGGPPFQGTTPLGWSIEHSSKSVVRAMIGDGAIFDPYIVNQMPNSHETRLGLMLEYAQAACRRQKATMLSLLFKKGIGPAIRDDDGNTMIHMICDHVETLKPSDDPDDPGSSVESIAMRSALSIIVCLKWNVSYEKKNNKGVSGLDRVLQSLYYSGDCALRQKRAEVWQDLLAHFIKDSTPVLRGKITAPDDSDDESELDEMETDDDFGGPDFFDEEEDQEQELEDELEDGSVGGSEDELEDGLEDGLEDGSEDGSEDGSEFYQEYNFDHGLEDYFGDEAEEDEDIIAYHQIRSLNHGSIDFSVDVSALDEY

SEQ ID NO: 34205 - DNA, 1491 bp, Muscodor strobelii
  misc_feature: SGI cDNA ID NO. 571818
  misc_feature: Encodes the peptide sequence at SEQ ID NO 34206
atgctgacagtactacaactcacgtttgtacttgcaaacctcatctctcttgtactctcccaggctcgaaatcctgccatttacaaccctcctggacgaaacttcactcagaaactcgaacacagcggcagaagcggttgcaatgaaaccttcccccagttctatcaactagatacatctcacttcaaacccggtggaccaatactgctcgttcagggtgatgagacaactttaacgcctcttgcaggccatgtattttacgacattgcacaagaggttggcggtattgctgcgacgctcgagcacagattctttggtaccagcttcccgaatgggttcgattatgccaatgtcacaaccgagcagtataagtcattcctgacccttgacaatgtcatgaaagatggcgtggcgtttgtgaactggatcaagagaacagtccctggggctgaaaacagccctgtatttcattcgggcggttcttatggtgggttcttggcgatacaagctcgagctcgtgagcctgaaacattcgttggagctatcgcgcactcgcccggcggtcgctctttaggtgccagcagaaattttgccgaaaatgatctgaagtttgctgctatggatgttgtggccaatgtcttttatgatgcaagttatgaggcgtcaaagaaaatcaaatcggcattcatagcgttgcagtcttgcataaaccaatcaaattgtgagacgacaatgccagatttcaatctttgtgaccaaccgtcgagtccatccgaatgggttgaccttttgcacaagcttatcgacctatacaaatatgtcgctcagtacaatttcggaactgctgccctctatcccatgcccaacccattggaacacctcatcaacctaacactggccgcagagacctcgtcagacgtcttacgagccccgatcctcttcgcgaacaatgcaagcggcacaagcaccgagtgtgctgactggaagcaagcagtaactcctggaagcagcgctggagctgcctgggcgtacattagctgcagctggctcatgagcgaccaaaacagcatatccataaaccatacgctccttccgccccgtaacgtcgatgcatttggagctgattgcgacttaagtctacaccaggactggattgacgacttttactataacaagacaagccaagaactacgcgagttctatcatacgtccgacgaagccttagacctccttgagaatctgctcataatccatggaagttacgatcccgtcatgggaccctacaattatgaaccggcattcagcgcggatcggagtcattctcgtctcattgaagtgcgtggtcttgcacatacggacatgggctactccaaactcgtttatcctgatagtgtcagacccacggtgattgctgatatccgacgtacccaagttgagtacataaaaggctggactgcggcgtattacggtgtcaggaattctaagtcgtga

SEQ ID NO: 34206 - protein, 496 aa, Muscodor strobelii
  misc_feature: SGI Peptide ID NO. 571818
  misc_feature (37)..(455): Pfam Id: PF05577 Pfam Desc: Serine carboxypeptidase S28
  misc_feature (87)..(183): Pfam Id: PF05577 Pfam Desc: Serine carboxypeptidase S28
  misc_feature (35)..(484): NCBI GI: 47209068 Blast Desc: protein product [Tetraodon nigroviridis]
  misc_feature (33)..(489): NCBI GI: 84000301 Blast Desc: prolylcarboxypeptidase precursor [Bos taurus] gi|122137021|sp|Q2TA14.1|PCP_BOVIN RecName: Full=Lysosomal Pro-X carboxypeptidase; AltName: Full=Prolylcarboxypeptidase; AltName:
  misc_feature (35)..(486): NCBI GI: 118404640 Blast Desc: prolylcarboxypeptidase [Xenopus (Silurana) tropicalis] gi|115313632|gb|AAI23913.1| prolylcarboxypeptidase (angiotensinase C) [Xenopus (Silurana) tropicalis]
  misc_feature (35)..(496): NCBI GI: 166064014 Blast Desc: prolylcarboxypeptidase [Rattus norvegicus]
  misc_feature (37)..(484): NCBI GI: 50540452 Blast Desc: prolylcarboxypeptidase [Danio rerio] gi|49903247|gb|AAH76507.1| Prolylcarboxypeptidase (angiotensinase C) [Danio rerio]
  misc_feature (38)..(376): NCBI GI: 149633176 Blast Desc: [Ornithorhynchus anatinus]
  misc_feature (35)..(489): NCBI GI: 114639543 Blast Desc: isoform 1 [Pan troglodytes]
  misc_feature (33)..(376): NCBI GI: 224043680 Blast Desc: : similar to prolylcarboxypeptidase [Taeniopygia guttata]
  misc_feature (10)..(484): NCBI GI: 226472758 Blast Desc: Lysosomal Pro-X carboxypeptidase precursor [Schistosoma japonicum]
  misc_feature (37)..(495): NCBI GI: 194213387 Blast Desc: : prolylcarboxypeptidase (angiotensinase C) [Equus caballus]
  misc_feature (33)..(489): SWISSPROT Homolog: EC 3.4.16.2 Lysosomal Pro-Xaa carboxypeptidase
MLTVLQLTFVLANLISLVLSQARNPAIYNPPGRNFTQKLEHSGRSGCNETFPQFYQLDTSHFKPGGPILLVQGDETTLTPLAGHVFYDIAQEVGGIAATLEHRFFGTSFPNGFDYANVTTEQYKSFLTLDNVMKDGVAFVNWIKRTVPGAENSPVFHSGGSYGGFLAIQARAREPETFVGAIAHSPGGRSLGASRNFAENDLKFAAMDVVANVFYDASYEASKKIKSAFIALQSCINQSNCETTMPDFNLCDQPSSPSEWVDLLHKLIDLYKYVAQYNFGTAALYPMPNPLEHLINLTLAAETSSDVLRAPILFANNASGTSTECADWKQAVTPGSSAGAAWAYISCSWLMSDQNSISINHTLLPPRNVDAFGADCDLSLHQDWIDDFYYNKTSQELREFYHTSDEALDLLENLLIIHGSYDPVMGPYNYEPAFSADRSHSRLIEVRGLAHTDMGYSKLVYPDSVRPTVIADIRRTQVEYIKGWTAAYYGVRNSKS

SEQ ID NO: 34207 - DNA, 459 bp, Muscodor strobelii
  misc_feature: SGI EST ID NO. CUFF.81047.0
  misc_feature: Variant of the nucleotide sequence at SEQ ID NO 34205
cgctccttccgccccgtaacgtcgatgcatttggagctgattgcgacttaagtctacaccaggactggattgacgacttttactataacaagacaagccaagaactacgcgagttctatcatacgtccgacgaagccttagacctccttgagaatctgctcataatccatggaagttacgatcccgtcatgggaccctacaattatgaaccggcattcagcgcggatcggagtcattctcgtctcattgaagtgcgtggtcttgcacatacggacatgggctactccaaactcgtttatcctgatagtgtcagacccacggtgattgctgatatccgacgtacccaagttgagtacataaaaggctggactgcggcgtattacggtgtcaggaattctaagtcgtgattgtaggctattcccagcggactggttgaagtatcgttatgataggaacgag

SEQ ID NO: 34208 - DNA, 1479 bp, Muscodor strobelii
  misc_feature: SGI cDNA ID NO. 571819
  misc_feature: Encodes the peptide sequence at SEQ ID NO 34209
atgaacgagaacaagagctcttcaagcacagtcgcctcagccgccaatgaggctagcgactctcatcgtacctccaagctatcaccatggctatccaaactgtcgacatggggcgtagaagttcggggtatcaccccagttcctctcgaagaaagaaatgacaaacgcttcatcaacgtcttcttcgtttggtttgcaatgaacgtcaacctcttgcctatcatcacgggaattctagggacattcattttcggcatgagcttgagagactgttcgctcaccatcctgttcgtaatgctcgtgctcacggttccccccgcgtacttctgtaccttcggatcgaggactggattgcgtcaaatgattcagtcgagatacactttcggttactacccgatagcaatcatcgtactgctaaatctcgcaactcttggtggcttcggcatcattggtatggtactgggcggttcgactctttctgcggtttcagacggcaatatcgacagcactgccggaatcgtgatcatcggacttatagggctgattgtgtcttttggtggctacaagttccttcaccaatatgaacgttactcttggatatttgctctgattgctatcattattactacgggagttggtggcaagcagctcttcaagcaatcagaagtagcgtcagcatcgcccgcaattatcgtcagcttcgctggtgtcatcgccggttatatgattccatgggctgcgttgtcttcagatatctctgtttactgtaacccttcggtttcgacctggcgcatatttgcctatagctacggcggccttttcatccctactactctactcatgattctcggcgcagcaattggaggagcaattccgagcgttcccacctggtccgaggggtacgagaactatagtgtgggtggtgttctggaagccatgcttcagccagccggtggctttggcaaattcatcgcggtcttactggcactttcgatcatcggaaatctagctgcaactacatactctatcacgctgaattttcagctcctcattcccttctttgtccgcatcccacgagctatattcgcaatcgtctatgctgcagtgggcatccctgtcgcctccgttgctgctcagtcattcttcgccagcctggagaacttcatctacctgatcgcgtactggtccggcgcgtacgtaggtgttgtgtccgtcgagcacttcttattccgcaagggaaacatggcaacgtatgtctcagaccaatgggaccaaccaagcaagctgcccacaggtatctcagcaatcttggcggccggcttatctttcgctctggctgtgccggctgcatcccagatttggtacactgggcctattggaatcacgaccggtgacctcggatttgaagtcgctttcgttctgtcgtcgatgttatatatgcctatccgatggcttgagcttaagtggcgaccgatataa

SEQ ID NO: 34209 - protein, 492 aa, Muscodor strobelii
  misc_feature: SGI Peptide ID NO. 571819
  misc_feature (46)..(460): Pfam Id: PF02133 Pfam Desc: Permease for cytosine/purines, uracil, thiamine, allantoin
  misc_feature (46)..(149): Pfam Id: PF02133 Pfam Desc: Permease for cytosine/purines, uracil, thiamine, allantoin
  misc_feature (231)..(413): Pfam Id: PF02133 Pfam Desc: Permease for cytosine/purines, uracil, thiamine, allantoin
  misc_feature (19)..(478): NCBI GI: 259480376 Blast Desc: TPA: conserved [Aspergillus nidulans FGSC A4]
  misc_feature (19)..(478): NCBI GI: 67541226 Blast Desc: AN6783.2 [Aspergillus nidulans FGSC A4] gi|40739411|gb|EAA58601.1| AN6783.2 [Aspergillus nidulans FGSC A4]
  misc_feature (33)..(490): NCBI GI: 119190117 Blast Desc: CIMG_05106 [Coccidioides immitis RS]
  misc_feature (33)..(490): NCBI GI: 258565477 Blast Desc: conserved [Uncinocarpus reesii 1704] gi|237907184|gb|EEP81585.1| conserved [Uncinocarpus reesii 1704]
  misc_feature (17)..(490): NCBI GI: 240110968 Blast Desc: CPC735_068030 [Coccidioides posadasii C735 delta SOWgp]
  misc_feature (11)..(490): NCBI GI: 238841863 Blast Desc: purine-cytosine permease FCY22 [Microsporum canis CBS 113480]
  misc_feature (2)..(488): NCBI GI: 226279652 Blast Desc: purine-cytosine permease FCY22 [Paracoccidioides brasiliensis Pb01]
  misc_feature (5)..(488): NCBI GI: 261361296 Blast Desc: purine-cytosine permease FCY21 [Verticillium albo-atrum VaMs.102]
  misc_feature (15)..(488): NCBI GI: 169605147 Blast Desc: SNOG_05591 [Phaeosphaeria nodorum SN15] gi|111065535|gb|EAT86655.1| SNOG_05591 [Phaeosphaeria nodorum SN15]
  misc_feature (39)..(488): NCBI GI: 85101464 Blast Desc: NCU04195 [Neurospora crassa OR74A] gi|21622347|emb|CAD37047.1| related to purine-cytosine permease [Neurospora crassa] gi|28922695|gb|EAA31919.1| conserved crassa
MNENKSSSSTVASAANEASDSHRTSKLSPWLSKLSTWGVEVRGITPVPLEERNDKRFINVFFVWFAMNVNLLPIITGILGTFIFGMSLRDCSLTILFVMLVLTVPPAYFCTFGSRTGLRQMIQSRYTFGYYPIAIIVLLNLATLGGFGIIGMVLGGSTLSAVSDGNIDSTAGIVIIGLIGLIVSFGGYKFLHQYERYSWIFALIAIIITTGVGGKQLFKQSEVASASPAIIVSFAGVIAGYMIPWAALSSDISVYCNPSVSTWRIFAYSYGGLFIPTTLLMILGAAIGGAIPSVPTWSEGYENYSVGGVLEAMLQPAGGFGKFIAVLLALSIIGNLAATTYSITLNFQLLIPFFVRIPRAIFAIVYAAVGIPVASVAAQSFFASLENFIYLIAYWSGAYVGVVSVEHFLFRKGNMATYVSDQWDQPSKLPTGISAILAAGLSFALAVPAASQIWYTGPIGITTGDLGFEVAFVLSSMLYMPIRWLELKWRPI

SEQ ID NO: 34210 - DNA, 3025 bp, Muscodor strobelii
  misc_feature: SGI EST ID NO. CUFF.81075.1
  misc_feature: Variant of the nucleotide sequence at SEQ ID NO 34208
ataaacttgtgtacttacctcctaacaatagttcaggcgtaaacggaatgaaaatcctcattgctagctttgatactgacttattaagatggaagatcatggcgaggctagcgggaaatcttttcggctcgtcgacaattctcctgcttcgcaagggcttcgcagattggcggttcgtaagacttacattcgcgacatcatcggttgagggcttggcagtacgtgacatagtggacattggcaactgttgatctatgacgtgccatagtggtgctgacttcatgtcgagctcatgctgtccatataacatggggcattttcaaatcaatacctacgcattttacctacattatcgtagaaagcgaggaaggaggttctaatttgtcctgaattctgtgaccgcgttgagaggcagctgatggggtgaacatgaatttggcgcaaccccgcagtctaatttttcaagcctaagatctctgccagtgtctctgccacagtatttagcgcgttcaacttttccggactcaactgagtacgcaaggcaagcatatatctatgtttagttgttggagtgctagacagtactccaaactaagcgcgcttatctagattcgtcggtttgatgagaaatatgcggtacctgttcaacgacttcacgccggcggcgagtcctcctggcggggcaattcgcctcttatcacgccgaccaacctctagctcacttcgcgttccacagctatcagcgttatgatgtatcgatatcagtcatgatttctcatcatattatcctcctatcatgtgtaggctattacaatcgtctctcctgtagatgatattcccggcgaaacctgatacatttgaactctgtgtctagcttttcttacctctgacaagccggacgcggtctagccgagtccaagattggtatgccaaggacgcagcttattgagaaactgaagattcaaagattgaatcgtcgcgtagctaatacaatggaatattaatgtagatatatacgctagatgctgacgattcgtcgaagtcaagggttgagccatcactactatccgaactcttatcacaactctggcaatacgaaagggtatcgacattacgtgcagggtgatttaccctctaatgacacaacggcgatgaacgagaacaagagctcttcaagcacagtcgcctcagccgccaatgaggctagcgactctcatcgtacctccaagctatcaccatggctatccaaactgtcgacatggggcgtagaagttcggggtatcaccccagttcctctcgaagaaagaaatgacaaacgcttcatcaacgtcttcttcgtttggtttgcaatgaacgtcaacctcttgcctatcatcacgggaattctagggacattcattttcggcatgagcttgagagactgttcgctcaccatcctgttcgtaatgctcgtgctcacggttccccccgcgtacttctgtaccttcggatcgaggactggattgcgtcaaatgattcagtcgagatacactttcggttactacccgatagcaatcatcgtactgctaaatctcgcaactcttggtggcttcggcatcattggtatggtactgggcggttcgactctttctgcggtttcagacggcaatatcgacagcactgccggaatcgtgatcatcggacttatagggctgattgtgtcttttggtggctacaagttccttcaccaatatgaacgttactcttggatatttgctctgattgctatcattattactacgggagttggtggcaagcagctcttcaagcaatcagaagtagcgtcagcatcgcccgcaattatcgtcagcttcgctggtgtcatcgccggttatatgattccatgggctgcgttgtcttcagatatctctgtttactgtaacccttcggtttcgacctggcgcatatttgcctatagctacggcggccttttcatccctactactctactcatgattctcggcgcagcaattggaggagcaattccgagcgttcccacctggtccgaggggtacgagaactatagtgtgggtggtgttctggaagccatgcttcagccagccggtggctttggcaaattcatcgcggtcttactggcactttcgatcatcggaaatctagctgcaactacatactctatcacgctgaattttcagctcctcattcccttctttgtccgcatcccacgagctatattcgcaatcgtctatgctgcagtgggcatccctgtcgcctccgttgctgctcagtcattcttcgccagcctggagaacttcatctacctgatcgcgtactggtccggcgcgtacgtaggtgttgtgtccgtcgagcacttcttattccgcaagggaaacatggcaacgtatgtctcagaccaatgggaccaaccaagcaagctgcccacaggtatctcagcaatcttggcggccggcttatctttcgctctggctgtgccggctgcatcccagatttggtacactgggcctattggaatcacgaccggtgacctcggatttgaagtcgctttcgttctgtcgtcgatgttatatatgcctatccgatggcttgagcttaagtggcgaccgatataaagcagcaatgtttatagggtgcggcggcaattcttatgcatcttagatcataatagtacaatcatgtctacatctactgcttttgaaatcatgaagaggtcgatgttgaagtgtctaagccgtaggagaagggccttaaaccaatttcgcattccggccgcggcgttcacgcgatttgaatatgagagcatggagtgaagctgcaaaaagcgcttcttatgcagtcgactaattgaaattttccatgcgatgcgcaaatgcatcgtaatcataactgatacaaatggttatatgtcagagagttctgggtaaatatagcatataccctgtacctcgatctctgcaatgtaaccctgcgaatctatatcgctgtctcacatagagtgaaaatccgc

SEQ ID NO: 34211 - DNA, 597 bp, Muscodor strobelii
  misc_feature: SGI cDNA ID NO. 571820
  misc_feature: Encodes the peptide sequence at SEQ ID NO 34212
atggcagttcaggggcgatcgtcggcttcatacgccgcatctgggttcagcaaccgtataggatggggggagagaccgtcggcgcctgatgtcatgcgagaacttctcgctgcagcgcgcaagggtggcgtgcctgtcatctggagccaggttaaatatacgcagccagaaatggcagatgcaggtcttttctggcataaagcaaaagccctaaatgtctggcacaaagacgacaccaggggcttagacgcggacttggaaggtcttagccctgcagaggatgacacggtcgtggtgaagaaatacgcgagtgccttcttcggtacttctctgactactgagctaaatatcatgaacattgatactctggttatctgcggcgtgagcacctctggatgcgtgcgtgctaccactctagacgcaatgcaaaacggtttccgtccgatggtggttggcacagcttgtggcgacagaactccagagattcaacaagcgaatctatttgaccttgactctaagtacgccgatgttgtgacccaagaagaggcattagaagaactgtcaaagggctggcagttatcgaagcgggatttttga

SEQ ID NO: 34212 - protein, 198 aa, Muscodor strobelii
  misc_feature: SGI Peptide ID NO. 571820
  misc_feature (7)..(185): Pfam Id: PF00857 Pfam Desc: Isochorismatase family
  misc_feature (33)..(185): Pfam Id: PF00857 Pfam Desc: Isochorismatase family
  misc_feature (13)..(192): NCBI GI: 212539261 Blast Desc: N-carbamoylsarcosine amidase, [Penicillium marneffei ATCC 18224] gi|210069528|gb|EEA23619.1| N-carbamoylsarcosine amidase, [Penicillium marneffei ATCC 18224]
  misc_feature (13)..(192): NCBI GI: 242760487 Blast Desc: pyrazinamidase/nicotinamidase, [Talaromyces stipitatus ATCC 10500] gi|218723197|gb|EED22614.1| pyrazinamidase/nicotinamidase, [Talaromyces stipitatus ATCC
  misc_feature (15)..(192): NCBI GI: 189210635 Blast Desc: N-carbamoylsarcosine amidase [Pyrenophora tritici-repentis Pt-1C-BFP] gi|187977742|gb|EDU44368.1| N-carbamoylsarcosine amidase [Pyrenophora tritici-repentis
  misc_feature (38)..(189): NCBI GI: 87198199 Blast Desc: isochorismatase hydrolase [Novosphingobium aromaticivorans DSM 12444] gi|87133880|gb|ABD24622.1| isochorismatase hydrolase [Novosphingobium aromaticivorans DSM
  misc_feature (10)..(190): NCBI GI: 262202756 Blast Desc: isochorismatase hydrolase [Gordonia bronchialis DSM 43247] gi|262086103|gb|ACY22071.1| isochorismatase hydrolase [Gordonia bronchialis DSM 43247]
  misc_feature (18)..(189): NCBI GI: 241258669 Blast Desc: N-carbamoylsarcosine amidase [Rhizobium leguminosarum bv. trifolii WSM1325] gi|240863139|gb|ACS60802.1| N-carbamoylsarcosine amidase [Rhizobium leguminosarum bv.
  misc_feature (10)..(150): NCBI GI: 169618936 Blast Desc: SNOG_12660 [Phaeosphaeria nodorum SN15] gi|160703710|gb|EAT79958.2| SNOG_12660 [Phaeosphaeria nodorum SN15]
  misc_feature (32)..(188): NCBI GI: 254284427 Blast Desc: N-carbamoylsarcosine amidase [gamma proteobacterium NOR51-B] gi|219680630|gb|EED36979.1| N-carbamoylsarcosine amidase [gamma proteobacterium NOR51-B]
  misc_feature (6)..(196): NCBI GI: 258634185 Blast Desc: isochorismatase hydrolase [Pantoea sp. At-9b] gi|258536538|gb|EEW04887.1| isochorismatase hydrolase [Pantoea sp. At-9b]
  misc_feature (11)..(189): NCBI GI: 219849950 Blast Desc: N-carbamoylsarcosine amidase [Chloroflexus aggregans DSM 9485] gi|219544209|gb|ACL25947.1| N-carbamoylsarcosine amidase [Chloroflexus aggregans DSM 9485]
  misc_feature (11)..(187): SWISSPROT Homolog: EC 3.5.1.59 N-carbamoylsarcosine amidase
MAVQGRSSASYAASGFSNRIGWGERPSAPDVMRELLAAARKGGVPVIWSQVKYTQPEMADAGLFWHKAKALNVWHKDDTRGLDADLEGLSPAEDDTVVVKKYASAFFGTSLTTELNIMNIDTLVICGVSTSGCVRATTLDAMQNGFRPMVVGTACGDRTPEIQQANLFDLDSKYADVVTQEEALEELSKGWQLSKRDF

SEQ ID NO: 34213 - DNA, 1859 bp, Muscodor strobelii
  misc_feature: SGI EST ID NO. CUFF.81056.0
  misc_feature: Variant of the nucleotide sequence at SEQ ID NO 34211
ccgcggttctttgctgggcccgccgaccggcaccccgcgatccggccttaatcgacaaatgtaccgccctcaaaccaggtcctttacgcagttactaatgctgagagcattagaaacttcgggagattatgcgagcggattcggcaagagcagactggtaaggagtgtggtaccggattgttatttgctatcattagccactacagcatcataaattagcatggcagttcaggggcgatcgtcggcttcatacgccgcatctgggttcagcaaccgtataggatggggggagagaccgtcggcgcctgatgtcatgcgagaacttctcgctgcagcgcgcaagggtggcgtgcctgtcatctggagccaggttaaatatacgcagccagaaatggcagatgcaggtcttttctggcataaagcaaaagccctaaatgtctggcacaaagacgacaccaggggcttagacgcggacttggaaggtcttagccctgcagaggatgacacggtcgtggtgaagaaatacgcgagtgccttcttcggtacttctctgactactgagctaaatatcatgaacattgatactctggttatctgcggcgtgagcacctctggatgcgtgcgtgctaccactctagacgcaatgcaaaacggtttccgtccgatggtggttggcacagcttgtggcgacagaactccagagattcaacaagcgaatctatttgaccttgactctaagtacgccgatgttgtgacccaagaagaggcattagaagaactgtcaaagggctggcagttatcgaagcgggatttttgattgagaagcatgacagacatctgttggtggcgagaaagacgccggtcaacacatgtcgaccgcaacgaaccgcggccgagcaaccccttcgactatttcggatacagctatcaaacattcttaggacaagtattcacttccctactcccagagggagttggtaacatggtatcgaacggcgtttcagttcttgacctaccctaggcgaaaatctcaacgatatcacttcgttcgcagacggtatcatcgcttcgtacttagtgtactgttttgaagacgggccatcgaaattctctttctacacggattcatctgccttgaacatctgcgatcgcttcaatgtatcttggtgcaactagatgctcaatgcgcgaaacctaagggctgggttaaggcaacggccaccgaagacactctcctaatactcaacgctacattatgttatgccacatctacacctctgccactcttcccttcgttatcagatgcgttggatcttactcgaacaaagcattgtgttccagagtctcgagccaggaatccaggtatttactgcactcatcggcgacccggcatccgccagtgatataaacccggaactgcgcatttggattctctgcgctgactagggcaacaaatggtaaaataatagagtgtaatttgtgacggcctttcgagctgcgagcgggtgtaccgaagtaagagccactggcaacgcgaggggcaagctattccgtagactctctgagtcgatgtgagactgtatcgtagaaagtagcggaccggatcttgtagagatagcataccccatcagagactattgcgtatgtacatactttgtgaatctatgtgcaactctacaccttgcttatcggacacgccttatagctgttgtctagcagcacgtctcccgtaactaatacatacactgaagcgatgctaattcaaagataataagagaagcttaaacgcggacatgattcgagtgagcgcctcgatcttcttgagcagagtcatcatgctcactgaacacggtgaagcc

SEQ ID NO: 34214 - DNA, 1401 bp, Muscodor strobelii
  misc_feature: SGI cDNA ID NO. 571821
  misc_feature: Elevated expression when VOC is produced
  misc_feature: Encodes the peptide sequence at SEQ ID NO 34215
atggtcaaagtcatagacatcgacgtggatgctgtcctcgcgggcaagtacccggccaagcttcacgccaggcgcgtcgcagactacatccgatcgaagaacccagatgccaaaggcgtgatctttctccaaggaaccgccgatgcgctactcgaggacagcgatgaacccattcccttccgccaacggagacacttcatgtacctaaccggcgtcgacatgcctgactgtgccttcacttacgacatcgataccgacaaatccaccctcttcatccctcccatcgatcccgagcacgtcatgtgggctggtctcccgctgactaccgaagaagctcttgcacaattcgacgtcgaagaggtgcagtacagcaacgagttgaatccccatctcgctcacataggcgctgccaagcctgacaccaccgtcttcgccatcgctgaccgagtctccaccaatgttaccttcctcgagttcggcaacaaggacttcacactcctcgccgaggccattgacgagtgtcgcgtagtcaaagacgactacgagattgctctgatcagaaaagccaacatcattagtggtgccgcccacaaggccgtgctgcaacacgtaagcaccgccgagaacgaacatgagctagaagcagtcttcctcggccaatgcgggcgacacggcgcaaagaagcaggcttaccccagcatcgtcgccagtggtcaggcggcggctacgcttcactatgtacacaatgacaagcagatcaagggcaaggatctcttgcttttggacgccggtgctgaatggaggacatatgcctctgatattacgaggacgttccccatttcgggccacttcagcaagaaatcccgcgccatctacgacatcgtcctcaagatgcaagaggactgtatcgccatgctcaaagacggtgtgctttgggacgatgtccacttgctttcgcacaaagtcttgatcgacggactgctatctctgggtatcttaaagggcgacccgaaggagatcttggattctcggaccagcgccgcatttttaccgcacggcttaggccattacatgggcatggatactcatgatactggtggccaccccaattactccgacgaggacaaacttttccgcttcctcagagtgagacggaacctgcctgccggtagtgtcattaccgttgagcctggtatctatttctgtgaattcatcatccgcccatatttgacagatcctgtttgtgggcagtacattgacaaggctgtgctggatgagtattgggatgtaggtggtgttagaattgaggataatctacttatcacaaaagatggctcgatcaacttgacagatgctatcaaggacccggatgagatggagaggatcattcagggcgcatag

SEQ ID NO: 34215 - protein, 466 aa, Muscodor strobelii
  misc_feature: SGI Peptide ID NO. 571821
  misc_feature (17)..(150): Pfam Id: PF05195 Pfam Desc: Aminopeptidase P, N-terminal domain
  misc_feature (184)..(451): Pfam Id: PF00557 Pfam Desc: metallopeptidase family M24
  misc_feature (17)..(134): Pfam Id: PF05195 Pfam Desc: Aminopeptidase P, N-terminal domain
  misc_feature (7)..(464): NCBI GI: 164425919 Blast Desc: NCU11288 [Neurospora crassa OR74A] gi|157071121|gb|EDO65188.1| NCU11288 [Neurospora crassa OR74A]
  misc_feature (8)..(465): NCBI GI: 256726442 Blast Desc: NECHADRAFT_60613 [Nectria haematococca mpVI 77-13-4]
  misc_feature (7)..(466): NCBI GI: 171679206 Blast Desc: protein product [Podospora anserina] gi|170937675|emb|CAP62332.1| protein product [Podospora anserina]
  misc_feature (9)..(464): NCBI GI: 154300688 Blast Desc: BC1G_10932 [Botryotinia fuckeliana B05.10] gi|150856539|gb|EDN31731.1| BC1G_10932 [Botryotinia fuckeliana B05.10]
  misc_feature (7)..(465): NCBI GI: 156048378 Blast Desc: SS1G_08920 [Sclerotinia sclerotiorum 1980] gi|154693317|gb|EDN93055.1| SS1G_08920 [Sclerotinia sclerotiorum 1980]
  misc_feature (8)..(463): NCBI GI: 261354001 Blast Desc: xaa-Pro dipeptidase [Verticillium albo-atrum VaMs.102]
  misc_feature (8)..(466): NCBI GI: 46124237 Blast Desc: FG06496.1 [Gibberella zeae PH-1]
  misc_feature (8)..(466): NCBI GI: 145609475 Blast Desc: MGG_13438 [Magnaporthe grisea 70-15] gi|145016839|gb|EDK01269.1| MGG_13438 [Magnaporthe grisea 70-15]
  misc_feature (8)..(465): NCBI GI: 256730473 Blast Desc: NECHADRAFT_74024 [Nectria haematococca mpVI 77-13-4]
  misc_feature (12)..(464): NCBI GI: 256723729 Blast Desc: NECHADRAFT_52214 [Nectria haematococca mpVI 77-13-4]
  misc_feature (21)..(466): SWISSPROT Homolog: EC 3.4.13.9 Xaa-Pro dipeptidase
  misc_feature: Useful for introducing or modulating the production of volatile compounds
MVKVIDIDVDAVLAGKYPAKLHARRVADYIRSKNPDAKGVIFLQGTADALLEDSDEPIPFRQRRHFMYLTGVDMPDCAFTYDIDTDKSTLFIPPIDPEHVMWAGLPLTTEEALAQFDVEEVQYSNELNPHLAHIGAAKPDTTVFAIADRVSTNVTFLEFGNKDFTLLAEAIDECRVVKDDYEIALIRKANIISGAAHKAVLQHVSTAENEHELEAVFLGQCGRHGAKKQAYPSIVASGQAAATLHYVHNDKQIKGKDLLLLDAGAEWRTYASDITRTFPISGHFSKKSRAIYDIVLKMQEDCIAMLKDGVLWDDVHLLSHKVLIDGLLSLGILKGDPKEILDSRTSAAFLPHGLGHYMGMDTHDTGGHPNYSDEDKLFRFLRVRRNLPAGSVITVEPGIYFCEFIIRPYLTDPVCGQYIDKAVLDEYWDVGGVRIEDNLLITKDGSINLTDAIKDPDEMERIIQGA

SEQ ID NO: 34216 - DNA, 3126 bp, Muscodor strobelii
  misc_feature: SGI EST ID NO. CUFF.81105.0
  misc_feature: Variant of the nucleotide sequence at SEQ ID NO 34214
gggcattcttcgtagcttccaatccagggcagacaaacttcaaccgttgcaaaccgaagcagtcgtttcgccggcttccgacctgctggaatcgggacgacgaggatgagggggaggaacatcttggagagcctcaatagagattgcgcgactgctctcctctcatcttcccggactagatcatcgtcgcgcctgttctccagaccgagtaactttggtaaggacgaccatccacgacgatacatccgacacacgtctcacctagcggcggccaagagctgtgctcctctccacgtctccatatcgtcctcacgagctaccccgccctctctcttacgcctgggctctccaactgccccgcgctgcgttgcatttacgactaccacaaccacatctacaacatctcacacaatatccaccatggtcaaagtcatagacatcgacgtggatgctgtcctcgcgggcaagtacccggccaagcttcacgccaggcgcgtcgcagactacatccgatcgaagaacccagatgccaaaggcgtgatctttctccaaggaaccgccgatgcgctactcgaggacagcgatgaacccattcccttccgccaacggagacacttcatgtacctaaccggcgtcgacatgcctgactgtgccttcacttacgacatcgataccgacaaatccaccctcttcatccctcccatcgatcccgagcacgtcatgtgggctggtctcccgctgactaccgaagaagctcttgcacaattcgacgtcgaagaggtgcagtacagcaacgagttgaatccccatctcgctcacataggcgctgccaagcctgacaccaccgtcttcgccatcgctgaccgagtctccaccaatgttaccttcctcgagttcggcaacaaggacttcacactcctcgccgaggccattgacgagtgtcgcgtagtcaaagacgactacgagattgctctgatcagaaaagccaacatcattagtggtgccgcccacaaggccgtgctgcaacacgtaagcaccgccgagaacgaacatgagctagaagcagtcttcctcggccaatgcgggcgacacggcgcaaagaagcaggcttaccccagcatcgtcgccagtggtcaggcggcggctacgcttcactatgtacacaatgacaagcagatcaagggcaaggatctcttgcttttggacgccggtgctgaatggaggacatatgcctctgatattacgaggacgttccccatttcgggccacttcagcaagaaatcccgcgccatctacgacatcgtcctcaagatgcaagaggactgtatcgccatgctcaaagacggtgtgctttgggacgatgtccacttgctttcgcacaaagtcttgatcgacggactgctatctctgggtatcttaaagggcgacccgaaggagatcttggattctcggaccagcgccgcatttttaccgcacggcttaggccattacatgggcatggatactcatgatactggtggccaccccaattactccgacgaggacaaacttttccgcttcctcagagtgagacggaacctgcctgccggtagtgtcattaccgttgagcctggtatctatttctgtgaattcatcatccgcccatatttgacagatcctgtttgtgggcagtacattgacaaggctgtgctggatgagtattgggatgtaggtggtgttagaattgaggataatctacttatcacaaaagatggctcgatcaacttgacagatgctatcaaggacccggatgagatggagaggatcattcagggcgcataggaatccgagtccatgtcctcgcccatgacgatgtagaataggaacgaaatgcatagcctagagtttgagcaagagatacatgatgtattaagttacgcccaagggagaaacactcggctgatgctttggacagacttgggcgtggctttgagcgaatgaataatgatgtatgatcatacgatattaccattggctaagactggcgagatgatgtaaatgctacaatgagtgctgacagtcataatcttgcaatccccctgcttgataccatactgtcatttcactccgttggcatcgtgattcatttgtgggcgcgtcgttgattgatgcagacgattcgtccgctatcaattccataagcaggtcggaggttaaatatcttgattagtggcttggctattcgcttgtttattcgatgtaagccttcatccttgagaggacggtatcgaatccggacagactcgattgatgataaggcttaccactcgtttggagcaagtcatactctgctcggctacctgctgcctttgacgaaacataaaagacgaagacatgcccttgcgccgctgccccgaagattaagctcgttcccgggggtgtatccaacagggctctgtgaatgccagttgccaaccgcggcaggttctgcgacggtgtttcgcctgtagatatagtagacggcaaccccttatacttcggtaggtgaaacgaaaagtgttgacatctctctcccaggacggcattatttctctccatcgcctaattcatcgccgtcagactagatactaggccagtctagctctccgatcaatagcgcctacgcctctgcgtccgccgccgccgccgccaacaccaacaccagcaccacctgcatcgcgccctcgcaaccgctcatgtgtagcacagtcgagaggcacgggagagtaacccatgtacttaagcaggtgcatgttatcatcatgttcgtctcgcttgacaaccatcagggagactggatgaggatgggacggggccatgagaaagaaagtggccgacgatcactctctttgtatgaatcggtaacgtgcggaagactgcaaaaaggagatcatctcgagtaggcagggcttgcatatgagatcctatgctcctcgatataaagtcccgcagctcgactgggcccattcgtattgatctccaaactgtctgcggcacggcgacaggctctcggggccgtgatcttacaagacaagaccaagtccgccacaatccgtactggaccatcaggggtggcagggagtggatatattatgaactaaatgcccg

SEQ ID NO: 34217 - DNA, 972 bp, Muscodor strobelii
  misc_feature: SGI cDNA ID NO. 571822
  misc_feature: Elevated expression when VOC is produced
  misc_feature: Encodes the peptide sequence at SEQ ID NO 34218
atggcggtagacatgtcagcactgtcgcggatgcaaataggagccttcttcaaagcaaatgctcctgtcacgcagcaggaatgtgacgaagaagccgaaagaatctcagggcaccctgccactccaacagcttgtcagggtggaagtagctacaccgtcgaagccgggaaagttgtggtacagttctgtgcgcaagactccgctctggatatgaacttcgtgaagaacattgaacaagcatactccggcttcacgcctcaacatgaggaccgcggcctgtttcgcaaccttcatgtctacataatgagtaatatgggaggagtctcgatgtatctcgcccgagctcatctgcagaggaacaattgcgaacttatcaggaacaccattgacgactatgccagattctttgcgtcggtgtatcacgatacaccgcaatcaatgaacgtaccagaccgtgtagaacttcttacgaaatacacatcgaagctgaaacaacttcgagctggccttcctgctcgctttcacgcaacactagatactctcattccccagcttccaaacatatgtgatgagaactggccattggtgccaaaccacaccgacctcctcgagaacaacatccacgtagatatagacacaggcgccatcacgggaatctgcgactggagagacgccgaagtcagccccttcggcatatctttgggcggtctcgagactatgctaggaattcgtgttatgaacgagtatggctggagatattttcccaatcatagtgaacttcgagagttgttttggactgcgttttacaattatctagggccgatgtctaaagaacagaagcaatgcatagaggttgcgaggctgactggattgttcttggagaatggttgggagctaggtgaggacgggaacttgaggccagctactagaggatgggatctaggttaccttaacgctgttgttgtcgcttga

SEQ ID NO: 34218 - protein, 323 aa, Muscodor strobelii
  misc_feature: SGI Peptide ID NO. 571822
  misc_feature (8)..(298): NCBI GI: 238840357 Blast Desc: conserved [Microsporum canis CBS 113480]
  misc_feature (8)..(303): NCBI GI: 240274814 Blast Desc: conserved [Ajellomyces capsulatus H143]
  misc_feature (13)..(323): NCBI GI: 240282092 Blast Desc: conserved [Ajellomyces capsulatus H143]
  misc_feature (4)..(303): NCBI GI: 238845106 Blast Desc: conserved [Microsporum canis CBS 113480]
  misc_feature (15)..(297): NCBI GI: 239610103 Blast Desc: conserved [Ajellomyces dermatitidis ER-3]
  misc_feature (12)..(297): NCBI GI: 255950520 Blast Desc: Pc22g21300 [Penicillium chrysogenum Wisconsin 54-1255] gi|211593044|emb|CAP99418.1| Pc22g21300 [Penicillium chrysogenum Wisconsin 54-1255]
  misc_feature (4)..(297): NCBI GI: 225555069 Blast Desc: conserved [Ajellomyces capsulatus G186AR]
  misc_feature (4)..(297): NCBI GI: 121714519 Blast Desc: conserved [Aspergillus clavatus NRRL 1] gi|119403024|gb|EAW13444.1| conserved [Aspergillus clavatus NRRL 1]
  misc_feature (12)..(297): NCBI GI: 115398820 Blast Desc: [Aspergillus terreus NIH2624] gi|114191882|gb|EAU33582.1| [Aspergillus terreus NIH2624]
  misc_feature (12)..(297): NCBI GI: 238841929 Blast Desc: conserved [Microsporum canis CBS 113480]
  misc_feature: Useful for introducing or modulating the production of volatile compounds
MAVDMSALSRMQIGAFFKANAPVTQQECDEEAERISGHPATPTACQGGSSYTVEAGKVVVQFCAQDSALDMNFVKNIEQAYSGFTPQHEDRGLFRNLHVYIMSNMGGVSMYLARAHLQRNNCELIRNTIDDYARFFASVYHDTPQSMNVPDRVELLTKYTSKLKQLRAGLPARFHATLDTLIPQLPNICDENWPLVPNHTDLLENNIHVDIDTGAITGICDWRDAEVSPFGISLGGLETMLGIRVMNEYGWRYFPNHSELRELFWTAFYNYLGPMSKEQKQCIEVARLTGLFLENGWELGEDGNLRPATRGWDLGYLNAVVVA

SEQ ID NO: 34219 - DNA, 1020 bp, Muscodor strobelii
  misc_feature: SGI cDNA ID NO. 571823
  misc_feature: Encodes the peptide sequence at SEQ ID NO 34220
atgacgtcgcatgaaggcgacgggcagggcgctcagcagcaaacgacgacatcctccgagaacacaacaccgacgacaccaccgccaccaccagtcccctctgccgatcccaagctcttctcccaagcacgcactcctcccccgctgcatgctatcccgaccaagtcctccgaggacctcttcaaactcccgcccactgctgccttgagattactatgcgcgggagtagagtctctcgtgcgggtcacgggcgatgtcccgcccacgccccctccagccgaacccacgatccccaacatgagcgggatgcagcaagagaaggcagccattgtccgatcacactccgagaggaatctcgcgcggctgcgagaagtatctgctgaccaagtccaaccgaaaggatcaggccaatttcaaggcttcttcgacggacaaggacctgagcctatcgacggcgttcgacttcgccagacacctactcctccactggcaccgcaggcgaccccggagccctacatcgtgattggtgctaactctcagccccttaacctccaacacagcgccatcacacgcaagttcttcagcaaagcaccaccgcccatcagcatcgaagactatctactgcgaattcaccgcttctgccccatgtctacggccgtgtacctggcgacatctctgtacatattccggctcgctgtagaagagcgcgctatacccgtgacgagaagaaattgccatcgactcttattagcggggttgagagtggctatgaaggcactcgaggatcttagctatccccatgccaagattgcgaaggtcggcggtgtgagcgagatcgagttagcgaggctggagatcagcttctgcttccttgcgggattcgaattggtcgtcgatgaggaatcgttactgaagcattgggaaacactgaagcaaagcgcggccctagccggaactgcgaagatacctaatttgaggctagatctgaggcgcaagaagaacattgcgatcgagacgtga

SEQ ID NO: 34220 - protein, 339 aa, Muscodor strobelii
  misc_feature: SGI Peptide ID NO. 571823
  misc_feature (148)..(296): Pfam Id: PF08613 Pfam Desc: Cyclin
  misc_feature (166)..(296): Pfam Id: PF08613 Pfam Desc: Cyclin
  misc_feature (34)..(335): NCBI GI: 261354233 Blast Desc: cyclin-U2-2 [Verticillium albo-atrum VaMs.102]
  misc_feature (12)..(311): NCBI GI: 46124361 Blast Desc: FG06558.1 [Gibberella zeae PH-1]
  misc_feature (5)..(338): NCBI GI: 156048376 Blast Desc: SS1G_08919 [Sclerotinia sclerotiorum 1980] gi|154693316|gb|EDN93054.1| SS1G_08919 [Sclerotinia sclerotiorum 1980]
  misc_feature (5)..(338): NCBI GI: 154300690 Blast Desc: BC1G_10933 [Botryotinia fuckeliana B05.10] gi|150856540|gb|EDN31732.1| BC1G_10933 [Botryotinia fuckeliana B05.10]
  misc_feature (60)..(312): NCBI GI: 256726531 Blast Desc: NECHADRAFT_6175 [Nectria haematococca mpVI 77-13-4]
  misc_feature (58)..(312): NCBI GI: 171679208 Blast Desc: protein product [Podospora anserina] gi|170937676|emb|CAP62333.1| protein product [Podospora anserina]
  misc_feature (58)..(311): NCBI GI: 85078004 Blast Desc: NCU08772 [Neurospora crassa OR74A] gi|28881220|emb|CAD70459.1| conserved [Neurospora crassa] gi|28917139|gb|EAA26857.1| conserved [Neurospora crassa OR74A]
  misc_feature (18)..(312): NCBI GI: 145609477 Blast Desc: MGG_13439 [Magnaporthe grisea 70-15] gi|145016840|gb|EDK01270.1| MGG_13439 [Magnaporthe grisea 70-15]
  misc_feature (13)..(332): NCBI GI: 116208618 Blast Desc: CHGG_03602 [Chaetomium globosum CBS 148.51] gi|88184199|gb|EAQ91667.1| CHGG_03602 [Chaetomium globosum CBS 148.51]
  misc_feature (60)..(311): NCBI GI: 212532587 Blast Desc: cyclin-dependent protein kinase complex component, [Penicillium marneffei ATCC 18224] gi|212532589|ref|XP_002146451.1| cyclin-dependent protein kinase
MTSHEGDGQGAQQQTTTSSENTTPTTPPPPPVPSADPKLFSQARTPPPLHAIPTKSSEDLFKLPPTAALRLLCAGVESLVRVTGDVPPTPPPAEPTIPNMSGMQQEKAAIVRSHSERNLARLREVSADQVQPKGSGQFQGFFDGQGPEPIDGVRLRQTPTPPLAPQATPEPYIVIGANSQPLNLQHSAITRKFFSKAPPPISIEDYLLRIHRFCPMSTAVYLATSLYIFRLAVEERAIPVTRRNCHRLLLAGLRVAMKALEDLSYPHAKIAKVGGVSEIELARLEISFCFLAGFELVVDEESLLKHWETLKQSAALAGTAKIPNLRLDLRRKKNIAIET

SEQ ID NO: 34221 - DNA, 2750 bp, Muscodor strobelii
  misc_feature: SGI EST ID NO. CUFF.81083.0
  misc_feature: Variant of the nucleotide sequence at SEQ ID NO 34219
ctccaaccatcagaaagctagctggatgtaataataacgcttgctaccccattcccacttctgcctgtgcaacactttctcctcactgctttgactcgacttcgactgtcttcgtttttcatcctcgtgatcatgatatgatctatcagaaccgccttataatcgtaataaatgaaattcctggctggggatcacacttcatcaggttatctcacatctctaaatccggcactcatcgacggcaataccccttctgcaacaccaaggttcacacaaactcacacacgacttgatcaagcacctcaatcacacatttgcctctgataatttgctggctgtcagtcatcgcgagctgtcgccatctttttgacccgatgatctctgtcgccatgattgagtatataccgtccaattacacgcgctagtgccatatccgagggctttggtcactgcctcggctgcttgaccattggcaatatccgatcatcctcgtcgcccatgctgtcactgcgacttgctgaggctcactgagactgacggcgcttttggtgctatgagttttcgattcggtcacagacaaagacatcactccagagtaaccgactgccctagctagttcctccacttctgatactgcactccacttcaccacgagtcgcgccgagatcgttatctacaggccctaattggcaccggcatacagacgaccgactctgatagcaaaatctggaagtgtcaaatctcatgcggagggaatattggtgaagacgcatcaccacgtgttgtatcatttcgcgactgcgggaactgtgccgaggcattgcgactgcttctttggtgttggtgcatcaggaagccgcttggcgcaaaggaccacccatattaactgaagtatgacgtcgcatgaaggcgacgggcagggcgctcagcagcaaacgacgacatcctccgagaacacaacaccgacgacaccaccgccaccaccagtcccctctgccgatcccaagctcttctcccaagcacgcactcctcccccgctgcatgctatcccgaccaagtcctccgaggacctcttcaaactcccgcccactgctgccttgagattactatgcgcgggagtagagtctctcgtgcgggtcacgggcgatgtcccgcccacgccccctccagccgaacccacgatccccaacatgagcgggatgcagcaagagaaggcagccattgtccgatcacactccgagaggaatctcgcgcggctgcgagaagtatctgctgaccaagtccaaccgaaaggatcaggccaatttcaaggcttcttcgacggacaaggacctgagcctatcgacggcgttcgacttcgccagacacctactcctccactggcaccgcaggcgaccccggagccctacatcgtgattggtgctaactctcagccccttaacctccaacacagcgccatcacacgcaagttcttcagcaaagcaccaccgcccatcagcatcgaagactatctactgcgaattcaccgcttctgccccatgtctacggccgtgtacctggcgacatctctgtacatattccggctcgctgtagaagagcgcgctatacccgtgacgagaagaaattgccatcgactcttattagcggggttgagagtggctatgaaggcactcgaggatcttagctatccccatgccaagattgcgaaggtcggcggtgtgagcgagatcgagttagcgaggctggagatcagcttctgcttccttgcgggattcgaattggtcgtcgatgaggaatcgttactgaagcattgggaaacactgaagcaaagcgcggccctagccggaactgcgaagatacctaatttgaggctagatctgaggcgcaagaagaacattgcgatcgagacgtgagacgcggcctgcgcaccacggggttcggcagtgtggagacgatgaatgcgaagatacacgaatgggcggatccttacacactcagacccgtctgaagcatgactccattgttttcgctagccggagattcaatcgcgcaccggaacgaactgaagtcgttggttttcccaaagatgatacctgatactgctttcatgcgtgcttactcgagagggtgagcagaagaaggacatcgcgacaggagtggggcacacctaggacgtcgtcgcctagtgggaggataaaaggagaatacccccaaagaccagaacagatacgacagtcgaggataggaatatacgagcaatcttgggaatttctagacgagagaggcttatcgatcccgtggtcttcgtcaacggcaactaatgcatacacgccttcgtacaaacggcatcacacacgaggggaagacgcggaaagtcatcatcaagtcgcgaatacgcattttctaccggcgagaaagattcaggagaacgaatgggacatcactgtcggcataatgatgtttgtttttcttagcttcgcatgtaataagtgataccccccgattctcggttctttgtataatagtacatttgcttcatactccgcatatctcattcggtatagcttcggtaggaattcggatggtgcgttgttttgagcgggcggcttggctgaataataattgattggacgttcatcgagaacatgtgcctgcatctatgcgttgtgattgttgtacggctatttgacgttagcagtggtggtctattcggtgttattttctgactgatattcggatgcttattacct

SEQ ID NO: 34222 - DNA, 1746 bp, Muscodor strobelii
  misc_feature: SGI cDNA ID NO. 571824
  misc_feature: Elevated expression when VOC is produced
  misc_feature: Encodes the peptide sequence at SEQ ID NO 34223
atgtataccgcatcctttgcctttttcgaggcgatatgggaggctggaatcacccattgtttcgtgaacttgggctctgaccatcccagtattattgaagctatggttaagggggcacagaataaagacaaatttcccagaatcatcacatgccccaatgagatggtagcgatgtccatggcggacggatatgcgcgactcacaggaaaggtacaatgcgtgatcgtacatgtcgatgtagggacacagggtcttggagctgccgtgcacaacgcaagcaccggacgcgctcccgtgctcgtgtttgccggtctcagccccttcactctggacggcgagatgcgcggctctcgaacggagtatatccactggatccaggatgtgcccgaccagaaacagatcatcgggcagtactgtcgttatgccgcggagatcaagacagggaagaacgtgaaacagatggtcaaccgcgctctccaattcgccacgagtgatccccagggtcccgtgtatttagtcggggctagagaagtgctggaggaagatatcgaaccatatcacctgaaccagggcgagtgggatcctgtagagctgggcggacttacgccaaaggcatcaaaagcgatcgccgaagctctcgtgggagcagagaaaccactgatcatcgcagggtataccggccgcaaccaagagactccagcagctcttgtcgaactcgcaaacaccgtgaagggactacgtgtgctcgatactggcggtagtgatatgtgtttcccagcctcgcatccagcctggctaggtctgcggttcggacaggatccagcgatcaaggaggcagatgtgattgtgatcatgaattgcgatgtaccgtggatcccaacacaatgcaagcccaaggacggcgcaaacattttccacattgacgtcgaccccctgaagagcatgatgccgttgttctacgttccagccaaacaccgataccgcgccgatgcgttggtatcgattgagcagatcaccgcggacgctaaggcatttgccaatgcgctcgatgacagtctggtaagcaagagatgggatgcgctgcaggcttcgtacaaggagcgactggatggcatcgacaagattgccgtccctgcagatgacggaactttcggaacaggatatctgtcgaagactgtgaggaggatgtgtcccgatgacactatattcgcaatcgaggccgttactaacactctcttcgtacatgataatctgcggccagaacacccaggctcgtggattaactgcggcggtggtggcttgggatggtctggtggcggcgcgttgggtatcaagcttgcgactgctgctgaaagcggtggaaagggaaagttcgtcgtgcagattgtgggtgatggcacgttcttgttctctgttcctggaagtgtgtattggatttcaaaacgctatgggatcccagttttaactattgtgcttaacaacaaaggatggaacgctcctcgtaaatcgctgttactcgttcatcccgacggtgcgggctcaaaggctacgaatgaggagatcaacatttcgtttgatcctgtgccggacttcgcaggtatcgcgaaggcagcagctggtggagatttgttcgcggcaagagtggagaaggctgatgatctcgaggccacattgaagaaggccattgagtctgtgcagagtggtgtatcagctgtgcttgattgtaaggttacgctgggatgttaa

SEQ ID NO: 34223 - protein, 581 aa, Muscodor strobelii
  misc_feature: SGI Peptide ID NO. 571824
  misc_feature (406)..(575): Pfam Id: PF02775 Pfam Desc: Thiamine pyrophosphate enzyme, C-terminal TPP binding domain
  misc_feature (206)..(338): Pfam Id: PF00205 Pfam Desc: Thiamine pyrophosphate enzyme, central domain
  misc_feature (2)..(187): Pfam Id: PF02776 Pfam Desc: Thiamine pyrophosphate enzyme, N-terminal TPP binding domain
  misc_feature (1)..(581): NCBI GI: 171679210 Blast Desc: protein product [Podospora anserina] gi|170937677|emb|CAP62334.1| protein product [Podospora anserina]
  misc_feature (1)..(581): NCBI GI: 46124359 Blast Desc: FG06557.1 [Gibberella zeae PH-1]
  misc_feature (1)..(580): NCBI GI: 145609479 Blast Desc: MGG_07628 [Magnaporthe grisea 70-15] gi|145016841|gb|EDK01271.1| MGG_07628 [Magnaporthe grisea 70-15]
  misc_feature (1)..(577): NCBI GI: 189197823 Blast Desc: acetolactate synthase [Pyrenophora tritici-repentis Pt-1C-BFP] gi|187981197|gb|EDU47823.1| acetolactate synthase [Pyrenophora tritici-repentis Pt-1C-BFP]
  misc_feature (16)..(580): NCBI GI: 164425937 Blast Desc: NCU08771 [Neurospora crassa OR74A] gi|28881219|emb|CAD70458.1| related to BENZOYLFORMATE DECARBOXYLASE [Neurospora crassa] gi|157071129|gb|EAA26856.2|
  misc_feature (1)..(581): NCBI GI: 156048380 Blast Desc: SS1G_08921 [Sclerotinia sclerotiorum 1980] gi|154693318|gb|EDN93056.1| SS1G_08921 [Sclerotinia sclerotiorum 1980]
  misc_feature (1)..(581): NCBI GI: 154300686 Blast Desc: BC1G_10931 [Botryotinia fuckeliana B05.10] gi|150856538|gb|EDN31730.1| BC1G_10931 [Botryotinia fuckeliana B05.10]
  misc_feature (1)..(577): NCBI GI: 71002028 Blast Desc: thiamine pyrophosphate enzyme [Aspergillus fumigatus Af293] gi|66853333|gb|EAL93657.1| thiamine pyrophosphate enzyme, [Aspergillus fumigatus Af293] gi|159129754|gb|EDP54868.1| enzyme,
  misc_feature (1)..(577): NCBI GI: 119481589 Blast Desc: acetolactate synthase [Neosartorya fischeri NRRL 181] gi|119408977|gb|EAW18926.1| acetolactate synthase [Neosartorya fischeri NRRL 181]
  misc_feature (1)..(577): NCBI GI: 169774529 Blast Desc: [Aspergillus oryzae RIB40] gi|83769595|dbj|BAE59730.1| protein product [Aspergillus oryzae]
  misc_feature (9)..(501): SWISSPROT Homolog: EC 4.1.1.7 Benzoylformate decarboxylase
  misc_feature: Useful for fungicidal and/or biocontrol applications
  misc_feature: Useful for production of fusel alcohols
  misc_feature: Useful for introducing or modulating the production of volatile compounds
MYTASFAFFEAIWEAGITHCFVNLGSDHPSIIEAMVKGAQNKDKFPRIITCPNEMVAMSMADGYARLTGKVQCVIVHVDVGTQGLGAAVHNASTGRAPVLVFAGLSPFTLDGEMRGSRTEYIHWIQDVPDQKQIIGQYCRYAAEIKTGKNVKQMVNRALQFATSDPQGPVYLVGAREVLEEDIEPYHLNQGEWDPVELGGLTPKASKAIAEALVGAEKPLIIAGYTGRNQETPAALVELANTVKGLRVLDTGGSDMCFPASHPAWLGLRFGQDPAIKEADVIVIMNCDVPWIPTQCKPKDGANIFHIDVDPLKSMMPLFYVPAKHRYRADALVSIEQITADAKAFANALDDSLVSKRWDALQASYKERLDGIDKIAVPADDGTFGTGYLSKTVRRMCPDDTIFAIEAVTNTLFVHDNLRPEHPGSWINCGGGGLGWSGGGALGIKLATAAESGGKGKFVVQIVGDGTFLFSVPGSVYWISKRYGIPVLTIVLNNKGWNAPRKSLLLVHPDGAGSKATNEEINISFDPVPDFAGIAKAAAGGDLFAARVEKADDLEATLKKAIESVQSGVSAVLDCKVTLGC

SEQ ID NO: 34224 - DNA, 2863 bp, Muscodor strobelii
  misc_feature: SGI EST ID NO. CUFF.81086.0
  misc_feature: Variant of the nucleotide sequence at SEQ ID NO 34222
gcggaacatctagttcgtcagcccaagctgaccgccagtggaattgatgccattggaacaagtagcgccatgacttacatgccactataaacaaggcaatgtaagattcgctcattcacatatggggtctaatgctgactggatgccttatgttttgataacctaacctccagcgaacacataacccagtcataaaacacgatttcaatagaagttcaacgagcatgtacacattggtcaaccaggcattggaagcctgcaagagccgattgttcccccgtaaactgccttggtagagcgtagacggcaccctcccccgcttgatagtccccgcaatggcagcttcccccgcagtccctcatcctatccgcgaatgtcatctatgtcctgacctttgccatgcgtatcggagcgggcaaccccatgctgccagtccaatcacgttgtttctagctggtagatacctatagacaatatcggcctgaatagtagcaggtgtcgtcaaagtctcactgagcaccgaaagccgaactctttaagaaagtatcaggtgggtttctagtcggagaccgtcggtggtccagatactcacggcaggtgccccttactttagttttatcgtgacctgagctttccttgcttcattcttttcaaagcatattccccttgacaagtcttgaacctgaccaactaccaccaccaatcagaacatctcgcactcctcgtttggtctccgtccttcctacgtaaaagttctcgacttacaaatagtcgtcgagttgtgagagcacagtgtagacagacgtcaaaattttgcccttgaaggcattattgagagtaccatcggacctcgctcatccacctcatccagcatcatgtataccgcatcctttgcctttttcgaggcgatatgggaggctggaatcacccattgtttcgtgaacttgggctctgaccatcccagtattattgaagctatggttaagggggcacagaataaagacaaatttcccagaatcatcacatgccccaatgagatggtagcgatgtccatggcggacggatatgcgcgactcacaggaaaggtacaatgcgtgatcgtacatgtcgatgtagggacacagggtcttggagctgccgtgcacaacgcaagcaccggacgcgctcccgtgctcgtgtttgccggtctcagccccttcactctggacggcgagatgcgcggctctcgaacggagtatatccactggatccaggatgtgcccgaccagaaacagatcatcgggcagtactgtcgttatgccgcggagatcaagacagggaagaacgtgaaacagatggtcaaccgcgctctccaattcgccacgagtgatccccagggtcccgtgtatttagtcggggctagagaagtgctggaggaagatatcgaaccatatcacctgaaccagggcgagtgggatcctgtagagctgggcggacttacgccaaaggcatcaaaagcgatcgccgaagctctcgtgggagcagagaaaccactgatcatcgcagggtataccggccgcaaccaagagactccagcagctcttgtcgaactcgcaaacaccgtgaagggactacgtgtgctcgatactggcggtagtgatatgtgtttcccagcctcgcatccagcctggctaggtctgcggttcggacaggatccagcgatcaaggaggcagatgtgattgtgatcatgaattgcgatgtaccgtggatcccaacacaatgcaagcccaaggacggcgcaaacattttccacattgacgtcgaccccctgaagagcatgatgccgttgttctacgttccagccaaacaccgataccgcgccgatgcgttggtatcgattgagcagatcaccgcggacgctaaggcatttgccaatgcgctcgatgacagtctggtaagcaagagatgggatgcgctgcaggcttcgtacaaggagcgactggatggcatcgacaagattgccgtccctgcagatgacggaactttcggaacaggatatctgtcgaagactgtgaggaggatgtgtcccgatgacactatattcgcaatcgaggccgttactaacactctcttcgtacatgataatctgcggccagaacacccaggctcgtggattaactgcggcggtggtggcttgggatggtctggtggcggcgcgttgggtatcaagcttgcgactgctgctgaaagcggtggaaagggaaagttcgtcgtgcagattgtgggtgatggcacgttcttgttctctgttcctggaagtgtgtattggatttcaaaacgctatgggatcccagttttaactattgtgcttaacaacaaaggatggaacgctcctcgtaaatcgctgttactcgttcatcccgacggtgcgggctcaaaggctacgaatgaggagatcaacatttcgtttgatcctgtgccggacttcgcaggtatcgcgaaggcagcagctggtggagatttgttcgcggcaagagtggagaaggctgatgatctcgaggccacattgaagaaggccattgagtctgtgcagagtggtgtatcagctgtgcttgattgtaaggttacgctgggatgttaagttcttcaaatgagactgtcgggatgatctttgggtgttgggatggttagaccgttgtcactgaaatgttgagtcgagttggcgcgtcttctcaagaatcagagatagatgacaccgtgaccaggggcgtgaatgagtgcgtcaaccggtctgttgcgatgaatttaaattatagcacatttgttcttcactgcctacattttatctttgtttttacattggtaacttgcataatagcaaac

SEQ ID NO: 34225 - DNA, 1491 bp, Muscodor strobelii
  misc_feature: SGI cDNA ID NO. 571825
  misc_feature: Elevated expression when VOC is produced
  misc_feature: Encodes the peptide sequence at SEQ ID NO 34226
atgggccaaaacccaagcagtcccctggcggattgcctcggttccgtttgtaatggccgcagcaattgcgtagcctatccaagtaatcctctatatcaaatatcttgggtcaacagatacaatctcgacattgctgtcacccctgtcgctgtcacaaggccgcagacggtagacgatgtctccggcttcgtgaaatgtgctgcaacaaataatgtgaaggttcaggcaaagtcgggtggccattcctatgcgaacttcggtgtgggcggcgaagatggtgaactggtcatcgacttgacaaacttccaggacttctcaatggacaccaacacctggcaagccacgataggaggtggaaccaagctaagcgacgtcactgaacaactacacaacaatggcaagagagctattgcccatggtacatgtccgggagttggtattggtggtcatgcaactattggcggcttgggccctatgtctcggatgtggggttcctgcctggaccacgtcctcgaagttgaggttgtcactgccgatgggtctatcaagcgagcaagcgaaacacagaatagcgatctattcttcgccctaaagggagctggagccggctttggggttattacggaattcatcatgaagacacatccagaacctggaaccgttgtccaatacacatactcgatcacattcggcaaacacgccgatatggtacctgtattcaagcagtggcaagatctggtgaccgatccgaaccttgatcgaagattcggcaccgagttcgtagcccacgagctaggagtgatcgttactgccacattttatggcaccgaagatgaatggaatgcatccggaatcccagacagaatccccaagggtaaaatatcagtggtcatcgatgactggctggcggccattgccacggatgtcgagaatgcggcactctatctctcagatgtccgctcggcattcaccgccagaagcctttctttcaagtccgacgaagtcctctcggaagatgcgatcacgaagctgatgaactatcttgatgacactgatgcaggcacactgctctggttcttaattttcgatgctacaggcggagcgatcagtgacattcccatgaacgctaccgcttactcacatcgtgacaaagtcatgttctgccaaggctacggaatcggaattccaactctgagccagaccacgaagaacttcatgaatggcattatggacacgattcagaactcgaccacgcagactctcacaacctatcccggctacgtcgacccaaacttagtcaaccctcaagaatcgtattggggcccgaacttgaatactctcggcagcatcaagacaaagtgggatcctaaagatatgtttcacaacccacagagtgtcagaccaggggagcaggagcaggagcagcaagcagtgtcgggatcgacgagatggggtgtaaccggaacgtctggcaagtctgagaccgcgtaa

SEQ ID NO: 34226 - protein, 496 aa, Muscodor strobelii
  misc_feature: SGI Peptide ID NO. 571825
  misc_feature (423)..(467): Pfam Id: PF08031 Pfam Desc: Berberine and berberine like
  misc_feature (48)..(186): Pfam Id: PF01565 Pfam Desc: FAD binding domain
  misc_feature (1)..(471): NCBI GI: 261361439 Blast Desc: conserved [Verticillium albo-atrum VaMs.102]
  misc_feature (1)..(470): NCBI GI: 171685244 Blast Desc: protein product [Podospora anserina] gi|170942583|emb|CAP68235.1| protein product [Podospora anserina]
  misc_feature (1)..(470): NCBI GI: 164425844 Blast Desc: NCU08199 [Neurospora crassa OR74A] gi|157071088|gb|EAA30053.2| conserved [Neurospora crassa OR74A]
  misc_feature (1)..(470): NCBI GI: 11359616 Blast Desc: NCU08199 [Neurospora crassa OR74A] gi|157071088|gb|EAA30053.2| conserved [Neurospora crassa OR74A]
  misc_feature (1)..(493): NCBI GI: 39946488 Blast Desc: MGG_08267 [Magnaporthe grisea 70-15] gi|145020094|gb|EDK04322.1| MGG_08267 [Magnaporthe grisea 70-15]
  misc_feature (7)..(467): NCBI GI: 116208754 Blast Desc: CHGG_03670 [Chaetomium globosum CBS 148.51] gi|88184267|gb|EAQ91735.1| CHGG_03670 [Chaetomium globosum CBS 148.51]
  misc_feature (1)..(472): NCBI GI: 256726533 Blast Desc: NECHADRAFT_39419 [Nectria haematococca mpVI 77-13-4]
  misc_feature (12)..(466): NCBI GI: 121707059 Blast Desc: glucooligosaccharide oxidase, [Aspergillus clavatus NRRL 1] gi|119399867|gb|EAW10293.1| glucooligosaccharide oxidase, [Aspergillus clavatus NRRL 1]
  misc_feature (1)..(468): NCBI GI: 46124357 Blast Desc: FG06556.1 [Gibberella zeae PH-1]
  misc_feature (5)..(468): NCBI GI: 116204005 Blast Desc: CHGG_09886 [Chaetomium globosum CBS 148.51] gi|88176014|gb|EAQ83482.1| CHGG_09886 [Chaetomium globosum CBS 148.51]
  misc_feature (29)..(468): SWISSPROT Homolog: EC 1.21.3.3 Reticuline oxidase
  misc_feature: Useful for introducing or modulating the production of volatile compounds
MGQNPSSPLADCLGSVCNGRSNCVAYPSNPLYQISWVNRYNLDIAVTPVAVTRPQTVDDVSGFVKCAATNNVKVQAKSGGHSYANFGVGGEDGELVIDLTNFQDFSMDTNTWQATIGGGTKLSDVTEQLHNNGKRAIAHGTCPGVGIGGHATIGGLGPMSRMWGSCLDHVLEVEVVTADGSIKRASETQNSDLFFALKGAGAGFGVITEFIMKTHPEPGTVVQYTYSITFGKHADMVPVFKQWQDLVTDPNLDRRFGTEFVAHELGVIVTATFYGTEDEWNASGIPDRIPKGKISVVIDDWLAAIATDVENAALYLSDVRSAFTARSLSFKSDEVLSEDAITKLMNYLDDTDAGTLLWFLIFDATGGAISDIPMNATAYSHRDKVMFCQGYGIGIPTLSQTTKNFMNGIMDTIQNSTTQTLTTYPGYVDPNLVNPQESYWGPNLNTLGSIKTKWDPKDMFHNPQSVRPGEQEQEQQAVSGSTRWGVTGTSGKSETA

SEQ ID NO: 34227 - DNA, 2293 bp, Muscodor strobelii
  misc_feature: SGI EST ID NO. CUFF.81122.0
  misc_feature: Variant of the nucleotide sequence at SEQ ID NO 34225
gacagaaacagatgacaagcatcacgacagacattctggcgagtctggctccctgcagcatcgctgcctctcatgcctatcgagtacgaccatgttgtgcgtcgccattgggcgattcggcatgaaaacgaggtcttggcgggcaaggtcccccagataatactaccgtcggtgctttgctcaaataattttattttcttgctcatcagatggatatgcgtcggcaatggaaataatgacatggtttacaattatgactgatgactttgcgtcgaatcctttacgactgtgacgatcccattgaatttgaagccgttatttaacctctctctaggtttgttttccctcggctaccttcctaccgccatattcccgacatcaacagagcaagagcatacagtagtacctacgtaccagaagttccgttgcctaaattattcgtaatcacctagagggtctcaacttcgttcgcgagccaatctccaactcattcatacagcaagccaagtaccgacatgggccaaaacccaagcagtcccctggcggattgcctcggttccgtttgtaatggccgcagcaattgcgtagcctatccaagtaatcctctatatcaaatatcttgggtcaacagatacaatctcgacattgctgtcacccctgtcgctgtcacaaggccgcagacggtagacgatgtctccggcttcgtgaaatgtgctgcaacaaataatgtgaaggttcaggcaaagtcgggtggccattcctatgcgaacttcggtgtgggcggcgaagatggtgaactggtcatcgacttgacaaacttccaggacttctcaatggacaccaacacctggcaagccacgataggaggtggaaccaagctaagcgacgtcactgaacaactacacaacaatggcaagagagctattgcccatggtacatgtccgggagttggtattggtggtcatgcaactattggcggcttgggccctatgtctcggatgtggggttcctgcctggaccacgtcctcgaagttgaggttgtcactgccgatgggtctatcaagcgagcaagcgaaacacagaatagcgatctattcttcgccctaaagggagctggagccggctttggggttattacggaattcatcatgaagacacatccagaacctggaaccgttgtccaatacacatactcgatcacattcggcaaacacgccgatatggtacctgtattcaagcagtggcaagatctggtgaccgatccgaaccttgatcgaagattcggcaccgagttcgtagcccacgagctaggagtgatcgttactgccacattttatggcaccgaagatgaatggaatgcatccggaatcccagacagaatccccaagggtaaaatatcagtggtcatcgatgactggctggcggccattgccacggatgtcgagaatgcggcactctatctctcagatgtccgctcggcattcaccgccagaagcctttctttcaagtccgacgaagtcctctcggaagatgcgatcacgaagctgatgaactatcttgatgacactgatgcaggcacactgctctggttcttaattttcgatgctacaggcggagcgatcagtgacattcccatgaacgctaccgcttactcacatcgtgacaaagtcatgttctgccaaggctacggaatcggaattccaactctgagccagaccacgaagaacttcatgaatggcattatggacacgattcagaactcgaccacgcagactctcacaacctatcccggctacgtcgacccaaacttagtcaaccctcaagaatcgtattggggcccgaacttgaatactctcggcagcatcaagacaaagtgggatcctaaagatatgtttcacaacccacagagtgtcagaccaggggagcaggagcaggagcagcaagcagtgtcgggatcgacgagatggggtgtaaccggaacgtctgtattctattggcttttttctcagctaattttgacgaccttaatgttgctatgagcgagcttcacgttgttacttcacgttgttatgacctacctctgtatagagtatgattaatgagcaatcagagatggatattaatagcgttaacaggatatgagtttttgttgtttgttatgtctacatatgtacatatttgactagtcgcagctagtgactgcggatggatgctcacaaaggatgactccccattttaacgatttacgagcacacagtcaattccattctagtctacgatgattttgtgtacc

SEQ ID NO: 34228 - DNA, 1605 bp, Muscodor strobelii
  misc_feature: SGI cDNA ID NO. 571826
  misc_feature: Encodes the peptide sequence at SEQ ID NO 34229
atggaactgctcctatcgtcaggttttgatccaaccaaactcaagttcctacaagagatgacattcaaattgcaacaggaaaaatgcgaagacctgcagaaaaagctgaacatcaaactaggacgctcaacttatgcttatatggtgatcgattttctaggcattctagccgagaatgaaattcatctagggttttcgtcaaaattcacagacgtgcagtctgacttttctgagacataccttcatggcatggacgtcctcgttgcacgagtgcccgcacactacccgagcgatatacaaaaagtgaaagccgtattcaagcctgaactaggttcactcaaagatgtcatcatatttccgtccaaaggcgatattccgcttgctgataagctgtctggcggcgattatgatggcgacattgcctgggtatgctgggagcctacaatcgtcaataatttcgccaacgcagatgtcccagaatcccgagacctcttcggcgatggttatctgaccaaaatgctggacacatatcgtgatttagccattctttgcgaaaggactgtcagctcatccccaaaagatgctactacggagttcctcgacaaggcgtttcgtttcaatatgcagcagaacctgctcggcatgtgtactaactacaaggagaaattatgctactcccgtaattctgttaacgatgatcctgcaatctttctcagtactctcataagtcacttggtagaccgagcaaagcagggtatcgtgttttccgaaaacagttgggccaaggtgcgcaagaatctcaatggtcaacaaggagaccctgcgcgatgtaggagcagacttgacccccttccaccccaatataagaatgatagctggtccaaaattggacaacctagtcacatcattgattatgtcaagttcatcgttggtaaaccgactgtcgaacaagagctacagaagcttcataagaatcttgattctgctgtgccttacgacaaagacttggtcaagttccacgatttctttgcaacactcaaaaggccggaagaagagcgaagaaaaaacaaagaattaggcatatggaaaaagagcacttgggaggtgatatttgatgatctgaagagagacatcgatgccgttgtcgaggagtgggaaaaaagcaacacatccgaaattagctgggaagctaagctcgctaatgtgaccaaaatgtggaaagatatcgcaccaagccgcaaggttaattccaagaccgcccgcgcgttacgtgaagatggtctgactaaggttgggctgtctcagtgggatttgttgaaggcgagttatgccttcaagatatattatagggcaaaaagctcaatgttgtggtatattgcggggtatcagctctgctatctgaagagcttgtatgccagtcaggctgaagatatccacgcaccacccgtgcttatgacacctggcatgtacgcaggtgtaaagcccgatgccaaatatgtcaagagccgtgctgggcttaacaatggaaggagagtgcgagcgaatgtcgaagacgacggcgaggaattcgagcgtgaaggcagtagtgtggatgatgatgtttag

SEQ ID NO: 34229 - protein, 534 aa, Muscodor strobelii
  misc_feature: SGI Peptide ID NO. 571826
  misc_feature (85)..(150): Pfam Id: PF05183 Pfam Desc: RNA dependent RNA polymerase
  misc_feature (1)..(523): NCBI GI: 85091735 Blast Desc: NCU07534 [Neurospora crassa OR74A] gi|4803727|emb|CAB42634.1| RNA-dependent RNA polymerase [Neurospora crassa] gi|28920444|gb|EAA29811.1| [Neurospora crassa
  misc_feature (1)..(523): NCBI GI: 122920829 Blast Desc: NCU07534 [Neurospora crassa OR74A] gi|4803727|emb|CAB42634.1| RNA-dependent RNA polymerase [Neurospora crassa] gi|28920444|gb|EAA29811.1| [Neurospora crassa
  misc_feature (1)..(523): NCBI GI: 116208690 Blast Desc: CHGG_03638 [Chaetomium globosum CBS 148.51] gi|88184235|gb|EAQ91703.1| CHGG_03638 [Chaetomium globosum CBS 148.51]
  misc_feature (1)..(523): NCBI GI: 171685170 Blast Desc: protein product [Podospora anserina] gi|170942546|emb|CAP68197.1| protein product [Podospora anserina]
  misc_feature (1)..(509): NCBI GI: 145609535 Blast Desc: MGG_13453 [Magnaporthe grisea 70-15] gi|145016900|gb|EDK01330.1| MGG_13453 [Magnaporthe grisea 70-15]
  misc_feature (1)..(342): NCBI GI: 261357550 Blast Desc: RNA-dependent RNA polymerase [Verticillium albo-atrum VaMs.102]
  misc_feature (1)..(532): NCBI GI: 46124253 Blast Desc: FG06504.1 [Gibberella zeae PH-1]
  misc_feature (1)..(532): NCBI GI: 256726565 Blast Desc: NECHADRAFT_39599 [Nectria haematococca mpVI 77-13-4]
  misc_feature (1)..(523): NCBI GI: 156058730 Blast Desc: SS1G_03377 [Sclerotinia sclerotiorum 1980] gi|154701164|gb|EDO00903.1| SS1G_03377 [Sclerotinia sclerotiorum 1980]
  misc_feature (1)..(520): NCBI GI: 46117554 Blast Desc: FG04619.1 [Gibberella zeae PH-1]
MELLLSSGFDPTKLKFLQEMTFKLQQEKCEDLQKKLNIKLGRSTYAYMVIDFLGILAENEIHLGFSSKFTDVQSDFSETYLHGMDVLVARVPAHYPSDIQKVKAVFKPELGSLKDVIIFPSKGDIPLADKLSGGDYDGDIAWVCWEPTIVNNFANADVPESRDLFGDGYLTKMLDTYRDLAILCERTVSSSPKDATTEFLDKAFRFNMQQNLLGMCTNYKEKLCYSRNSVNDDPAIFLSTLISHLVDRAKQGIVFSENSWAKVRKNLNGQQGDPARCRSRLDPLPPQYKNDSWSKIGQPSHIIDYVKFIVGKPTVEQELQKLHKNLDSAVPYDKDLVKFHDFFATLKRPEEERRKNKELGIWKKSTWEVIFDDLKRDIDAVVEEWEKSNTSEISWEAKLANVTKMWKDIAPSRKVNSKTARALREDGLTKVGLSQWDLLKASYAFKIYYRAKSSMLWYIAGYQLCYLKSLYASQAEDIHAPPVLMTPGMYAGVKPDAKYVKSRAGLNNGRRVRANVEDDGEEFEREGSSVDDDV

SEQ ID NO: 34230 - DNA, 2814 bp, Muscodor strobelii
  misc_feature: SGI EST ID NO. CUFF.81098.0
  misc_feature: Variant of the nucleotide sequence at SEQ ID NO 34228
gagcctggacaaattcgtcatcgcgagaacgaccttcttgccccaaccggaaaagtgatgaacgatggaatcgcgcggatgtctactgctcttgcacgcagaattcgggatatattaggtctcgatgacattcctgcgggttatcagggccgttttgggtgtgcgaaaggattctggatccgggacacggaagatacaagcgatgagatctggatcgaaacgtatccctcacagaggaaatggaactgtgactacggagaggaagatcttcggacttttgaagttcgaagcgagtccagggagctcagagctgccgcgcttaatctacagctactcccaattctagaagaccgtgcgattgaccaggtgaagatgaaagagcaggtgggtatcttcatgaagaactctcttttacaagagatggagttacagagtgtcgccatgcaagatccggcgcaattcaacctatgggtctacgacaatgctgcccaacgccgtcgacaagaacgggtaaaggttggatatgtgcctttcactggtggtcttcctgtaagccaggaagacacaatggaactgctcctatcgtcaggttttgatccaaccaaactcaagttcctacaagagatgacattcaaattgcaacaggaaaaatgcgaagacctgcagaaaaagctgaacatcaaactaggacgctcaacttatgcttatatggtgatcgattttctaggcattctagccgagaatgaaattcatctagggttttcgtcaaaattcacagacgtgcagtctgacttttctgagacataccttcatggcatggacgtcctcgttgcacgagtgcccgcacactacccgagcgatatacaaaaagtgaaagccgtattcaagcctgaactaggttcactcaaagatgtcatcatatttccgtccaaaggcgatattccgcttgctgataagctgtctggcggcgattatgatggcgacattgcctgggtatgctgggagcctacaatcgtcaataatttcgccaacgcagatgtcccagaatcccgagacctcttcggcgatggttatctgaccaaaatgctggacacatatcgtgatttagccattctttgcgaaaggactgtcagctcatccccaaaagatgctactacggagttcctcgacaaggcgtttcgtttcaatatgcagcagaacctgctcggcatgtgtactaactacaaggagaaattatgctactcccgtaattctgttaacgatgatcctgcaatctttctcagtactctcataagtcacttggtagaccgagcaaagcagggtatcgtgttttccgaaaacagttgggccaaggtgcgcaagaatctcaatggtcaacaaggagaccctgcgcgatgtaggagcagacttgacccccttccaccccaatataagaatgatagctggtccaaaattggacaacctagtcacatcattgattatgtcaagttcatcgttggtaaaccgactgtcgaacaagagctacagaagcttcataagaatcttgattctgctgtgccttacgacaaagacttggtcaagttccacgatttctttgcaacactcaaaaggccggaagaagagcgaagaaaaaacaaagaattaggcatatggaaaaagagcacttgggaggtgatatttgatgatctgaagagagacatcgatgccgttgtcgaggagtgggaaaaaagcaacacatccgaaattagctgggaagctaagctcgctaatgtgaccaaaatgtggaaagatatcgcaccaagccgcaaggttaattccaagaccgcccgcgcgttacgtgaagatggtctgactaaggttgggctgtctcagtgggatttgttgaaggcgagttatgccttcaagatatattatagggcaaaaagctcaatgttgtggtatattgcggggtatcagctctgctatctgaagagcttgtatgccagtcaggctgaagatatccacgcaccacccgtgcttatgacacctggcatgtacgcaggtgtaaagcccgatgccaaatatgtcaagagccgtgctgggcttaacaatggaaggagagtgcgagcgaatgtcgaagacgacggcgaggaattcgagcgtgaaggcagtagtgtggatgatgatgtttagacgacatttgacatcgttggtgaggccgtccgccaagagatcgatagtgaggttgacgagcatgatattgtccgggacgaccatgaagaatccgattatatgggcatgcgcaaatatacagatgagccgactgaagaatacagcggtagcaagctcttttcaaggcgcagaaggagccttcctggacgccagaagagcgtatcaggagatggatttgctccctgttagaagatgagatgatggaatatgaacgcgggatatcagatgttgtatgacagtgtacagtacgagagagcatagcgctagggtggagttggagcagtgcgtttgcgtttatcgtgtgttgtgtgttgtgtgttacgtttcggataccccttcttcgagcgagttttatgtacaactcatctttgtcacatctatagacatagagagccttaagcggtgtagatggtagacgaatgagctgggcgttttcattatacctgtttgaactgtttcggcgatgcgcgagggttagactaaagtaaacaagataccaagtggacgttgacataactaagacacctggaactcagatgccagtagaccggcggaccctagcttcactgatctactgattgcctcttggatttctatctaaac

SEQ ID NO: 34231 - DNA, 4155 bp, Muscodor strobelii
  misc_feature: SGI cDNA ID NO. 571827
  misc_feature: Encodes the peptide sequence at SEQ ID NO 34232
atgaacccaccaacacccaccaataagcagaaacagagcagaagtagtcactttagcaactggtttctggagttctcgaacttgtacaacctcaatttgcgtaaacccaactcaagtctgacgattggcgaggtcagagcgttacccgcccatgagctgacgtactataatcgactccagcatcatcatgccagaggtgaaataaatgaaattcatcgcttatttgacaaaggtgcgcgggacattcactctaagtggatcaaaaagccccgtggagatcctgatgtcaccccccattactccgacttgccccgggcgactactgagtccgaacgcaccggattgctagagcttctctcacaggtgttagatcttttcgatcgttcggaaccaactcctccaatgcaactagaacacgaggtccacgaggaggagctgacgtcaccaagtcttcatagacgcacaaaacgtccctctgatgactggtcttctcattctccgtcctccaaaaaatcaaagaatgttgaggcagacaccactagcatcttttctcgtctcgatggtggtcagatcagggcagccactcccttgccagaagcagttactcctattaccacatctgttgttccacacgtagagtatgggttgctttcaagccaccagtctgtctatgagcgccctgtatctgtcaatacaagcagatcatcatttgtttcaagagtcttttccgaacataatatcttggactcccatgtttttccatcgcagaacacagaggtgacagtagaagtgagctcacaggaaaaatggaggcgcccgtcgcccccgtcattatcagacattgagtcacatggcgtgtcttcaggcacagagcaggcgctcgttagcatttccggcttcgaagcaagttcgcaccagaggcgtgcgcgtccaacagcttcattatcagaagccgattccttggcgccgtcatctagtactgaacgcgcacttgtaagcacctttgagcaaagcaagcccagggcggatgtttcagaaccatccaatgttgtcccgctagatgatcgctactctgacttgagtttcgatgattcacatttggatgtccatcccatagtctgtgaccaattcccagcagatcctgaatcaactaaatttggaaaacgactccagggaatctggcctgtgctcccgtctcgcttgcaaaaggctcctctcgctgttcgctgggagataatgcgcgttgcactgcattgcgacattgctatggatgagttacatattgaatggaactccagtttgggcaaattagagaagctctgggaaaagctgcgggctcttaagatccccgacggcaaaacacttcctgaagagacaaggccagatgcctggcgtgcggcaatgcaaggcgactttaaatctacggacgagatcgtagtattaacagcttctctcgcttataactcatccaagacaggtccgcttttcactcttcgattacagccgctcaagctagaactcccccacagactcgatcgccgatttggatctgatcgttttatcgaattgattatgccatcgttacactccaaagagattgcgaggcttggaaagcctgcctgcgatagcattcatcactggcttgtgcgagttgctcatatattcctaggtcgattctggacgtcgttctacacaaagtcagccttgccaaagaaagtgaaaaccgatgacactttactgcccgagaccgtgactatcatgcaagagaggatatatttgtttgcggaagacgggaatgaatttgagcttggagactccccaatagcacccaagtccgagccgagtgctagtcacacgcggatgggacgcaaggacctactggattggctgctacaaatcccccagaatcaggcgcagtctgtgtgcaagttgttctctcgaattgcattagggctaagccgaacgcgtcctaccgtagtgttagagcctggacaaattcgtcatcgcgagaacgaccttcttgccccaaccggaaaagtgatgaacgatggaatcgcgcggatgtctactgctcttgcacgcagaattcgggatatattaggtctcgatgacattcctgcgggttatcagggccgttttgggtgtgcgaaaggattctggatccgggacacggaagatacaagcgatgagatctggatcgaaacgtatccctcacagaggaaatggaactgtgactacggagaggaagatcttcggacttttgaagttcgaagcgagtccagggagctcagagctgccgcgcttaatctacagctactcccaattctagaagaccgtgcgattgaccaggtgaagatgaaagagcaggtgggtatcttcatgaagaactctcttttacaagagatggagttacagagtgtcgccatgcaagatccggcgcaattcaacctatgggtctacgacaatgctgcccaacgccgtcgacaagaacgggtaaaggttggatatgtgcctttcactggtggtcttcctgtaagccaggaagacacaatggaactgctcctatcgtcaggttttgatccaaccaaactcaagttcctacaagagatgacattcaaattgcaacaggaaaaatgcgaagacctgcagaaaaagctgaacatcaaactaggacgctcaacttatgcttatatggtgatcgattttctaggcattctagccgagaatgaaattcatctagggttttcgtcaaaattcacagacgtgcagtctgacttttctgagacataccttcatggcatggacgtcctcgttgcacgagtgcccgcacactacccgagcgatatacaaaaagtgaaagccgtattcaagcctgaactaggttcactcaaagatgtcatcatatttccgtccaaaggcgatattccgcttgctgataagctgtctggcggcgattatgatggcgacattgcctgggtatgctgggagcctacaatcgtcaataatttcgccaacgcagatgtcccagaatcccgagacctcttcggcgatggttatctgaccaaaatgctggacacatatcgtgatttagccattctttgcgaaaggactgtcagctcatccccaaaagatgctactacggagttcctcgacaaggcgtttcgtttcaatatgcagcagaacctgctcggcatgtgtactaactacaaggagaaattatgctactcccgtaattctgttaacgatgatcctgcaatctttctcagtactctcataagtcacttggtagaccgagcaaagcagggtatcgtgttttccgaaaacagttgggccaaggtgcgcaagaatctcaatggtcaacaaggagaccctgcgcgatgtaggagcagacttgacccccttccaccccaatataagaatgatagctggtccaaaattggacaacctagtcacatcattgattatgtcaagttcatcgttggtaaaccgactgtcgaacaagagctacagaagcttcataagaatcttgattctgctgtgccttacgacaaagacttggtcaagttccacgatttctttgcaacactcaaaaggccggaagaagagcgaagaaaaaacaaagaattaggcatatggaaaaagagcacttgggaggtgatatttgatgatctgaagagagacatcgatgccgttgtcgaggagtgggaaaaaagcaacacatccgaaattagctgggaagctaagctcgctaatgtgaccaaaatgtggaaagatatcgcaccaagccgcaaggttaattccaagaccgcccgcgcgttacgtgaagatggtctgactaaggttgggctgtctcagtgggatttgttgaaggcgagttatgccttcaagatatattatagggcaaaaagctcaatgttgtggtatattgcggggtatcagctctgctatctgaagagcttgtatgccagtcaggctgaagatatccacgcaccacccgtgcttatgacacctggcatgtacgcaggtgtaaagcccgatgccaaatatgtcaagagccgtgctgggcttaacaatggaaggagagtgcgagcgaatgtcgaagacgacggcgaggaattcgagcgtgaaggcagtagtgtggatgatgatgtttag

SEQ ID NO: 34232 - protein, 1384 aa, Muscodor strobelii
  misc_feature: SGI Peptide ID NO. 571827
  misc_feature (669)..(1103): Pfam Id: PF05183 Pfam Desc: RNA dependent RNA polymerase
  misc_feature (935)..(1000): Pfam Id: PF05183 Pfam Desc: RNA dependent RNA polymerase
  misc_feature (3)..(1373): NCBI GI: 116208690 Blast Desc: CHGG_03638 [Chaetomium globosum CBS 148.51] gi|88184235|gb|EAQ91703.1| CHGG_03638 [Chaetomium globosum CBS 148.51]
  misc_feature (308)..(1373): NCBI GI: 85091735 Blast Desc: NCU07534 [Neurospora crassa OR74A] gi|4803727|emb|CAB42634.1| RNA-dependent RNA polymerase [Neurospora crassa] gi|28920444|gb|EAA29811.1| [Neurospora crassa
  misc_feature (389)..(1373): NCBI GI: 122920829 Blast Desc: NCU07534 [Neurospora crassa OR74A] gi|4803727|emb|CAB42634.1| RNA-dependent RNA polymerase [Neurospora crassa] gi|28920444|gb|EAA29811.1| [Neurospora crassa
  misc_feature (389)..(1373): NCBI GI: 171685170 Blast Desc: protein product [Podospora anserina] gi|170942546|emb|CAP68197.1| protein product [Podospora anserina]
  misc_feature (104)..(1192): NCBI GI: 261357550 Blast Desc: RNA-dependent RNA polymerase [Verticillium albo-atrum VaMs.102]
  misc_feature (377)..(1382): NCBI GI: 256726565 Blast Desc: NECHADRAFT_39599 [Nectria haematococca mpVI 77-13-4]
  misc_feature (84)..(1382): NCBI GI: 46124253 Blast Desc: FG06504.1 [Gibberella zeae PH-1]
  misc_feature (555)..(1359): NCBI GI: 145609535 Blast Desc: MGG_13453 [Magnaporthe grisea 70-15] gi|145016900|gb|EDK01330.1| MGG_13453 [Magnaporthe grisea 70-15]
  misc_feature (58)..(1373): NCBI GI: 156058730 Blast Desc: SS1G_03377 [Sclerotinia sclerotiorum 1980] gi|154701164|gb|EDO00903.1| SS1G_03377 [Sclerotinia sclerotiorum 1980]
  misc_feature (381)..(1370): NCBI GI: 46117554 Blast Desc: FG04619.1 [Gibberella zeae PH-1]
MNPPTPTNKQKQSRSSHFSNWFLEFSNLYNLNLRKPNSSLTIGEVRALPAHELTYYNRLQHHHARGEINEIHRLFDKGARDIHSKWIKKPRGDPDVTPHYSDLPRATTESERTGLLELLSQVLDLFDRSEPTPPMQLEHEVHEEELTSPSLHRRTKRPSDDWSSHSPSSKKSKNVEADTTSIFSRLDGGQIRAATPLPEAVTPITTSVVPHVEYGLLSSHQSVYERPVSVNTSRSSFVSRVFSEHNILDSHVFPSQNTEVTVEVSSQEKWRRPSPPSLSDIESHGVSSGTEQALVSISGFEASSHQRRARPTASLSEADSLAPSSSTERALVSTFEQSKPRADVSEPSNVVPLDDRYSDLSFDDSHLDVHPIVCDQFPADPESTKFGKRLQGIWPVLPSRLQKAPLAVRWEIMRVALHCDIAMDELHIEWNSSLGKLEKLWEKLRALKIPDGKTLPEETRPDAWRAAMQGDFKSTDEIVVLTASLAYNSSKTGPLFTLRLQPLKLELPHRLDRRFGSDRFIELIMPSLHSKEIARLGKPACDSIHHWLVRVAHIFLGRFWTSFYTKSALPKKVKTDDTLLPETVTIMQERIYLFAEDGNEFELGDSPIAPKSEPSASHTRMGRKDLLDWLLQIPQNQAQSVCKLFSRIALGLSRTRPTVVLEPGQIRHRENDLLAPTGKVMNDGIARMSTALARRIRDILGLDDIPAGYQGRFGCAKGFWIRDTEDTSDEIWIETYPSQRKWNCDYGEEDLRTFEVRSESRELRAAALNLQLLPILEDRAIDQVKMKEQVGIFMKNSLLQEMELQSVAMQDPAQFNLWVYDNAAQRRRQERVKVGYVPFTGGLPVSQEDTMELLLSSGFDPTKLKFLQEMTFKLQQEKCEDLQKKLNIKLGRSTYAYMVIDFLGILAENEIHLGFSSKFTDVQSDFSETYLHGMDVLVARVPAHYPSDIQKVKAVFKPELGSLKDVIIFPSKGDIPLADKLSGGDYDGDIAWVCWEPTIVNNFANADVPESRDLFGDGYLTKMLDTYRDLAILCERTVSSSPKDATTEFLDKAFRFNMQQNLLGMCTNYKEKLCYSRNSVNDDPAIFLSTLISHLVDRAKQGIVFSENSWAKVRKNLNGQQGDPARCRSRLDPLPPQYKNDSWSKIGQPSHIIDYVKFIVGKPTVEQELQKLHKNLDSAVPYDKDLVKFHDFFATLKRPEEERRKNKELGIWKKSTWEVIFDDLKRDIDAVVEEWEKSNTSEISWEAKLANVTKMWKDIAPSRKVNSKTARALREDGLTKVGLSQWDLLKASYAFKIYYRAKSSMLWYIAGYQLCYLKSLYASQAEDIHAPPVLMTPGMYAGVKPDAKYVKSRAGLNNGRRVRANVEDDGEEFEREGSSVDDDV

SEQ ID NO: 34233 - DNA, 896 bp, Muscodor strobelii
  misc_feature: SGI EST ID NO. CUFF.81102.0
  misc_feature: Variant of the nucleotide sequence at SEQ ID NO 34231
ggatgtttcagaaccatccaatgttgtcccgctagatgatcgctactctgacttgagtttcgatgattcacatttggatgtccatcccatagtctgtgaccaattcccagcagatcctgaatcaactaaatttggaaaacgactccagggaatctggcctgtgctcccgtctcgcttgcaaaaggctcctctcgctgttcgctgggagataatgcgcgttgcactgcattgcgacattgctatggatgagttacatattgaatggaactccagtttgggcaaattagagaagctctgggaaaagctgcgggctcttaagatccccgacggcaaaacacttcctgaagagacaaggccagatgcctggcgtgcggcaatgcaaggcgactttaaatctacggacgagatcgtagtattaacagcttctctcgcttataactcatccaagacaggtccgcttttcactcttcgattacagccgctcaagctagaactcccccacagactcgatcgccgatttggatctgatcgttttatcgaattgattatgccatcgttacactccaaagagattgcgaggcttggaaagcctgcctgcgatagcattcatcactggcttgtgcgagttgctcatatattcctaggtcgattctggacgtcgttctacacaaagtcagccttgccaaagaaagtgaaaaccgatgacactttactgcccgagaccgtgactatcatgcaagagaggatatatttgtttgcggaagacgggaatgaatttgagcttggagactccccaatagcacccaagtccgagccgagtgctagtcacacgcggatgggacgcaaggacctactggattggctgctacaaatcccccagaatcaggcgcagtctg

SEQ ID NO: 34234 - DNA, 1980 bp, Muscodor strobelii
  misc_feature: SGI cDNA ID NO. 571828
  misc_feature: Encodes the peptide sequence at SEQ ID NO 34235
atgtcggaacaggacatcgatcaagtccctgtgcaggacttgacgcctgagcaggccagccacatcattcactctcaccggaaggtgcgatatggaactgcttgttggccatgtcgacagcgcaaagtgagatgtaccaacgatctgccatgtgaaaactgcgtcaagagagagcatccacagttgtgcaactataaacccaaccgttcgagtgctaccaagccaggttctttctcaacagggagcaatctggggaagaaacgggcgcattctccagatggaaacaatgaacaacacgctcaggagagagagaaacagcccgaggtctggaggcgagctatcgaagaacctgagtctaacgaactctctcgatatgttggccaaaacagtattcctgcacttttgagagaccagccttcgccaattgagaccaaagaaggagttgatattcgcagggacatgcgtcccatattcggcttggataactcggctccatttccacttatgtccgcgcggcatctcgacatgatgacacaagacatattcgctgagctgcctccggaccgcgaagtcatgattttattcactgcctataaggaaattgctcatcccttttgggggttcgttgccgatattgatgatttggaatctcgaatcatcacttacctggaagagagagccaaatcggctaaagatacaaccaagtcggggcgaccggtatcagcctcatggctcgccattctctttgccgtaatggcggtaggatcccagtaccgtgattctccataccacatcagaacacgagactcccagaaatacatacaaatatcttttcattttctacgaattggcaatttcttgcttcggcctaatctcgactccatccaggccttactactgactgggttcaacttgttaaatgacatgaaggctgaggcctcatgggcgctaattggaatgacatgtcgcctagcgcaatcactcggcctacacagaactgtaaccgcagacgaaagtaacccgagcgaagctaccaaatcgttcatgagacgaaagttgtggtggacctgccagtggcacgacactttgacgtccttatcgttcgatcgcccgaacatgaccaacatcccgtgctgtccccttccagtgtcgcccaatgccaataccgaaggtctctcatatctggagatgatgtatcatttatgtgaacttatatcaaagcgcctcaacccggatgccacagcggactacacctatcagtcaattatggacaattgcgaagctgtcgaagcccttaggggcatggtctatcctcagctccgaagcaaagaagcctgcaagagtgtagtcgacaagttacaacactatgccactcgtctccacacctcctttgtgaaggcactttctgacaaatgcaagaccaacctcacagaaactgttcccgccctgtccgccgccgcagctaaggaacaagacagcccgtcgccggatgaccacatccgaaagacggaccgagatattgagctctcaggcccgttatcaagagcactaactgccctgaagaacatctacgattatggcagtttccatggagtgactggactgaagagcgaatgcgcatctgggacccgcacgccaatcagcttctcaggagcaccaaaccctcccatgtttaatcacctgggacgtccaccatctggacacgacagacatcaagatgcagcgctggccatggctgagctacagaatagtgcccatcttgccgaattccaaaactctatggcataccaaacacccatgggcccgcaggtcggctttcatgatccgaatcagatcgatccatcgacgctcgccccaatggagctgtatgactccatattctgggaatcacccgaccccttctacaccactacggacatgaacttcgatttcttaccccaggcacctcctggacaatcaggccaacagttctatttttga

SEQ ID NO: 34235 - protein, 659 aa, Muscodor strobelii
  misc_feature: SGI Peptide ID NO. 571828
  misc_feature (33)..(73): Pfam Id: PF00172 Pfam Desc: Fungal Zn(2)-Cys(6) binuclear cluster domain
  misc_feature (291)..(385): Pfam Id: PF04082 Pfam Desc: Fungal specific transcription factor domain
  misc_feature (7)..(659): NCBI GI: 46124251 Blast Desc: FG06503.1 [Gibberella zeae PH-1]
  misc_feature (11)..(659): NCBI GI: 171685168 Blast Desc: protein product [Podospora anserina] gi|170942545|emb|CAP68196.1| protein product [Podospora anserina]
  misc_feature (11)..(659): NCBI GI: 261356127 Blast Desc: fungal specific transcription factor domain-containing protein [Verticillium albo-atrum VaMs.102]
  misc_feature (116)..(646): NCBI GI: 116208692 Blast Desc: CHGG_03639 [Chaetomium globosum CBS 148.51] gi|88184236|gb|EAQ91704.1| CHGG_03639 [Chaetomium globosum CBS 148.51]
  misc_feature (14)..(650): NCBI GI: 156048176 Blast Desc: SS1G_08819 [Sclerotinia sclerotiorum 1980] gi|154693216|gb|EDN92954.1| SS1G_08819 [Sclerotinia sclerotiorum 1980]
  misc_feature (115)..(649): NCBI GI: 154302983 Blast Desc: BC1G_09235 [Botryotinia fuckeliana B05.10] gi|150855159|gb|EDN30351.1| BC1G_09235 [Botryotinia fuckeliana B05.10]
  misc_feature (11)..(628): NCBI GI: 164423933 Blast Desc: NCU07535 [Neurospora crassa OR74A] gi|157070294|gb|EAA29812.2| conserved [Neurospora crassa OR74A]
  misc_feature (287)..(645): NCBI GI: 145609533 Blast Desc: MGG_07681 [Magnaporthe grisea 70-15] gi|145016899|gb|EDK01329.1| MGG_07681 [Magnaporthe grisea 70-15]
  misc_feature (13)..(468): NCBI GI: 238497646 Blast Desc: conserved [Aspergillus flavus NRRL3357] gi|220693332|gb|EED49677.1| conserved [Aspergillus flavus NRRL3357]
  misc_feature (18)..(481): NCBI GI: 255947218 Blast Desc: Pc22g03330 [Penicillium chrysogenum Wisconsin 54-1255] gi|211591393|emb|CAP97621.1| Pc22g03330 [Penicillium chrysogenum Wisconsin 54-1255]
MSEQDIDQVPVQDLTPEQASHIIHSHRKVRYGTACWPCRQRKVRCTNDLPCENCVKREHPQLCNYKPNRSSATKPGSFSTGSNLGKKRAHSPDGNNEQHAQEREKQPEVWRRAIEEPESNELSRYVGQNSIPALLRDQPSPIETKEGVDIRRDMRPIFGLDNSAPFPLMSARHLDMMTQDIFAELPPDREVMILFTAYKEIAHPFWGFVADIDDLESRIITYLEERAKSAKDTTKSGRPVSASWLAILFAVMAVGSQYRDSPYHIRTRDSQKYIQISFHFLRIGNFLLRPNLDSIQALLLTGFNLLNDMKAEASWALIGMTCRLAQSLGLHRTVTADESNPSEATKSFMRRKLWWTCQWHDTLTSLSFDRPNMTNIPCCPLPVSPNANTEGLSYLEMMYHLCELISKRLNPDATADYTYQSIMDNCEAVEALRGMVYPQLRSKEACKSVVDKLQHYATRLHTSFVKALSDKCKTNLTETVPALSAAAAKEQDSPSPDDHIRKTDRDIELSGPLSRALTALKNIYDYGSFHGVTGLKSECASGTRTPISFSGAPNPPMFNHLGRPPSGHDRHQDAALAMAELQNSAHLAEFQNSMAYQTPMGPQVGFHDPNQIDPSTLAPMELYDSIFWESPDPFYTTTDMNFDFLPQAPPGQSGQQFYF

SEQ ID NO: 34236 - DNA, 3682 bp, Muscodor strobelii
  misc_feature: SGI EST ID NO. CUFF.81183.0
  misc_feature: Variant of the nucleotide sequence at SEQ ID NO 34234
cttgtatgaacctaccgtacctatgcagccggctgcagtagaaacagacgcggcagatgcagcagatgcagcaggtgacaaaacagggccatggaagctctggaatgaagcaaaaggagatgaaaagggtatcccatctcgcccacatccctcccctgcccggccaattgcgtgcccagctagatgctctcgaaagcttcgattgggttggcgccagggaaaatcggagtcttcggagagttcaaggacttggcgccgaccacccctctcactcgtacagcttcaaccctggctgcagttctgaatctttcccctcatcgacaacgatcagcagcagccgatgagacccgcttacgacgtcgacttgatgaactggtagatcaccgaccaattctagacgcctaccgtcgcagacagacacaagacactcagccttatgctgtggctacactcgatagacttcgatacactctcgttctcatactgggtacgctcgctgcaactgtgccacgctgccacctactatactcttcactctgatctccctcccctcatttccatggtcgcaaggtagctcttattttagctcatcggtgattcggccttgtcaatttacgcagagcccgcatttgcgcaacgcgacacgcaattctagccacatcacgctcacatcgcatcttcacgcatactgcttcattcgctggacccctggcttgtcgccgccttggcttaagttatcaccccttctctgacccgatctccgacgacgcatatcacctcttgcgaatcccatcttggctccatctttcctcgactgccaagcaactttgcccagacatcgcccagacctgtgtgtttggcgaagaagcccattgctgcctttcatgtgctcagcagcagcctgggcattgtcttaccaatgtcggaacaggacatcgatcaagtccctgtgcaggacttgacgcctgagcaggccagccacatcattcactctcaccggaaggtgcgatatggaactgcttgttggccatgtcgacagcgcaaagtgagatgtaccaacgatctgccatgtgaaaactgcgtcaagagagagcatccacagttgtgcaactataaacccaaccgttcgagtgctaccaagccaggttctttctcaacagggagcaatctggggaagaaacgggcgcattctccagatggaaacaatgaacaacacgctcaggagagagagaaacagcccgaggtctggaggcgagctatcgaagaacctgagtctaacgaactctctcgatatgttggccaaaacagtattcctgcacttttgagagaccagccttcgccaattgagaccaaagaaggagttgatattcgcagggacatgcgtcccatattcggcttggataactcggctccatttccacttatgtccgcgcggcatctcgacatgatgacacaagacatattcgctgagctgcctccggaccgcgaagtcatgattttattcactgcctataaggaaattgctcatcccttttgggggttcgttgccgatattgatgatttggaatctcgaatcatcacttacctggaagagagagccaaatcggctaaagatacaaccaagtcggggcgaccggtatcagcctcatggctcgccattctctttgccgtaatggcggtaggatcccagtaccgtgattctccataccacatcagaacacgagactcccagaaatacatacaaatatcttttcattttctacgaattggcaatttcttgcttcggcctaatctcgactccatccaggccttactactgactgggttcaacttgttaaatgacatgaaggctgaggcctcatgggcgctaattggaatgacatgtcgcctagcgcaatcactcggcctacacagaactgtaaccgcagacgaaagtaacccgagcgaagctaccaaatcgttcatgagacgaaagttgtggtggacctgccagtggcacgacactttgacgtccttatcgttcgatcgcccgaacatgaccaacatcccgtgctgtccccttccagtgtcgcccaatgccaataccgaaggtctctcatatctggagatgatgtatcatttatgtgaacttatatcaaagcgcctcaacccggatgccacagcggactacacctatcagtcaattatggacaattgcgaagctgtcgaagcccttaggggcatggtctatcctcagctccgaagcaaagaagcctgcaagagtgtagtcgacaagttacaacactatgccactcgtctccacacctcctttgtggtttcggtttgctgccgaccggctctccgtcgcgattgtactagattgacgctatccgaacagaaggcactttctgacaaatgcaagaccaacctcacagaaactgttcgtatgtttctagcgatgcaccaactgtcatttattccaactcgtagttgggcttttacctatcatggtctttcgtcggcggttcttctaggcatcttaaatgagactaagcaggatcgtgaaataaggcagcttcacggagatttgatagccgccctgtccgccgccgcagctaaggaacaagacagcccgtcgccggatgaccacatccgaaagacggaccgagatattgagctctcaggcccgttatcaagagcactaactgccctgaagaacatctacgattatggcagtttccatggagtgactggactgaagagcgaatgcgcatctgggacccgcacgccaatcagcttctcaggagcaccaaaccctcccatgtttaatcacctgggacgtccaccatctggacacgacagacatcaagatgcagcgctggccatggctgagctacagaatagtgcccatcttgccgaattccaaaactctatggcataccaaacacccatgggcccgcaggtcggctttcatgatccgaatcagatcgatccatcgacgctcgccccaatggagctgtatgactccatattctgggaatcacccgaccccttctacaccactacggacatgaacttcgatttcttaccccaggcacctcctggacaatcaggccaacagttctatttttgaggaatcggtgtctcctactgtagggatatagagaggggccagatataaacgcatggaaatgagtggccttggacaacggtttactcggtcaagcaatgaatttaatgacaaccttacgaacagacacggtaggataggaaaattgggttaggcgacctcggagttctggctgttcttccttccacgatccgtttgactcgtgatccttgatggctatcgagcattcggattttcgcagtcatgtccgttacgacatacatgactcaatactgctattaaattgtatagtacgccacaacaatcttgtggccacggcttgtctatatcccggatattggagacggccatattgaacatgtattatagcgaaatctaaaatcggtaatttgatataactgaagatacgtgatgactgtccgctacgctgtcccctccttctcgccacccggttgatgggtagcctcggcctcagcttttctaagctgtctgtgttgggtcgtcaagtacgacaagcctgcagtccaaatcgccaaggcaatcgagacagctatcatggcatacatccctctc

SEQ ID NO: 34237 - DNA, 1428 bp, Muscodor strobelii
  misc_feature: SGI cDNA ID NO. 571829
  misc_feature: Encodes the peptide sequence at SEQ ID NO 34238
atggcgtttggaacgagaatacgggagtactttcacaatgagtatcaaccgggcgagaaaaacctcgtgcgtaaaatcgacttcttcattctgaccttttgctgtttgagttattttacaaactacctcgaccgctcaaatttcgccaacgcatacgtaagcgggatgaaagaagacctggggttcgttggcgaccaattcaatcaagtgaacgctgccttcacatcaggctatgtcgtaggccagatcccggcgaacctctcactacactacatcagaccgcgtatcttcttcccggcctgtatggtagtgtgggctggcttgacgatggtgacggcggctacgcacaacccgcaaggcgtggccgcgatccgattcttccagggtatcgctgaggctactaccttcgttggcacgcattatatcttggggtcttggtataccgaacgcgaactgggtaaacgaagcggcatcttcacggcgagtgggttggcgggcaccttgatcggtggttatatccaaactggaatcaatcagagcctaaatggacgaaatggacttgccggttggcgttggttgttcatcatcgacggtataatcaccctgcctatcgctatatacggattcttcctgttcccagacacgccctcaactactaaagcgccttatctctcatcttctgagaagacccttgctcaatcgcgagtacctccagtattagacaaatcgcctctgacactatcattcctctggcgcgttgctacttcgaaaattttctggggcttcgtagtcctatggatcatcgctggcgagaccgagtccttcagctcgaactcacttttatcgttgtacatgaagtcacatccagtgcatagctactccgtctcgcaactcaatactctcccgacgggtgtaccggccgctggtattgtctctacgatctttttcgcaacaattaccgactttctgaatggcaaacgctggattgtcgggtatttcattgccttcacaggtgttacgacttctgctttgatcttatcagcggcaaatgatccgacgagcgagcagagcactaggactgtttttggaagttattattgggcaggtgctgtctacgcatgtcaagcaacattctttgcttgggctaatgatgcacttcgatacgaagatcacatgttccgtgcagtgactctggcggggatgaatttgggaagcaatgtcatcaacgcatggtggagtattgtattctatggtgcgagcatggcgccgtggttccgaagagggatgtatgccatgatagctgtctcgattgccttggcgatttggactgcaggcttgtcgtacttgacgacccaacacagacagcttagaaaagctgaggccgaggctacccatcaaccgggtggcgagaaggaggggacagcgtag

SEQ ID NO: 34238 - protein, 475 aa, Muscodor strobelii
  misc_feature: SGI Peptide ID NO. 571829
  misc_feature (34)..(413): Pfam Id: PF07690 Pfam Desc: Major Facilitator Superfamily
  misc_feature (6)..(471): NCBI GI: 256722472 Blast Desc: NECHADRAFT_35064 [Nectria haematococca mpVI 77-13-4]
  misc_feature (5)..(475): NCBI GI: 256731850 Blast Desc: [Nectria haematococca mpVI 77-13-4]
  misc_feature (5)..(458): NCBI GI: 116197236 Blast Desc: CHGG_05216 [Chaetomium globosum CBS 148.51] gi|88181129|gb|EAQ88597.1| CHGG_05216 [Chaetomium globosum CBS 148.51]
  misc_feature (5)..(466): NCBI GI: 46137603 Blast Desc: FG10317.1 [Gibberella zeae PH-1]
  misc_feature (4)..(464): NCBI GI: 240106593 Blast Desc: Major Facilitator Superfamily protein [Coccidioides posadasii C735 delta SOWgp]
  misc_feature (9)..(464): NCBI GI: 119185252 Blast Desc: CIMG_07332 [Coccidioides immitis RS]
  misc_feature (14)..(460): NCBI GI: 226280046 Blast Desc: pantothenate transporter liz1 [Paracoccidioides brasiliensis Pb01]
  misc_feature (6)..(471): NCBI GI: 225682133 Blast Desc: pantothenate transporter liz1 [Paracoccidioides brasiliensis Pb03]
  misc_feature (6)..(471): NCBI GI: 226289317 Blast Desc: pantothenate transporter FEN2 [Paracoccidioides brasiliensis Pb18]
  misc_feature (14)..(460): NCBI GI: 240278513 Blast Desc: pantothenate transporter [Ajellomyces capsulatus H143]
MAFGTRIREYFHNEYQPGEKNLVRKIDFFILTFCCLSYFTNYLDRSNFANAYVSGMKEDLGFVGDQFNQVNAAFTSGYVVGQIPANLSLHYIRPRIFFPACMVVWAGLTMVTAATHNPQGVAAIRFFQGIAEATTFVGTHYILGSWYTERELGKRSGIFTASGLAGTLIGGYIQTGINQSLNGRNGLAGWRWLFIIDGIITLPIAIYGFFLFPDTPSTTKAPYLSSSEKTLAQSRVPPVLDKSPLTLSFLWRVATSKIFWGFVVLWIIAGETESFSSNSLLSLYMKSHPVHSYSVSQLNTLPTGVPAAGIVSTIFFATITDFLNGKRWIVGYFIAFTGVTTSALILSAANDPTSEQSTRTVFGSYYWAGAVYACQATFFAWANDALRYEDHMFRAVTLAGMNLGSNVINAWWSIVFYGASMAPWFRRGMYAMIAVSIALAIWTAGLSYLTTQHRQLRKAEAEATHQPGGEKEGTA

SEQ ID NO: 34239 - DNA, 3172 bp, Muscodor strobelii
  misc_feature: SGI EST ID NO. CUFF.81184.1
  misc_feature: Variant of the nucleotide sequence at SEQ ID NO 34237
ggacttgccggttggcgttggttgttcatcatcgacggtataatcaccctgcctatcgctatatacggattcttcctgttcccagacacgccctcaactactaaagcgccttatctctcatcttctgagaagacccttgctcaatcgcgagtacctccagtattagacaaatcgcctctgacactatcattcctctggcgcgttgctacttcgaaaattttctggggcttcgtagtcctatggatcatcgctggcgagaccgagtccttcagctcgaactcacttttatcgttgtacatgaagtcacatccagtgcatagctactccgtctcgcaactcaatactctcccgacgggtgtaccggccgctggtattgtctctacgatctttttcgcaacaattaccgactttctgaatggcaaacgctggattgtcgggtatttcattgccttcacaggtgttacgacttctgctttgatcttatcagcggcaaatgatccgacgagcgagcagagcactaggactgtttttggaagttattattgggcaggtgctgtctacgcatgtcaagcaacattctttgcttgggctaatgatgcacttcgatacgaagatcacatgttccgtgcagtgactctggcggggatgaatttgggaagcaatgtcatcaacgcatggtggagtattgtattctatggtgcgagcatggcgccgtggttccgaagagggatgtatgccatgatagctgtctcgattgccttggcgatttggactgcaggcttgtcgtacttgacgacccaacacagacagcttagaaaagctgaggccgaggctacccatcaaccgggtggcgagaaggaggggacagcgtagcggacagtcatcacgtatcttcagttatatcaaattaccgattttagatttcgctataatacatgttcaatatggccgtctccaatatccgggatatagacaagccgtggccacaagattgttgtggcgtactatacaatttaatagcagtattgagtcatgtatgtcgtaacggacatgactgcgaaaatccgaatgctcgatagccatcaaggatcacgagtcaaacggatcgtggaaggaagaacagccagaactccgaggtcgcctaacccaattttcctatcctaccgtgtctgttcgtaaggttgtcattaaattcattgcttgaccgagtaaaccgttgtccaaggccactcatttccatgcgtttatatctggcccctctctatatccctacagtaggagacaccgattcctcaaaaatagaactgttggcctgattgtccaggaggtgcctggggtaagaaatcgaagttcatgtccgtagtggtgtagaaggggtcgggtgattctgaaggcgttaacaagatgtgtcggtagacaaacgagggaatcaactcaccccagaatatggagtcatacagctccattggggcgagcgtcgatggatcgatctgattcggatcatgaaagccgacctgcgggcccatgggtgtttggtatgccatagagctgtcaaacatggtgtcaggggcacagcgaggaatcttgtttgctagattgactaacttttggaattcggcaagatgggcactattctgtagctcagccatggccagcgctgcatcttgatgtctgtcgtgtccagatggtggacgtcccaggtgattaaacatgggagggtttggtgctcctgagaagctgattggcgtgcgggtcccagatgcgcattcgctcttcagtccagtcactccatggaaactgccataatcgtagatgttcttcagggcagttagtgctcttgataacgggcctgagagctcaatatctcggtccgtctttcggatgtggtcatccggcgacgggctgtcttgttccttagctgcggcggcggacagggcggctatcaaatctccgtgaagctgccttatttcacgatcctgcttagtctcatttaagatgcctagaagaaccgccgacgaaagaccatgataggtaaaagcccaactacgagttggaataaatgacagttggtgcatcgctagaaacatacgaacagtttctgtgaggttggtcttgcatttgtcagaaagtgccttctgttcggatagcgtcaatctagtacaatcgcgacggagagccggtcggcagcaaaccgaaaccacaaaggaggtgtggagacgagtggcatagtgttgtaacttgtcgactacactcttgcaggcttctttgcttcggagctgaggatagaccatgcccctaagggcttcgacagcttcgcaattgtccataattgactgataggtgtagtccgctgtggcatccgggttgaggcgctttgatataagttcacataaatgatacatcatctccagatatgagagaccttcggtattggcattgggcgacactggaaggggacagcacgggatgttggtcatgttcgggctgcaatatgtcggtcagtatcgtctgcctagtgtagtctagactttcattcgagaacactaaccgatcgaacgataaggacgtcaaagtgtcgtgccactggcaggtccacctatgagagttgttagagtctacagttctcttctcgctgtattgaacataccacaactttcgtctcatgaacgatttggtagcttcgctcgggttactttcgtctgcggttacagttctgtgtaggccgagtgattgcgctaggcgacatgtcattccaattagcgcccatgaggcctcagccttcatgtcatttaacaagttgaacccagtcagtagtaaggcctggatggagtcgagattaggcctttggcgacgtcagcaatatggagccatctcagtacaagaagacgcaccgaagcaagaaattgccaattcgtagaaaatgaaaagatatttgtatgtatttctgggagtctcgtgttctgatgtggtatggagaatcacggtactgggatcctaccgccattacggcaaagagaatggcgagccatgaggctgataccggtcgccccgacttggttgtatctttagccgatttggctctctcttccaggtaagtgatgattcgagattccaaatcatcaatatcggcaacgaacccccaaaagggatgagcaatttccttataggcagt

SEQ ID NO: 34240 - DNA, 1629 bp, Muscodor strobelii
  misc_feature: SGI cDNA ID NO. 571830
  misc_feature: Elevated expression when VOC is produced
  misc_feature: Encodes the peptide sequence at SEQ ID NO 34241
atgggaaactgggacaagctcgccgcaagaaagcgccaagatctactaaactccatacccgaagagtggcgtattcccgaacatctactcccgtccgaaacacaaaatgatgtcacaacgtttccggagacttctggctggttcactgaagaagagctggccatcacaagcttaagcgccgtagagctcattccgcgactccagagcggcgagctcaagtctgagaccgttacccgggctttttgcaaacgagccgccgcagcgcatcagctaaccaaatgtctttctgaaacatgttttgctcgcgcgatagcaactgcgaggagtctcgatgagcatctagcccgcgtggggaaacccatcgggcctttacatggaatcccaatttcgctcaaggacaatttcaatctcaagggcctagattccacggtaggctttactgctcacataggagatccggcgaaagcagatgcagagcttgcggacatactccgggcagctggggctgtcttctacgtcaagacgaacgtacccacggccatgatgatagctgagacggttaacaatactttcgagcgtactgtcaacccgttgaacaggaagttgacgagtggtggcagttctggcggcgagtctgccttaatcgcattcaagggaagtccgtggggtgtcggaacggatatcggtggatctctgagaataccagctgcatgcaccggtttgttcacgttgcggccttcttttgggcggttcccaacgatgggttgtcgatcggggttgcccgggcaggaagccgtgcagtctgttaacggaccactcacacgcaaccttgcggatcttgatttctattgtaggacagtcgttgaggcagagccgtggctcgtagatccgagatgtataccgctatcttggcgcagtgtcactctgccctctaagttgacgattgcagtcatgtggggtgacggcattgccttaccaactccccctgtaacaagagctttacgccatacagtgcagaggctgaaagctgcgggtcataagatcattgactggtctgcacaggatcaatcagaaggtcttgagctgctcaatcgcatgtttcttgccggaggtagcaagtcaatctcgaaagaacttgataagaccggcgagccctggagacacgagatgactgcttacgccgaagcgcgggaattaggcgccctggaatattggcagctgcacttagatcgtcaagcgtaccagaagcgatatctaaaacgatggcttgaagctgacattgatgcgatactttgccccacgacaccctacagtaccgtcgagaacggaaaattcaggcatgttggatatacaggcgtgtacaatgttttggactatgcagccatgtcgtttcccaccggagttacggtagaccagaccgtcgacctagcacagccggacagctatcagccgctctcggagatagaccgaacgatacaacgcgagtacaatgcctctgcggttcatggaatgcccgtcagtcttcagctagtagcgcaaagactagaagaggagaaatgcatagagatgtgcaagctggtgttagaagcattgaacaacgagtcgtacaatgtacctgcgaagttatga

SEQ ID NO: 34241 - protein, 542 aa, Muscodor strobelii
  misc_feature: SGI Peptide ID NO. 571830
  misc_feature (76)..(521): Pfam Id: PF01425 Pfam Desc: Amidase
  misc_feature (3)..(531): NCBI GI: 46137605 Blast Desc: FG10318.1 [Gibberella zeae PH-1]
  misc_feature (2)..(531): NCBI GI: 240106592 Blast Desc: Amidase family protein [Coccidioides posadasii C735 delta SOWgp]
  misc_feature (3)..(534): NCBI GI: 115399508 Blast Desc: conserved [Aspergillus terreus NIH2624] gi|114192226|gb|EAU33926.1| conserved [Aspergillus terreus NIH2624]
  misc_feature (2)..(533): NCBI GI: 189197057 Blast Desc: acetamidase [Pyrenophora tritici-repentis Pt-1C-BFP] gi|187980814|gb|EDU47440.1| acetamidase [Pyrenophora tritici-repentis Pt-1C-BFP]
  misc_feature (4)..(537): NCBI GI: 239607503 Blast Desc: fatty-acid amide hydrolase [Ajellomyces dermatitidis ER-3]
  misc_feature (4)..(537): NCBI GI: 261200293 Blast Desc: fatty-acid amide hydrolase [Ajellomyces dermatitidis SLH14081] gi|239593619|gb|EEQ76200.1| fatty-acid amide hydrolase [Ajellomyces dermatitidis SLH14081]
  misc_feature (3)..(535): NCBI GI: 225682131 Blast Desc: glutamyl-tRNA(Gln) amidotransferase subunit A [Paracoccidioides brasiliensis Pb03]
  misc_feature (7)..(531): NCBI GI: 258564712 Blast Desc: conserved [Uncinocarpus reesii 1704] gi|237908608|gb|EEP83009.1| conserved [Uncinocarpus reesii 1704]
  misc_feature (3)..(535): NCBI GI: 226289314 Blast Desc: acetamidase [Paracoccidioides brasiliensis Pb18]
  misc_feature (2)..(531): NCBI GI: 119185250 Blast Desc: CIMG_07331 [Coccidioides immitis RS]
  misc_feature (3)..(533): SWISSPROT Homolog: EC 3.5.1.4 Amidase
  misc_feature: Useful for introducing or modulating the production of volatile compounds
MGNWDKLAARKRQDLLNSIPEEWRIPEHLLPSETQNDVTTFPETSGWFTEEELAITSLSAVELIPRLQSGELKSETVTRAFCKRAAAAHQLTKCLSETCFARAIATARSLDEHLARVGKPIGPLHGIPISLKDNFNLKGLDSTVGFTAHIGDPAKADAELADILRAAGAVFYVKTNVPTAMMIAETVNNTFERTVNPLNRKLTSGGSSGGESALIAFKGSPWGVGTDIGGSLRIPAACTGLFTLRPSFGRFPTMGCRSGLPGQEAVQSVNGPLTRNLADLDFYCRTVVEAEPWLVDPRCIPLSWRSVTLPSKLTIAVMWGDGIALPTPPVTRALRHTVQRLKAAGHKIIDWSAQDQSEGLELLNRMFLAGGSKSISKELDKTGEPWRHEMTAYAEARELGALEYWQLHLDRQAYQKRYLKRWLEADIDAILCPTTPYSTVENGKFRHVGYTGVYNVLDYAAMSFPTGVTVDQTVDLAQPDSYQPLSEIDRTIQREYNASAVHGMPVSLQLVAQRLEEEKCIEMCKLVLEALNNESYNVPAKL

SEQ ID NO: 34242 - DNA, 2514 bp, Muscodor strobelii
  misc_feature: SGI EST ID NO. CUFF.81134.0
  misc_feature: Variant of the nucleotide sequence at SEQ ID NO 34240
ctaaatcacactcttccaagatgcgaaatgctgttcacatgcaactaactactctttatatcctgtgatgggctgcaaaccatattacgacctctcaagatttgtcactagcgcatatggcgcccagacttactggccggttcgcacgcccaaacgcggggctctgtacagagcgactctggatatcgtcatcccgatctcccagggactctgctactgatcatatctgattagcgcgaacagaatatggaattcggaagttgtaaagcgattattccccctcttgcttgcaatttttgatattgtaatagttcgtccaatataccttttgctaagaaatccttaccatgggaaactgggacaagctcgccgcaagaaagcgccaagatctactaaactccatacccgaagagtggcgtattcccgaacatctactcccgtccgaaacacaaaatgatgtcacaacgtttccggagacttctggctggttcactgaagaagagctggccatcacaagcttaagcgccgtagagctcattccgcgactccagagcggcgagctcaagtctgagaccgttacccgggctttttgcaaacgagccgccgcagcgcatcagctaaccaaatgtctttctgaaacatgttttgctcgcgcgatagcaactgcgaggagtctcgatgagcatctagcccgcgtggggaaacccatcgggcctttacatggaatcccaatttcgctcaaggacaatttcaatctcaagggcctagattccacggtaggctttactgctcacataggagatccggcgaaagcagatgcagagcttgcggacatactccgggcagctggggctgtcttctacgtcaagacgaacgtacccacggccatgatgatagctgagacggttaacaatactttcgagcgtactgtcaacccgttgaacaggaagttgacgagtggtggcagttctggcggcgagtctgccttaatcgcattcaagggaagtccgtggggtgtcggaacggatatcggtggatctctgagaataccagctgcatgcaccggtttgttcacgttgcggccttcttttgggcggttcccaacgatgggttgtcgatcggggttgcccgggcaggaagccgtgcagtctgttaacggaccactcacacgcaaccttgcggatcttgatttctattgtaggacagtcgttgaggcagagccgtggctcgtagatccgagatgtataccgctatcttggcgcagtgtcactctgccctctaagttgacgattgcagtcatgtggggtgacggcattgccttaccaactccccctgtaacaagagctttacgccatacagtgcagaggctgaaagctgcgggtcataagatcattgactggtctgcacaggatcaatcagaaggtcttgagctgctcaatcgcatgtttcttgccggaggtagcaagtcaatctcgaaagaacttgataagaccggcgagccctggagacacgagatgactgcttacgccgaagcgcgggaattaggcgccctggaatattggcagctgcacttagatcgtcaagcgtaccagaagcgatatctaaaacgatggcttgaagctgacattgatgcgatactttgccccacgacaccctacagtaccgtcgagaacggaaaattcaggcatgttggatatacaggcgtgtacaatgttttggactatgcagccatgtcgtttcccaccggagttacggtagaccagaccgtcgacctagcacagccggacagctatcagccgctctcggagatagaccgaacgatacaacgcgagtacaatgcctctgcggttcatggaatgcccgtcagtcttcagctagtagcgcaaagactagaagaggagaaatgcatagagatgtgcaagctggtgttagaagcattgaacaacgagtcgtacaatgtacctgcgaagttatgagcagtctattgtcctttacgcagatcggactgacgcactccccagactgaactgttcaattgtttgttgaggccagcgatgttgtcgccgcctattagcttgaagagcgtgccgccacccccattggtcaactgtttgaaaagattccaggttgggccgacgaggaccatcaactgaatggatatttcatttgaaaaagctaagcgaagatagtcgaacctctagctaggctctatacatgcagattgagctatcacaagtcatgttgcgtgcactcccttccctagtgtgctcttgtgcggctcggggaaactaccggatgatcaagcataagtgtagcagaagggcccgtccgtgatgctgactaactcactgattttataaggctttgccgcgactgaatagaggttgactacatcattcagcgtcgccgcggtcccaatacccatcatggatgtaccgccagaaatgacttgcaaacggtttggaagatcctgagcctgccaaatagtccatgtccgatcaatctgggcatggt

SEQ ID NO: 34243 - DNA, 1164 bp, Muscodor strobelii
  misc_feature: SGI cDNA ID NO. 571831
  misc_feature: Reduced expression when VOC is produced
  misc_feature: Encodes the peptide sequence at SEQ ID NO 34244
atgccaagcatcactaagttcgtgtgcctttgcacaaaaattctcttgctagcgagttctgcatacgcagatgccacatcggatttatgggataaggggaaaccagctctagatgcgcagctcgccaagtcgaccacatgtacccaagataaactacaggtacgacgggaatggggcgacataagtgcggatgagaaaaaagcttatatcaaggctgtgctgtgcttgactaccagcccttcaaaactcgacgcaacgcgatacccaggggcaaaaacccggtatgatgattttgtggcagttcacatcaatcaaacattgagtattcatgggacagtaagttgtatccataagaccatggtggtccaatctattactaagaattgtcagggaaacttcttgtcgtggcatcggtattttacttgggcttacgagcaaatacttcgtaatgagtgcgggtacaacggtacccaaccgtattgggattgggggagatggtcagcggatcccgaaaagtccccgatcttcgatgggagtgacacgagcatgagcggcaatggcgagaaagttgcacactcgtcatatatagtgccagcggggaatgggggaggctgtctcacatctggcccattcaagaacatgagcgttaatcttggcccaatgagcccagcgatttcgcccgcacctccgagcaacccccgaacagatgggatgggatacaatccccggtgcattcgtcgtgacgtctcgaactatttgtcgtcgcgatacacaagaccacaagatattgccagtctcgtcactaatagcaagaatatcggcacgttccagacaaccatgcaagcggcgggtaatcccattggcgtccatgttggtggccactataccattgctggcgatccgggcggcgatttctacgtgtctcctggtgatcctgcattttggttacaccatgcccagattgatcggacatggactatttggcaggctcaggatcttccaaaccgtttgcaagtcatttctggcggtacatccatgatgggtattgggaccgcggcgacgctgaatgatgtagtcaacctctattcagtcgcggcaaagccttataaaatcagtgagttagtcagcatcacggacgggcccttctgctacacttatgcttga

SEQ ID NO: 34244 - protein, 387 aa, Muscodor strobelii
  misc_feature: SGI Peptide ID NO. 571831
  misc_feature (46)..(376): Pfam Id: PF00264 Pfam Desc: Common central domain of tyrosinase
  misc_feature (285)..(330): Pfam Id: PF00264 Pfam Desc: Common central domain of tyrosinase
  misc_feature (10)..(386): NCBI GI: 116192839 Blast Desc: CHGG_06137 [Chaetomium globosum CBS 148.51] gi|88182050|gb|EAQ89518.1| CHGG_06137 [Chaetomium globosum CBS 148.51]
  misc_feature (1)..(386): NCBI GI: 171684165 Blast Desc: protein product [Podospora anserina] gi|170942043|emb|CAP67695.1| protein product [Podospora anserina]
  misc_feature (18)..(386): NCBI GI: 149209233 Blast Desc: MGCH7_ch7g109 [Magnaporthe grisea 70-15] gi|86196064|gb|EAQ70702.1| MGCH7_ch7g109 [Magnaporthe grisea 70-15]
  misc_feature (63)..(386): NCBI GI: 169620991 Blast Desc: SNOG_13698 [Phaeosphaeria nodorum SN15] gi|160704148|gb|EAT78722.2| SNOG_13698 [Phaeosphaeria nodorum SN15]
  misc_feature (1)..(386): NCBI GI: 85091931 Blast Desc: NCU09199 [Neurospora crassa OR74A] gi|28920544|gb|EAA29907.1| [Neurospora crassa OR74A] gi|29150091|emb|CAD79652.1| [Neurospora crassa]
  misc_feature (23)..(386): NCBI GI: 189209618 Blast Desc: conserved [Pyrenophora tritici-repentis Pt-1C-BFP] gi|187977234|gb|EDU43860.1| conserved [Pyrenophora tritici-repentis Pt-1C-BFP]
  misc_feature (6)..(386): NCBI GI: 119473731 Blast Desc: tyrosinase, [Neosartorya fischeri NRRL 181] gi|119406894|gb|EAW16844.1| tyrosinase, [Neosartorya fischeri NRRL 181]
  misc_feature (6)..(386): NCBI GI: 70985845 Blast Desc: tyrosinase [Aspergillus fumigatus Af293] gi|66846057|gb|EAL86390.1| tyrosinase, [Aspergillus fumigatus Af293] gi|159128437|gb|EDP53552.1| tyrosinase, [Aspergillus
  misc_feature (7)..(386): NCBI GI: 225683024 Blast Desc: conserved [Paracoccidioides brasiliensis Pb03]
  misc_feature (44)..(386): NCBI GI: 121712421 Blast Desc: tyrosinase, [Aspergillus clavatus NRRL 1] gi|119401974|gb|EAW12396.1| tyrosinase, [Aspergillus clavatus NRRL 1]
  misc_feature (52)..(386): SWISSPROT Homolog: EC 1.14.18.1 Monophenol monooxygenase
  misc_feature: Useful for introducing or modulating the production of volatile compounds
MPSITKFVCLCTKILLLASSAYADATSDLWDKGKPALDAQLAKSTTCTQDKLQVRREWGDISADEKKAYIKAVLCLTTSPSKLDATRYPGAKTRYDDFVAVHINQTLSIHGTVSCIHKTMVVQSITKNCQGNFLSWHRYFTWAYEQILRNECGYNGTQPYWDWGRWSADPEKSPIFDGSDTSMSGNGEKVAHSSYIVPAGNGGGCLTSGPFKNMSVNLGPMSPAISPAPPSNPRTDGMGYNPRCIRRDVSNYLSSRYTRPQDIASLVTNSKNIGTFQTTMQAAGNPIGVHVGGHYTIAGDPGGDFYVSPGDPAFWLHHAQIDRTWTIWQAQDLPNRLQVISGGTSMMGIGTAATLNDVVNLYSVAAKPYKISELVSITDGPFCYTYA

SEQ ID NO: 34245 - DNA, 3112 bp, Muscodor strobelii
  misc_feature: SGI EST ID NO. CUFF.81135.1
  misc_feature: Variant of the nucleotide sequence at SEQ ID NO 34243
ggaatgggggaggctgtctcacatctggcccattcaagaagttcgttctctaaaaaaatcctgtttactttctcggctgatagagactcctccagcatgagcgttaatcttggcccaatgagcccagcgatttcgcccgcacctccgagcaacccccgaacagatgggatgggatacaatccccggtgcattcgtcgtgacgtctcgaactatttgtcgtcgcgatacacaagaccacaagatattgccagtctcgtcactaatagcaagaatatcggcacgttccagacaaccatgcaagcggcgggtaatcccattggcgtccatgttggtggccactataccattgctggcgatccgggcggcgatttctacgtgtctcctggtgatcctgcattttggttacaccatgcccagattgatcggacatggactatttggcaggctcaggatcttccaaaccgtttgcaagtcatttctggcggtacatccatgatgggtattgggaccgcggcgacgctgaatgatgtagtcaacctctattcagtcgcggcaaagccttataaaatcagtgagttagtcagcatcacggacgggcccttctgctacacttatgcttgatcatccggtagtttccccgagccgcacaagagcacactagggaagggagtgcacgcaacatgacttgtgatagctcaatctgcatgtatagagcctagctagaggttcgactatcttcgcttagctttttcaaatgaaatatccattcagttgatggtcctcgtcggcccaacctggaatcttttcaaacagttgaccaatgggggtggcggcacgctcttcaagctaataggcggcgacaacatcgctggcctcaacaaacaattgaacagttcagtctggggagtgcgtcagtccgatctgcgtaaaggacaatagactgctcataacttcgcaggtacattgtacgactcgttgttcaatgcttctaacaccagcttgcacatctctatgcatttctcctcttctagtctttgcgctactagctgaagactgacgggcattccatgaaccgcagaggcattgtctagggataatggttagatggttgaatatcataaaatagcgcagtggagggcgactcacactcgcgttgtatcgttcggtctatctccgagagcggctgatagctgtccggctgtgctaggtcgacggtctggtctaccgtaactccggtgggaaacgacatggctgcatagtccaaaacattgtacacgcctgtatatccaactggagcgagcattagtattactgtgcgtctgctatggcatgttgattgtacgaatggatacataccatgcctgaattttccgttctcgacggtactgtagggtgtcgtggggcaaagtatcgcatcaatgtcagcttcaagccatcgttttagatatcgcttctggtacgcttgacgatctaagtgcagctgccaatattccagggcgcctaattcccgcgcttcggcgtaagcagtcatctcgtgtctccagggctcgccggtcttatcaagttctttcgagattgacttgctacctccggcaagaaacatgcgattgagcagctcaagaccttctgattgatcctgtgcagaccagtcaatgatcttatgacccgcagctttcagcctctgcactgtatggcgtaaagctcttgttacagggggagttggtaaggcaatgccgtcaccccacatgactgcaatcgtcaacttagagggcagagtgacactgcgccaagatagcggtatacatctcggatctacgagccacggctctgcctcaacgactgtcctacaatagaaatcaagatccgcaaggttgcgtgtgagtggtccgttaacagactgcacggcttcctgcccgggcaaccccgatcgacaacccatcgttgggaaccgcccaaaagaaggccgcaacgtgaacaaaccggtgcatgcagctggtattctcagagatccaccgatatccgttccgacaccccacggacttcccttgaatgcgattaaggcagactcgccgccagaactgccaccactcgtcaacttcctgttcaacgggttgacagtacgctcgaaagtattgttaaccgtctcagctatcatcatggccgtgggtacgttcgtcttgacgtagaagacagccccagctgcccggagtatgtccgcaagctctgcatctgctttcgccggatctcctatgtgagcagtaaagcctaccgtggaatctaggcccttgagattgaaattgtccttgagcgaaattgggattccatgtaaaggcccgatgggtttccccacgcgggctagatgctcatcgagactcctcgcagttgctatcgcgcgagcaaaacatgtttcagaaagacatttggtctatcgcatgagtgagtgagccatgttcatttttgtgtacacgtacgacaacgatacataaactcactagctgatgcgctgcggcggctcgtttgcaaaaagcccgggtaacggtctcagacttgagctcgccgctctggagtcgcggaatgagctctacggcgcttaagcttgtgatggccagctcttcttcagtgaaccagccagaagtctccggaaacgttgtgacatcattttgtgtttcggacgggagtagatgttcgggaatacgccactcttcgggtatggagtttagtagatcttggcgctttcttgcggcgagcttgtcccagtttcccatggtaaggatttcttagcaaaaggtatattggacgaactattacaatatcaaaaattgcaagcaagagggggaataatcgctttacaacttccgaattccatattctgttcgcgctaatcagatatgatcagtagcagagtccctgggagatcgggatgacgatatccagagtcgctctgtacagagccccgcgtttgggcgtgcgaaccggccagtaagtctgggcgccatatgcgctagtgacaaatcttgagaggtcgtaatatggtttgcagcccatcacaggatataaagagtagttagttgcatgtgaacagcatttcgcatcttggaagagtgtgatttag

SEQ ID NO: 34246 - DNA, 1119 bp, Muscodor strobelii
  misc_feature: SGI cDNA ID NO. 571832
  misc_feature: Encodes the peptide sequence at SEQ ID NO 34247
atggcgccgcgcctgcgcctcccaggtctgacagagcgtctgaagggactaccagcacccgttatatacatcataacactgttaattatagtgaacgggatagtctgggctgctgccggtgttgttctgcacttctatccctccctcgtgggagcagccgtgctttcttacacactcggcctgcgacacgcgctggatgcggatcacatcagcgcgattgatttaatgacccgaagactcattgcgagtggtcaacgtccagtgacagtcggtacatttttcagcctgggacactccacaatcgtgattattacctgcattgtggttgctgccacgtctggtgcattgagggagaaatttgatggatttgcgcgcgtgggaaatataataggcactagtgtcagtgccgcagtgcttctacttctttgcgcgggaaatggctgggtgctgtataagctcgttgggaggctacgcatgttactgcaagagtccaatttccagtaccggggaggagatgacaatggagacgacgctgcaagagaactccaattagacggtgtcgggtttatgtcgaatgtcctccggaagctattccgcattgttaacaaaccctggaagatgtatcctcttggtgtcttatttggactcggcttcgacacgagctcagaaattgcggtattgggtattgccagtgtccaaggcgcgcaagggacgagtctttgggttattttaatatttccggcacttttcactgctggaatgtgtctcgtcgacacgactgacggcgctctcatgatggcactctatacctcaaaagcgtttgcgcgggataaagttgctatactctactactcgatcgttctcactggcattacagtggtggtttctgccttcatcggcatcgtccagattctctccctagtgcagaacgtagcagatccccaaggaagattctgggatggtctgagtgccattagtgacaattttgaaattgtcggtgctagtattattggcgttttcatattcgcgggtgtaggatccgttttagtatatgctccctggcgacgaagaatggaaagacgggtgtctttggaagatgaatcccatgacgaggcataa

SEQ ID NO: 34247 - protein, 372 aa, Muscodor strobelii
  misc_feature: SGI Peptide ID NO. 571832
  misc_feature (49)..(350): Pfam Id: PF03824 Pfam Desc: High-affinity nickel-transport protein
  misc_feature (4)..(372): NCBI GI: 46124271 Blast Desc: FG06513.1 [Gibberella zeae PH-1]
  misc_feature (14)..(351): NCBI GI: 256726426 Blast Desc: [Nectria haematococca mpVI 77-13-4]
  misc_feature (14)..(363): NCBI GI: 171685454 Blast Desc: protein product [Podospora anserina] gi|170942688|emb|CAP68341.1| protein product [Podospora anserina]
  misc_feature (17)..(362): NCBI GI: 85092278 Blast Desc: NCU08225 [Neurospora crassa OR74A] gi|28920719|gb|EAA30079.1| NCU08225 [Neurospora crassa OR74A]
  misc_feature (14)..(365): NCBI GI: 261353983 Blast Desc: high-affinity nickel transport protein nic1 [Verticillium albo-atrum VaMs.102]
  misc_feature (4)..(351): NCBI GI: 39941184 Blast Desc: MGG_05503 [Magnaporthe grisea 70-15] gi|145022172|gb|EDK06192.1| MGG_05503 [Magnaporthe grisea 70-15]
  misc_feature (14)..(371): NCBI GI: 189207416 Blast Desc: high affinity nickel transport protein nic1 [Pyrenophora tritici-repentis Pt-1C-BFP] gi|187976135|gb|EDU42761.1| high affinity nickel transport nic1
  misc_feature (14)..(354): NCBI GI: 169619185 Blast Desc: SNOG_12787 [Phaeosphaeria nodorum SN15] gi|111058467|gb|EAT79587.1| SNOG_12787 [Phaeosphaeria nodorum SN15]
  misc_feature (6)..(361): NCBI GI: 145246534 Blast Desc: An12g04470 [Aspergillus niger] gi|134080234|emb|CAK97137.1| protein product [Aspergillus niger]
  misc_feature (6)..(356): NCBI GI: 212532841 Blast Desc: nickel transport protein, [Penicillium marneffei ATCC 18224] gi|210071941|gb|EEA26030.1| nickel transport protein, [Penicillium marneffei ATCC 18224]
MAPRLRLPGLTERLKGLPAPVIYIITLLIIVNGIVWAAAGVVLHFYPSLVGAAVLSYTLGLRHALDADHISAIDLMTRRLIASGQRPVTVGTFFSLGHSTIVIITCIVVAATSGALREKFDGFARVGNIIGTSVSAAVLLLLCAGNGWVLYKLVGRLRMLLQESNFQYRGGDDNGDDAARELQLDGVGFMSNVLRKLFRIVNKPWKMYPLGVLFGLGFDTSSEIAVLGIASVQGAQGTSLWVILIFPALFTAGMCLVDTTDGALMMALYTSKAFARDKVAILYYSIVLTGITVVVSAFIGIVQILSLVQNVADPQGRFWDGLSAISDNFEIVGASIIGVFIFAGVGSVLVYAPWRRRMERRVSLEDESHDEA

SEQ ID NO: 34248 - DNA, 5742 bp, Muscodor strobelii
  misc_feature: SGI EST ID NO. CUFF.81290.0
  misc_feature: Variant of the nucleotide sequence at SEQ ID NO 34246
gcttatccatccagactgtaccttacgttgaaggtccccaagtgggggccgttgatcacgacattagagtgaggggcatgagagagtgtaagtgaggggcagaacgtagccaagatgagataagtcgagcaaaattgaacatcatcgcgcagcgccgtggatttcgatgcttatgcggtttgaggcagtgaacttgggttttcaggatcaacttaagaccgcaaattagtcgtctttgtcgttgcagttgacctggagacagagatgagatcgtcggagacggttcccctcgtataattgcagccccgaatcaacatggcgccgcgcctgcgcctcccaggtctgacagagcgtctgaagggactaccagcacccgttatatacatcataacactgttaattatagtgaacgggatagtctgggctgctgccggtgttgttctgcacttctatccctccctcgtgggagcagccgtgctttcttacacactcggcctgcgacacgcgctggatgcggatcacatcagcgcgattgatttaatgacccgaagactcattgcgagtggtcaacgtccagtgacagtcggtacatttttcagcctgggacactccacaatcgtgattattacctgcattgtggttgctgccacgtctggtgcattgagggagaaatttgatggatttgcgcgcgtgggaaatataataggcactagtgtcagtgccgcagtgcttctacttctttgcgcgggaaatggctgggtgctgtataagctcgttgggaggctacgcatgttactgcaagagtccaatttccagtaccggggaggagatgacaatggagacgacgctgcaagagaactccaattagacggtgtcgggtttatgtcgaatgtcctccggaagctattccgcattgttaacaaaccctggaagatgtatcctcttggtgtcttatttggactcggcttcgacacgagctcagaaattgcggtattgggtattgccagtgtccaaggcgcgcaagggacgagtctttgggttattttaatatttccggcacttttcactgctggaatgtgtctcgtcgacacgactgacggcgctctcatgatggcactctatacctcaaaagcgtttgcgcgggataaagttgctatactctactactcgatcgttctcactggcattacagtggtggtttctgccttcatcggcatcgtccagattctctccctagtgcagaacgtagcagatccccaaggaagattctgggatggtctgagtgccattagtgacaattttgaaattgtcggtgctagtattattggcgttttcatattcgcgggtgtaggatccgttttagtatatgctccctggcgacgaagaatggaaagacgggtgtctttggaagatgaatcccatgacgaggcataaacggagatgaattgaaactgaaatcctaaccacatagaatagtatcccgctactcgatagacgtcacgtttctacaagagcagccggattcactgcgcgcatcgatgacttcaagatgagtcacgttcgattgaaacgttgactactagcactgagtagtgtttatcattctagtgagcataacaacgaccaaacaacgcacgctttgccgctccccatgcgtctatgtcgaattggacgatatgaagtaacattagagacagcaatcccactcgctccgctccacgtgccgtgccctcaacataaaatgtcgccgaccccgcagctgaccattttgtaactcgcaacccctgaataaactccttgcgccttgttaccgattgtaattccatctcagtagcatcaaaaggtttctcaaaatatgtgctgtgggttacagtccgttgagtctgtcgaagagtccggagttaaaataggagtcgaatccgttgagtcacttgtgtcggacttagcagcgtcgttgtcatcttcctggtcctcgtcatcattatcatcttcagtgtccgcaacgttgccatcatcaatgtctttgtcctgttcgatatgcgtcctctcgtccgtcttctcaacaatcttgtcatccacgtttgtttcggtcttctcctcgtcaatcacgatttttggctttgtgacaacctctccgttgatgatttcgacctcatcagtgacattatttgcgtcgttgtctttctcgcgctcccctgcggcgttgatctgagcgttatcaatgtcggcggcgcctttggagcccatgcccccttcagcgagatcgccaccttcgatgacaactcgtaagtcaagatcagggtctttagagcatactcgaaatcccacgatacaaattgcattccatggatcggggagcgctgattcaccatcactttcaaccacttcagtagtagtggtggcagcaggtgcagccgaggccattctcggtttcttggacatgtcatccgaggagtagaggagctcccaatcttcaacggggctatctgaggaatcaccaccatcggatgaatatgcggcagtttgggctggagccggcgttggagtcgttgcaggcatatccgacgacttctctttctcggcattggcgtctagcttggcatcagctacagacttgacatcagaaggctccccatcagctggtgccggatcctgcttgcccttatcatcctgtggtttgccgccctcctttggaggtgttgatcctttgccattttcactcttgtctggcgtggaagattcctcgcttgcttcgtcagacttatcctccactttcgtcgtagcatcaggagcagccgcagcgaattcggctttgtcggtctctgtttgactgctcttgtcttcaccagctggtttatcggtctgaacggcgacgtccttgggttcctcttcctcctgctccttgtgttcaacttctttagattcctctttctttttcttctcagcggcttcggcatcttctttggctttcttcgccgccgcctcggccttctcttctgcctctcgcttcgctgcttcggcagctgccttggctgccttctttgcagcgtcagcttcgcggcgtttgtcacgtttctcttggttcttcttggtctgctttttggtgatctcccggttaagatggcgtttctcccacattttacggcgctcctgctgacgagacgcgcttgctttcgtctggtctgatttcttgcgaagattcgcaacatgctcgaggtgggccacacctttgctatgtgctagatcatacgcataaccaactttggcgaacttgtcgttttcttctcttttcttgcattcgcgcttaacgacatcttcgatggagagcatgtctgtgtcacgctcggctgtgacactcaggaaaaccgaatagtttcccggctccattagaggaatttcgatcgagacggaacgattcatcaaatagttaccgtgagatctaacgatgtagtcctcgctgtctgggcggccttgttcgtggattcggaaatgaagccggaaatagtactggcctgcgaggcctttgtagtaacgagtgtcgagctgttggagagtcaaaacaagtggggactccttcgtgagcttgatatgaaacttttcgttccactgtggcttccaagggacttccacaccaatccatcgctgagaactgtgccagtccgcatcccgaaagagacgcgtcctgtcaaaatgttgatatttttcaatcatgtcttcgtatctaatccagaaaacggaatcattgccgaactgatggcccagctcctccttcacgtcgctattccattcctttgatccatctgaccaagctccctcccaaataccctttcgggtcttaccccaggggttgctacatatcgttacttatagtgtcggatacaggtggtgcggagaggatgcttaccggagtttgacaagccgctcgccgttcttcagggtgcgcgcgtccatcacaacataagcatgtccttcgcgaataccttcgcggtagccgtagcctccatccaacagacctgtggaacagccgaagaagaattcttggttcaccttgctcatctcgttatcccagaattcgtcaaggtctaagatgtccgtggcgagaagctcagtagtcacacctccggtcagatcttctaagccctccccaatccatccgccagcaagggagccgaaatcaccatgcgcctttgcgtaggccttttcaattaacgccacccatgtttcgttttggttcttgcactggccgaaaaagagtgccttggagccagtctggtacgtcttgcgataatccttttcaggactttcacgatcaatctggttgagtagatcacgctgcatacttggattgtcccaatttggtgaggtcagataaagcttgtcgtcaacgatggagtaaatccattcaccatcgcggaagaaaacaaatccataaataccaatgcctattccgatggtaagcgtcaaaaatcgtttctcgcatgccgcttctttacttacgtgtgtcatactcgacgcagacacgtttcactgcatcttcgacattggcaagagcgctcaagctagcaatgaaccaacaattgccgagaccaccctgcttgatgtctgcgccatcgatgtctttgaggaaggttggcttctcaaaaatttcgcgcactcgcttgacgcatttggggacactggtggtcgtgctgtatctggtattggacatgtcgaatttactagagcccaaaaagttgaggcaattacctcgccccatcttgagatcccagtcctacaaatcggcaaaatcagtatggtgccaagaacatgtgtgaatcttagtcatggtccagagcttaccaagtcgaagtttgggtcccggtatcgcgtgttaactcgtttgcattcttggatgatcttcttcactctccttgaacactcatcgcgtgccttctcgtatccagcattgatggcctcatttggagcctcaatagtgcttggaagtgggacaggatcgaatggtaacacagagagggcttttgacgattgcttactggtaaatcgtcgccatattctattgatgctttgttgcggtggcttcttcttctttttcttcttttgattcgtcgtgccgctggtggctgtagttgtcttacgcgcagcgtcgtccgagtcgctcgaggaactatacccgaatctttcgaggtcgggttgtttatgggaactagccccgtctacaaacgagtccgcaaccataatggacttggatggtcttggtcgagcgcgaaatgacagagagaaggtctaaagtggaatgcgaagtctactatgcccgagttctatgccttagcaatgttctacgatccgacaaaatatgctgcaggggttccgggtcgacattcttaagacgattactcacgaataatttgaatataccaagtactacagttcccccgtcaacaaccaaagagctacgaaagcaaataagataaaaaggaatggtgacacagacggagcaggtactgtataggccataaattggaggagagggagggaagagagtgtaaaagagacaagaagtaacggttgcaccactggcttcgtgctcaggagtcatatataggcaggccgccgcccagcattcggttagatgactcccacaaggcaggagaggctgtcgtgcacaggcaccgcagcataagcaagaggccaatccatgttggttccgccagaactgactccatctcgaaagctgggtgggac

SEQ ID NO: 34249 - DNA, 3210 bp, Muscodor strobelii
  misc_feature: SGI cDNA ID NO. 571833
  misc_feature: Encodes the peptide sequence at SEQ ID NO 34250
atggttgcggactcgtttgtagacggggctagttcccataaacaacccgacctcgaaagattcgggtatagttcctcgagcgactcggacgacgctgcgcgtaagacaactacagccaccagcggcacgacgaatcaaaagaagaaaaagaagaagaagccaccgcaacaaagcatcaatagaatatggcgacgatttaccagtaagcaatcgtcaaaagccctctctgtgttaccattcgatcctgtcccacttccaagcactattgaggctccaaatgaggccatcaatgctggatacgagaaggcacgcgatgagtgttcaaggagagtgaagaagatcatccaagaatgcaaacgagttaacacgcgataccgggacccaaacttcgacttggactgggatctcaagatggggcgaggtaattgcctcaactttttgggctctagtaaattcgacatgtccaataccagatacagcacgaccaccagtgtccccaaatgcgtcaagcgagtgcgcgaaatttttgagaagccaaccttcctcaaagacatcgatggcgcagacatcaagcagggtggtctcggcaattgttggttcattgctagcttgagcgctcttgccaatgtcgaagatgcagtgaaacgtgtctgcgtcgagtatgacacacgcattggtatttatggatttgttttcttccgcgatggtgaatggatttactccatcgttgacgacaagctttatctgacctcaccaaattgggacaatccaagtatgcagcgtgatctactcaaccagattgatcgtgaaagtcctgaaaaggattatcgcaagacgtaccagactggctccaaggcactctttttcggccagtgcaagaaccaaaacgaaacatgggtggcgttaattgaaaaggcctacgcaaaggcgcatggtgatttcggctcccttgctggcggatggattggggagggcttagaagatctgaccggaggtgtgactactgagcttctcgccacggacatcttagaccttgacgaattctgggataacgagatgagcaaggtgaaccaagaattcttcttcggctgttccacaggtctgttggatggaggctacggctaccgcgaaggtattcgcgaaggacatgcttatgttgtgatggacgcgcgcaccctgaagaacggcgagcggcttgtcaaactccgcaacccctggggtaagacccgaaagggtatttgggagggagcttggtcagatggatcaaaggaatggaatagcgacgtgaaggaggagctgggccatcagttcggcaatgattccgttttctggattagatacgaagacatgattgaaaaatatcaacattttgacaggacgcgtctctttcgggatgcggactggcacagttctcagcgatggattggtgtggaagtcccttggaagccacagtggaacgaaaagtttcatatcaagctcacgaaggagtccccacttgttttgactctccaacagctcgacactcgttactacaaaggcctcgcaggccagtactatttccggcttcatttccgaatccacgaacaaggccgcccagacagcgaggactacatcgttagatctcacggtaactatttgatgaatcgttccgtctcgatcgaaattcctctaatggagccgggaaactattcggttttcctgagtgtcacagccgagcgtgacacagacatgctctccatcgaagatgtcgttaagcgcgaatgcaagaaaagagaagaaaacgacaagttcgccaaagttggttatgcgtatgatctagcacatagcaaaggtgtggcccacctcgagcatgttgcgaatcttcgcaagaaatcagaccagacgaaagcaagcgcgtctcgtcagcaggagcgccgtaaaatgtgggagaaacgccatcttaaccgggagatcaccaaaaagcagaccaagaagaaccaagagaaacgtgacaaacgccgcgaagctgacgctgcaaagaaggcagccaaggcagctgccgaagcagcgaagcgagaggcagaagagaaggccgaggcggcggcgaagaaagccaaagaagatgccgaagccgctgagaagaaaaagaaagaggaatctaaagaagttgaacacaaggagcaggaggaagaggaacccaaggacgtcgccgttcagaccgataaaccagctggtgaagacaagagcagtcaaacagagaccgacaaagccgaattcgctgcggctgctcctgatgctacgacgaaagtggaggataagtctgacgaagcaagcgaggaatcttccacgccagacaagagtgaaaatggcaaaggatcaacacctccaaaggagggcggcaaaccacaggatgataagggcaagcaggatccggcaccagctgatggggagccttctgatgtcaagtctgtagctgatgccaagctagacgccaatgccgagaaagagaagtcgtcggatatgcctgcaacgactccaacgccggctccagcccaaactgccgcatattcatccgatggtggtgattcctcagatagccccgttgaagattgggagctcctctactcctcggatgacatgtccaagaaaccgagaatggcctcggctgcacctgctgccaccactactactgaagtggttgaaagtgatggtgaatcagcgctccccgatccatggaatgcaatttgtatcgtgggatttcgagtatgctctaaagaccctgatcttgacttacgagttgtcatcgaaggtggcgatctcgctgaagggggcatgggctccaaaggcgccgccgacattgataacgctcagatcaacgccgcaggggagcgcgagaaagacaacgacgcaaataatgtcactgatgaggtcgaaatcatcaacggagaggttgtcacaaagccaaaaatcgtgattgacgaggagaagaccgaaacaaacgtggatgacaagattgttgagaagacggacgagaggacgcatatcgaacaggacaaagacattgatgatggcaacgttgcggacactgaagatgataatgatgacgaggaccaggaagatgacaacgacgctgctaagtccgacacaagtgactcaacggattcgactcctattttaactccggactcttcgacagactcaacggactgtaacccacagcacatattttga

SEQ ID NO: 34250 - protein, 1069 aa, Muscodor strobelii
  misc_feature: SGI Peptide ID NO. 571833
  misc_feature (149)..(463): Pfam Id: PF00648 Pfam Desc: Calpain family cysteine protease
  misc_feature (378)..(459): Pfam Id: PF00648 Pfam Desc: Calpain family cysteine protease
  misc_feature (283)..(334): Pfam Id: PF00648 Pfam Desc: Calpain family cysteine protease
  misc_feature (188)..(247): Pfam Id: PF00648 Pfam Desc: Calpain family cysteine protease
  misc_feature (58)..(957): NCBI GI: 85086658 Blast Desc: NCU00251 [Neurospora crassa OR74A] gi|28918817|gb|EAA28486.1| conserved [Neurospora crassa OR74A]
  misc_feature (22)..(960): NCBI GI: 46124267 Blast Desc: FG06511.1 [Gibberella zeae PH-1]
  misc_feature (51)..(785): NCBI GI: 116208704 Blast Desc: CHGG_03645 [Chaetomium globosum CBS 148.51] gi|88184242|gb|EAQ91710.1| CHGG_03645 [Chaetomium globosum CBS 148.51]
  misc_feature (22)..(961): NCBI GI: 256726428 Blast Desc: [Nectria haematococca mpVI 77-13-4]
  misc_feature (22)..(844): NCBI GI: 171685210 Blast Desc: protein product [Podospora anserina] gi|170942566|emb|CAP68218.1| protein product [Podospora anserina]
  misc_feature (22)..(666): NCBI GI: 261354004 Blast Desc: calpain-1 catalytic subunit [Verticillium albo-atrum VaMs.102]
  misc_feature (54)..(659): NCBI GI: 145609407 Blast Desc: MGG_07573 [Magnaporthe grisea 70-15] gi|145016776|gb|EDK01206.1| MGG_07573 [Magnaporthe grisea 70-15]
  misc_feature (55)..(932): NCBI GI: 156048280 Blast Desc: SS1G_08871 [Sclerotinia sclerotiorum 1980] gi|154693268|gb|EDN93006.1| SS1G_08871 [Sclerotinia sclerotiorum 1980]
  misc_feature (37)..(690): NCBI GI: 169769787 Blast Desc: [Aspergillus oryzae RIB40] gi|83767222|dbj|BAE57361.1| protein product [Aspergillus oryzae]
  misc_feature (36)..(613): NCBI GI: 121699377 Blast Desc: calpain, [Aspergillus clavatus NRRL 1] gi|119396143|gb|EAW06575.1| calpain, [Aspergillus clavatus NRRL 1]
MVADSFVDGASSHKQPDLERFGYSSSSDSDDAARKTTTATSGTTNQKKKKKKKPPQQSINRIWRRFTSKQSSKALSVLPFDPVPLPSTIEAPNEAINAGYEKARDECSRRVKKIIQECKRVNTRYRDPNFDLDWDLKMGRGNCLNFLGSSKFDMSNTRYSTTTSVPKCVKRVREIFEKPTFLKDIDGADIKQGGLGNCWFIASLSALANVEDAVKRVCVEYDTRIGIYGFVFFRDGEWIYSIVDDKLYLTSPNWDNPSMQRDLLNQIDRESPEKDYRKTYQTGSKALFFGQCKNQNETWVALIEKAYAKAHGDFGSLAGGWIGEGLEDLTGGVTTELLATDILDLDEFWDNEMSKVNQEFFFGCSTGLLDGGYGYREGIREGHAYVVMDARTLKNGERLVKLRNPWGKTRKGIWEGAWSDGSKEWNSDVKEELGHQFGNDSVFWIRYEDMIEKYQHFDRTRLFRDADWHSSQRWIGVEVPWKPQWNEKFHIKLTKESPLVLTLQQLDTRYYKGLAGQYYFRLHFRIHEQGRPDSEDYIVRSHGNYLMNRSVSIEIPLMEPGNYSVFLSVTAERDTDMLSIEDVVKRECKKREENDKFAKVGYAYDLAHSKGVAHLEHVANLRKKSDQTKASASRQQERRKMWEKRHLNREITKKQTKKNQEKRDKRREADAAKKAAKAAAEAAKREAEEKAEAAAKKAKEDAEAAEKKKKEESKEVEHKEQEEEEPKDVAVQTDKPAGEDKSSQTETDKAEFAAAAPDATTKVEDKSDEASEESSTPDKSENGKGSTPPKEGGKPQDDKGKQDPAPADGEPSDVKSVADAKLDANAEKEKSSDMPATTPTPAPAQTAAYSSDGGDSSDSPVEDWELLYSSDDMSKKPRMASAAPAATTTTEVVESDGESALPDPWNAICIVGFRVCSKDPDLDLRVVIEGGDLAEGGMGSKGAADIDNAQINAAGEREKDNDANNVTDEVEIINGEVVTKPKIVIDEEKTETNVDDKIVEKTDERTHIEQDKDIDDGNVADTEDDNDDEDQEDDNDAAKSDTSDSTDSTPILTPDSSTDSTDCNPQHIF

SEQ ID NO: 34251 - DNA, 5526 bp, Muscodor strobelii
  misc_feature: SGI EST ID NO. CUFF.81291.2
  misc_feature: Variant of the nucleotide sequence at SEQ ID NO 34249
gtcccacccagctttcgagatggagtcagttctggcggaaccaacatggattggcctcttgcttatgctgcggtgcctgtgcacgacagcctctcctgccttgtgggagtcatctaaccgaatgctgggcggcggcctgcctatatatgactcctgagcacgaagccagtggtgcaaccgttacttcttgtctcttttacactctcttccctccctctcctccaatttatggcctatacagtacctgctccgtctgtgtcaccattcctttttatcttatttgctttcgtagctctttggttgttgacgggggaactgtagtacttggtatattcaaattattcacttcgcattccactttagaccttctctctgtcatttcgcgctcgaccaagaccatccaagtccattatggttgcggactcgtttgtagacggggctagttcccataaacaacccgacctcgaaagattcgggtatagttcctcgagcgactcggacgacgctgcgcgtaagacaactacagccaccagcggcacgacgaatcaaaagaagaaaaagaagaagaagccaccgcaacaaagcatcaatagaatatggcgacgatttaccagtaagcaatcgtcaaaagccctctctgtgttaccattcgatcctgtcccacttccaagcactattgaggctccaaatgaggccatcaatgctggatacgagaaggcacgcgatgagtgttcaaggagagtgaagaagatcatccaagaatgcaaacgagttaacacgcgataccgggacccaaacttcgacttggactgggatctcaagatggggcgaggtaattgcctcaactttttgggctctagtaaattcgacatgtccaataccagatacagcacgaccaccagtgtccccaaatgcgtcaagcgagtgcgcgaaatttttgagaagccaaccttcctcaaagacatcgatggcgcagacatcaagcagggtggtctcggcaattgttggttcattgctagcttgagcgctcttgccaatgtcgaagatgcagtgaaacgtgtctgcgtcgagtatgacacacgcattggtatttatggatttgttttcttccgcgatggtgaatggatttactccatcgttgacgacaagctttatctgacctcaccaaattgggacaatccaagtatgcagcgtgatctactcaaccagattgatcgtgaaagtcctgaaaaggattatcgcaagacgtaccagactggctccaaggcactctttttcggccagtgcaagaaccaaaacgaaacatgggtggcgttaattgaaaaggcctacgcaaaggcgcatggtgatttcggctcccttgctggcggatggattggggagggcttagaagatctgaccggaggtgtgactactgagcttctcgccacggacatcttagaccttgacgaattctgggataacgagatgagcaaggtgaaccaagaattcttcttcggctgttccacaggtctgttggatggaggctacggctaccgcgaaggtattcgcgaaggacatgcttatgttgtgatggacgcgcgcaccctgaagaacggcgagcggcttgtcaaactccgcaacccctggggtaagacccgaaagggtatttgggagggagcttggtcagatggatcaaaggaatggaatagcgacgtgaaggaggagctgggccatcagttcggcaatgattccgttttctggattagatacgaagacatgattgaaaaatatcaacattttgacaggacgcgtctctttcgggatgcggactggcacagttctcagcgatggattggtgtggaagtcccttggaagccacagtggaacgaaaagtttcatatcaagctcacgaaggagtccccacttgttttgactctccaacagctcgacactcgttactacaaaggcctcgcaggccagtactatttccggcttcatttccgaatccacgaacaaggccgcccagacagcgaggactacatcgttagatctcacggtaactatttgatgaatcgttccgtctcgatcgaaattcctctaatggagccgggaaactattcggttttcctgagtgtcacagccgagcgtgacacagacatgctctccatcgaagatgtcgttaagcgcgaatgcaagaaaagagaagaaaacgacaagttcgccaaagttggttatgcgtatgatctagcacatagcaaaggtgtggcccacctcgagcatgttgcgaatcttcgcaagaaatcagaccagacgaaagcaagcgcgtctcgtcagcaggagcgccgtaaaatgtgggagaaacgccatcttaaccgggagatcaccaaaaagcagaccaagaagaaccaagagaaacgtgacaaacgccgcgaagctgacgctgcaaagaaggcagccaaggcagctgccgaagcagcgaagcgagaggcagaagagaaggccgaggcggcggcgaagaaagccaaagaagatgccgaagccgctgagaagaaaaagaaagaggaatctaaagaagttgaacacaaggagcaggaggaagaggaacccaaggacgtcgccgttcagaccgataaaccagctggtgaagacaagagcagtcaaacagagaccgacaaagccgaattcgctgcggctgctcctgatgctacgacgaaagtggaggataagtctgacgaagcaagcgaggaatcttccacgccagacaagagtgaaaatggcaaaggatcaacacctccaaaggagggcggcaaaccacaggatgataagggcaagcaggatccggcaccagctgatggggagccttctgatgtcaagtctgtagctgatgccaagctagacgccaatgccgagaaagagaagtcgtcggatatgcctgcaacgactccaacgccggctccagcccaaactgccgcatattcatccgatggtggtgattcctcagatagccccgttgaagattgggagctcctctactcctcggatgacatgtccaagaaaccgagaatggcctcggctgcacctgctgccaccactactactgaagtggttgaaagtgatggtgaatcagcgctccccgatccatggaatgcaatttgtatcgtgggatttcgagtatgctctaaagaccctgatcttgacttacgagttgtcatcgaaggtggcgatctcgctgaagggggcatgggctccaaaggcgccgccgacattgataacgctcagatcaacgccgcaggggagcgcgagaaagacaacgacgcaaataatgtcactgatgaggtcgaaatcatcaacggagaggttgtcacaaagccaaaaatcgtgattgacgaggagaagaccgaaacaaacgtggatgacaagattgttgagaagacggacgagaggacgcatatcgaacaggacaaagacattgatgatggcaacgttgcggacactgaagatgataatgatgacgaggaccaggaagatgacaacgacgctgctaagtccgacacaagtgactcaacggattcgactcctattttaactccggactcttcgacagactcaacggactgtaacccacagcacatattttgagaaaccttttgatgctactgagatggaattacaatcggtaacaaggcgcaaggagtttattcaggggttgcgagttacaaaatggtcagctgcggggtcggcgacattttatgttgagggcacggcacgtggagcggagcgagtgggattgctgtctctaatgttacttcatatcgtccaattcgacatagacgcatggggagcggcaaagcgtgcgttgtttggtcgttgttatgctcactagaatgataaacactactcagtgctagtagtcaacgtttcaatcgaacgtgactcatcttgaagtcatcgatgcgcgcagtgaatccggctgctcttgtagaaacgtgacgtctatcgagtagcgggatactattctatgtggttaggatttcagtttcaattcatctccgtttatgcctcgtcatgggattcatcttccaaagacacccgtctttccattcttcgtcgccagggagcatatactaaaacggatcctacacccgcgaatatgaaaacgccaataatactagcaccgacaatttcaaaattgtcactaatggcactcagaccatcccagaatcttccttggggatctgctacgttctgcactagggagagaatctggacgatgccgatgaaggcagaaaccaccactgtaatgccagtgagaacgatcgagtagtagagtatagcaactttatcccgcgcaaacgcttttgaggtatagagtgccatcatgagagcgccgtcagtcgtgtcgacgagacacattccagctaaacctattagctcccataccactagtaacgagtgtcaacagctgtttagctcaccagtgaaaagtgccggaaatattaaaataacccaaagactcgtcccttgcgcgccttggacactggcaatacccaataccgcaatttctgagctcgtgtcgaagccgagtccaaataagacaccaagaggatacatcttccagggtttgttaacaatgcggaatagcttccggaggacattcgacataaacccgacaccgtctaattggagttctcttgcagcgtcgtctccattgtcatctcctccccggtactggaaattggactcttgcagtaacatgcgtagcctcccaacgagcttatacagcacccagccatttcccgcgcaaagaagtagaagcactgcggcactgacactagtgcctattatatttcccacgcgcgcaaatccatcaaatttctccctcaatgcaccagacgtggcagcaaccacaatgcaggtaataatcacgattgtggagtgtcccaggctgaaaaatgtaccgactgtcactggacgttgaccactcgcaatgagtcttcgggtcattaaatcaatcgcgctgatgtgatccgcatccagcgcgtgtcgcaggccgagtgtgtaagaaagcacggctgctcccacgagggagggatagaagtgcagaacaacaccggcagcagcccagactatcccgttcactataattaacagtgttatgatgtatataacgggtgctggtagtcccttcagacgctctgtcagacctgggaggcgcaggcgcggcgccatgttgattcggggctgcaattatacgaggggaaccgtctccgacgatctcatctctgtctccaggtcaactgcaacgacaaagacgactaatttgcggtcttaagttgatcctgaaaacccaagttcactgcctcaaaccgcataagcatcgaaatccacggcgctgcgcgatgatgttcaattttgctcgacttatctcatcttggctacgttctgcccctcacttacactctctcatgcccctcactctaatgtcgtgatcaacggcccccacttggggaccttcaacgtaaggtacagtctggatggataagc

SEQ ID NO: 34252 - DNA, 1866 bp, Muscodor strobelii
  misc_feature: SGI cDNA ID NO. 571834
  misc_feature: Encodes the peptide sequence at SEQ ID NO 34253
atgaggggcctacttggcttgctcccaatcctcagcgtgacggtgaaagcggccgtgttagatggcccacacggccgtggcgtagaggatgctgcaatcgataatactcgtcactgttcagccggtctttgtatgatcagcagccagacagccagcagcgacgcacctgccttcacaacaacgcttccttctgcctctagtgcactcaatgcatcacatagcgtgccaagtgtacgcagaggcaatattccagtgtttggcgtgtatggagtcggaagacgctttgccatcgaaggtggcgatgaaacgagcgaagcgactttgtctagtacttcgtatacgtcgataacgtttagcacctacacgtccacggccacagaaacttctaccgcgcgtgctgagggaggctccggaggcctttcgggcggatttcccggaatgctcttcgggggtgctgccaacggtctcatggggaataataacgataatagaggcgatgcagcaagcactagtaccttcacctctactagcaccacgtcagcttccactgaggcaacatctaccgatgcggctgctgctagagctggcggcaatagaatgatgatgcatccccatttcccaggcatcggttttccaggcgtcggttttccaggaaatggtgccggcggtgaggcactaggagaaggcgatgcgatcgcgtcgacaagtacggctagtaccacctctacctctacgtatacagactctagttcgacaaatactgcatttcgcgaagcgggtggttctggaatgcgaccgcctattcccgtcttcggggcagctcatggaattagaggacaaatcgcgaacggtgctgaggtgactacatctaccgctaccataacggggttcggtacgacttatacgtcaacatatacagttacctctagtacaagcagcgctcgccatgaaggcggcagcttcaacaggatgggcggtatgcatggtgccattgggtttggaaaggactctggaagaggtggcgaagtgcggagggagcggcgaaattttgggggtggatttggaggtggatttgggagtggacggcaaggctttggtggtggtaatcgtgaagacgatcctactgtaactgacagcataagctattcattcacatacactaactcggcgacggccacatacatatcttacgtcactattacgaactcatacatctctaccgtcacggattcgtattattctaccgtcaccgacccgtattattctactgtcaccaactcgttttattctactgtcaccaatccgtattattctaccgtcaccggctcatactattccacaatcactgactcatactattctaccataaccaagtcatactattccacaatcacaaattcctatagtgctgctaattcgaatgctaatatcaactcaaacgccaacatcaattctaacgtcaacgtaaattcaaacgtcaacgtgaactcgaacgctgcctcaagttcatacgcttcctcaaactccctcaattccgcaagttcctatactgtcacaaactctgcgtatatcagttacctcacgagtacagtgactgagaccgcgacagctacagtgatacacgtcgacagttaccaaaacgaactttatttcaacatacacggcgtcctcaactcgaggaggtgggacgagaactattacatcaacagtgacgcaatcaccgtcgaccttggtatcatacatcacaaagaccaagaccaggacaagtacgagatcaagagtcagcgagaacgcgtcagcttcaactataactgtaactgttactgccgaggtttcttccatcgcgagcccttcagcgtcaactaa

SEQ ID NO: 34253 - protein, 621 aa, Muscodor strobelii
  misc_feature: SGI Peptide ID NO. 571834
MRGLLGLLPILSVTVKAAVLDGPHGRGVEDAAIDNTRHCSAGLCMISSQTASSDAPAFTTTLPSASSALNASHSVPSVRRGNIPVFGVYGVGRRFAIEGGDETSEATLSSTSYTSITFSTYTSTATETSTARAEGGSGGLSGGFPGMLFGGAANGLMGNNNDNRGDAASTSTFTSTSTTSASTEATSTDAAAARAGGNRMMMHPHFPGIGFPGVGFPGNGAGGEALGEGDAIASTSTASTTSTSTYTDSSSTNTAFREAGGSGMRPPIPVFGAAHGIRGQIANGAEVTTSTATITGFGTTYTSTYTVTSSTSSARHEGGSFNRMGGMHGAIGFGKDSGRGGEVRRERRNFGGGFGGGFGSGRQGFGGGNREDDPTVTDSISYSFTYTNSATATYISYVTITNSYISTVTDSYYSTVTDPYYSTVTNSFYSTVTNPYYSTVTGSYYSTITDSYYSTITKSYYSTITNSYSAANSNANINSNANINSNVNVNSNVNVNSNAASSSYASSNSLNSASSYTVTNSAYISYLTSTVTETATATVIHVDSYQNELYFNIHGVLNSRRWDENYYINSDAITVDLGIIHHKDQDQDKYEIKSQRERVSFNYNCNCYCRGFFHREPFSVN

SEQ ID NO: 34254 - DNA, 421 bp, Muscodor strobelii
  misc_feature: SGI EST ID NO. CUFF.81156.0
  misc_feature: Variant of the nucleotide sequence at SEQ ID NO 34252
ggcagctcatggaattagaggacaaatcgcgaacggtgctgaggtgactacatctaccgctaccataacggggttcggtacgacttatacgtcaacatatacagttacctctagtacaagcagcgctcgccatgaaggcggcagcttcaacaggatgggcggtatgcatggtgccattgggtttggaaaggactctggaagaggtggcgaagtgcggagggagcggcgaaattttgggggtggatttggaggtggatttgggagtggacggcaaggctttggtggtggtaatcgtgaagacgatcctgatgctgatgaatattaatagttcgctttcaagcctgctgtccctccttcaaaagaaggacataaaaaaaatgattggaaacattgtcatccctcaacagtcactgtaacttca

SEQ ID NO: 34255 - DNA, 1758 bp, Muscodor strobelii
  misc_feature: SGI cDNA ID NO. 571835
  misc_feature: Encodes the peptide sequence at SEQ ID NO 34256
atggcacctctcgccaacagcttactggccatcgcggtttcggccgtcatgacggcgctcccatcacaagcgcaattcgtcaaggctccgaccgatttgaaacgcgtgatgggcgctgctggaattcccgtacgttacaaagaagtccccacggggatttgtgagctggacccggatgtgaagagttattcaggatacgcggatgttggggagaacgagcatatcttcttctggttctttgaagcgcgaaaccaggacccgactgatgcgccacttacggtgtggatcaatggaggaccaggcagtagtagtatgatcggcttgttcgaggaacttggtccttgccgtattgattattacggcaatgtgtatagcaatccgtactcctggtccaatgccagtaacatgatcttcatcgaccagccgagccaggttgggttctcgtactcttacccggtcgatgggtacatgagcgattatggcctcgtcacattacccgatgccacatgtccggactatgccccagagggttcttgtggcacgtacgcctatccgaatctcaccctcactgcgaactcaacaccggctgcggcgccgaatttctggaagacgcttcagggcttcatgggtgcattcccgcagtacactcgcaatggcttccatttcgcgacggaaagttacggcggacactatgggcccatcttcaataagtacattgaggatcagaatgcacatctaccacctgatgctatcaaaatcgacttgaagtccgtgcttattggcaatggatggttcgatcctgtccttcaatatcaagcctactataatttcacggtatatcctggcaacacctatgactacgcacctttttccaaatccgacgaggagatgttttacaataatttgtacggagtgggtaactgttatgaccgactgttggactgtaaggcaaccggcaataatgcgatctgcaaaaacgcagataacttctgcgcgtaccttgtcgagagcgtttatgatgatgttcttgggagggacgaatacgacatgcgggagctgtaccccgatccatttccctacagcttctacgtagactatctcaatacgcccgaagtgcaggcagctattggcgcctatacgaacttctcctcgaacggtgcagtaggtgaagcatttgacaacacaggggacgatgcgcgggagatcgggacaatagaggctatccgcacgcttctttgcaagggcatctccgtagcgatctacgcaggtgatgcagactataattgcaactggctaggaagccaagcggtagtcgaagaggtcaaagctccatttttcgacaaagctggcttcacagatcttcaaacgtcagacggaattacgcatggacaagtcaaacaagctggcaagttcagcttcacccgcatttacgaatcaggtcacgaagtcccattctaccagccattggctagtctggaatacttcgagcgcgcgatcaaaggtgtcgacattgaaactgggaagcacaaggtagaccgggcgtacttgagtaaagggactcggagcagcacgtaccgcgagggtaatgcgactatgcagtttgaagtcacgccgggcaacctgacgtacgataccgagactaacaagcctggcgctccatgggcggacgtcgtcggaatgatgaaacgtagctttgcaggacagaggggtgctggagtcaggacaaataggcccagatcccgattccgtgttcgatag

SEQ ID NO: 34256 - protein, 585 aa, Muscodor strobelii
  misc_feature: SGI Peptide ID NO. 571835
  misc_feature (58)..(501): Pfam Id: PF00450 Pfam Desc: Serine carboxypeptidase
  misc_feature (10)..(562): NCBI GI: 154316249 Blast Desc: BC1G_03710 [Botryotinia fuckeliana B05.10] gi|150846496|gb|EDN21689.1| BC1G_03710 [Botryotinia fuckeliana B05.10]
  misc_feature (25)..(579): NCBI GI: 189192809 Blast Desc: carboxypeptidase S1 [Pyrenophora tritici-repentis Pt-1C-BFP] gi|187978307|gb|EDU44933.1| carboxypeptidase S1 [Pyrenophora tritici-repentis Pt-1C-BFP]
  misc_feature (16)..(550): NCBI GI: 156037570 Blast Desc: SS1G_12499 [Sclerotinia sclerotiorum 1980] gi|154697907|gb|EDN97645.1| SS1G_12499 [Sclerotinia sclerotiorum 1980]
  misc_feature (10)..(550): NCBI GI: 145235505 Blast Desc: An03g05200 [Aspergillus niger] gi|134058086|emb|CAK49172.1| protein product [Aspergillus niger]
  misc_feature (5)..(550): NCBI GI: 71019727 Blast Desc: UM03947.1 [Ustilago maydis 521] gi|46099859|gb|EAK85092.1| UM03947.1 [Ustilago maydis 521]
  misc_feature (8)..(564): NCBI GI: 242765335 Blast Desc: serine carboxypeptidase, [Talaromyces stipitatus ATCC 10500] gi|218724151|gb|EED23568.1| serine carboxypeptidase, [Talaromyces stipitatus ATCC 10500]
  misc_feature (22)..(550): NCBI GI: 255953917 Blast Desc: Pc21g06670 [Penicillium chrysogenum Wisconsin 54-1255] gi|211589422|emb|CAP95564.1| Pc21g06670 [Penicillium chrysogenum Wisconsin 54-1255]
  misc_feature (8)..(564): NCBI GI: 212528848 Blast Desc: conserved [Penicillium marneffei ATCC 18224] gi|210073979|gb|EEA28066.1| conserved [Penicillium marneffei ATCC 18224]
  misc_feature (22)..(544): NCBI GI: 169622186 Blast Desc: SNOG_14308 [Phaeosphaeria nodorum SN15] gi|160704718|gb|EAT78179.2| SNOG_14308 [Phaeosphaeria nodorum SN15]
  misc_feature (22)..(527): NCBI GI: 115490965 Blast Desc: ATEG_00024 [Aspergillus terreus NIH2624] gi|114196970|gb|EAU38670.1| ATEG_00024 [Aspergillus terreus NIH2624]
  misc_feature (22)..(507): SWISSPROT Homolog: EC 3.4.16.6 Carboxypeptidase D
MAPLANSLLAIAVSAVMTALPSQAQFVKAPTDLKRVMGAAGIPVRYKEVPTGICELDPDVKSYSGYADVGENEHIFFWFFEARNQDPTDAPLTVWINGGPGSSSMIGLFEELGPCRIDYYGNVYSNPYSWSNASNMIFIDQPSQVGFSYSYPVDGYMSDYGLVTLPDATCPDYAPEGSCGTYAYPNLTLTANSTPAAAPNFWKTLQGFMGAFPQYTRNGFHFATESYGGHYGPIFNKYIEDQNAHLPPDAIKIDLKSVLIGNGWFDPVLQYQAYYNFTVYPGNTYDYAPFSKSDEEMFYNNLYGVGNCYDRLLDCKATGNNAICKNADNFCAYLVESVYDDVLGRDEYDMRELYPDPFPYSFYVDYLNTPEVQAAIGAYTNFSSNGAVGEAFDNTGDDAREIGTIEAIRTLLCKGISVAIYAGDADYNCNWLGSQAVVEEVKAPFFDKAGFTDLQTSDGITHGQVKQAGKFSFTRIYESGHEVPFYQPLASLEYFERAIKGVDIETGKHKVDRAYLSKGTRSSTYREGNATMQFEVTPGNLTYDTETNKPGAPWADVVGMMKRSFAGQRGAGVRTNRPRSRFRVR

SEQ ID NO: 34257 - DNA, 2429 bp, Muscodor strobelii
  misc_feature: SGI EST ID NO. CUFF.81165.0
  misc_feature: Variant of the nucleotide sequence at SEQ ID NO 34255
gtcaaagcctactgctgtacggctgattgtttccatgtacgggtagcttccgcgcatgcactggcaagcgagacggaacatgcaaaaagcagtcgaacagagttatcgtgcagcgagcagcaagcctgccaatttaccatattgaaatctggacgcgactcaaattgtaatgaagtcataattcatatcgcgctgaattgggtcataagctagacaatcgagagccgggataggctatccgactacagcgctaggatgctgtcgaaaaaatgtctctcatcttcctctttcgtcgagcagcttgacatgtaataaatatagataagaaagtttctccctccatcaattgggccgcgattgctctttccatcccttttcctgcctgcttgcttggggttgacattgagcatagcgagtatccggcaacccaggttcaatcgatcatggcacctctcgccaacagcttactggccatcgcggtttcggccgtcatgacggcgctcccatcacaagcgcaattcgtcaaggctccgaccgatttgaaacgcgtgatgggcgctgctggaattcccgtacgttacaaagaagtccccacggggatttgtgagctggacccggatgtgaagagttattcaggatacgcggatgttggggagaacgagcatatcttcttctggttctttgaagcgcgaaaccaggacccgactgatgcgccacttacggtgtggatcaatggaggaccaggcagtagtagtatgatcggcttgttcgaggaacttggtccttgccgtattgattattacggcaatgtgtatagcaatccgtactcctggtccaatgccagtaacatgatcttcatcgaccagccgagccaggttgggttctcgtactcttacccggtcgatgggtacatgagcgattatggcctcgtcacattacccgatgccacatgtccggactatgccccagagggttcttgtggcacgtacgcctatccgaatctcaccctcactgcgaactcaacaccggctgcggcgccgaatttctggaagacgcttcagggcttcatgggtgcattcccgcagtacactcgcaatggcttccatttcgcgacggaaagttacggcggacactatgggcccatcttcaataagtacattgaggatcagaatgcacatctaccacctgatgctatcaaaatcgacttgaagtccgtgcttattggcaatggatggttcgatcctgtccttcaatatcaagcctactataatttcacggtatatcctggcaacacctatgactacgcacctttttccaaatccgacgaggagatgttttacaataatttgtacggagtgggtaactgttatgaccgactgttggactgtaaggcaaccggcaataatgcgatctgcaaaaacgcagataacttctgcgcgtaccttgtcgagagcgtttatgatgatgttcttgggagggacgaatacgacatgcgggagctgtaccccgatccatttccctacagcttctacgtagactatctcaatacgcccgaagtgcaggcagctattggcgcctatacgaacttctcctcgaacggtgcagtaggtgaagcatttgacaacacaggggacgatgcgcgggagatcgggacaatagaggctatccgcacgcttctttgcaagggcatctccgtagcgatctacgcaggtgatgcagactataattgcaactggctaggaagccaagcggtagtcgaagaggtcaaagctccatttttcgacaaagctggcttcacagatcttcaaacgtcagacggaattacgcatggacaagtcaaacaagctggcaagttcagcttcacccgcatttacgaatcaggtcacgaagtcccattctaccagccattggctagtctggaatacttcgagcgcgcgatcaaaggtgtcgacattgaaactgggaagcacaaggtagaccgggcgtacttgagtaaagggactcggagcagcacgtaccgcgagggtaatgcgactatgcagtttgaagtcacgccgggcaacctgacgtacgataccgagactaacaagcctggcgctccatgggcggacgtcgtcggaatgatgaaacgtagctttgcaggacagaggggtgctggagtcaggacaaataggcccagatcccgattccgtgttcgatagactcatacaattgtacaaaagcatgtgaggtatgagaggacgtaaggtttaggaccaccttcacggaacgacctatatgctttcatatatagaattggttcgctaatgaacagcaagtatgctacacctaatgcaagattaattcattgtcattataccaaacatgacataatcacaagtatgtgtacgacatacagtatctatctggaagtattaggtatatagagc

SEQ ID NO: 34258 - DNA, 2760 bp, Muscodor strobelii
  misc_feature: SGI cDNA ID NO. 571836
  misc_feature: Reduced expression when VOC is produced
  misc_feature: Encodes the peptide sequence at SEQ ID NO 34259
atgcccactgaggcccttcgctgtgaacggcctgttgcgttgagacatcaccggccagtcgaactgatcgctcattgcgatccgaaaactgcccactgcccgcttgcactgcagccccgccatcctatatcatggatgcttacagcgcgtcgaaacatgctaacggaactgttttaccatccaggcttctacgtagaccccgacggccctactagcttgaagcttgctgccgccgccgatctagctgcgtgtgagccctggtaccagatctggcgcaccagaatattcccctgcctgcctcgccccagaccgcctccgcatccgccgaagcctgccagcgttgtcttcgccgacgtccacgtcaccgcccttctaccctcactcccgcggcaacccaaatccctggggatgccgtacactccgccctcccaccgttctcccgcttcctcggctcccacctcccccgacaccagccgtcggggctccttcggcgcgcctgcttcagcccccacgaagcccgccttgcctcgctccgcctcgtatctgaccaagcaccgacgcacgccatcggctaccaatctcgtcaccaatgggtccacgccggatataacccctccggggacatcggatgacctgaagagtctggcggccagtcacgggcctgtgcggcagtccccgcctccgattgccgactcgcaggcgatgcctccgggggctgtcatctcacctccggagtcgtctagtgaagacgagggagctgcagagctggaggagcggggccgagcgatcgagaacttgaaagaggccatcagcgcgattccccagtgtcgagtcggctccccgaacaggatttcgcccggcgacatcttgttgctcccgtcacaaatcgagaagctcgctgaagggcccaagcgtccaagcctggtcaccgctggattcaagtcggagcgtaagatactgcacactaggtccaataccgactccaacatctacttctccaaatcggccggcgcctcgttgagcggctcagaggacagcgacgagcaggatgagcctatcaagaagccccagatggtgcgcaagaagtctggcgagcttgtccgacctgctctgcgacccgcagcggctctgcgtcgcccctcgagcatgcccggcacgccgacattctccaaagctgtccactttgactcgcacttagagcacgtgcgacatttcttgcaagtagatcgcccgcttgccgtcagcgcaggctcgtcgcccgccgataattacgaaagcgataccgaatatcctttcaagactggcgacaagccaggagtccggtcaccgccttacgagtgggaaatcgtcatcaacaacttcccagccgagaccccgatccgcaagggtctgcctgtgcgactagagcgagtctggatgtctccggatcagaagtcgttgatcggctccatcgccgttgccaacttggctttccaaaagtttgtcgtttgcagattcaccttcgactactggaagacgacatctgaagttggagccgagttccaccacgaaatgcgacccaaagagacggaagcaggccacgacagattccagttctctatcaaactcgctgacattgccaatctcgaatccaagacgctttacttttgcattcgatataatgttaacggacaggagtactgggacaacaacggcaacgtcaacttccaggtcgatttccgcaagaagatgttgccccagaacggcaagaggggccttcagggggcctcctcgcgccctgccaatgccttgccacggagcaaccgtcgtaccaacccctccacggtggcacggcctcgatctatgcccgttggtgcattggacgagtttggccatgagtcgcacttggccgatttcgaccaacctatccacgagattcttggcgagactgggccaactttgcgattgaagagctccaagtcaacgacaagcattcccagcgacaacctatctagccggttgtcagcccctagcggtgcgtttgctaaccgatacgatttcggggcctcccttaatgcggccaagcaggctcataagagctccaatgcgaatcagcgtgatagcgacggtttgtacatgaaggcccataaaagggcccctttcacctccgagtcacccactgaaatgtctccgatctccccacgcacgatgcccacttccagctcccctctgggccaacaactcgtcgaatcaccggcacctggatctggccctgtggacacccttggagcggactcgtcttccaacagcatcgcttctgcctcctatgaagagattctcaacaagtattgctttttcaacggttccaagcagaccagccctcaactgaaggatggaactctgcaagtgggccgatacgacggcgctgatgacagctcttctcagagtatctctagcacaaattctagcttgaatggaagcccttcctccatggccaacagagtgcttggcgctactttgtcacagccttcgcgtcagaatttgggctcgttctttaccaatgcgtacacaacggccactggtgtctcatcatatgtgccggcagcgtcatcatcaggtggtcttcgctcggatgcaaacatatcttctgtgaactacgtcacggcctcgacaacacccaacgggaccgtccctgatcatggtgcataccataccgatcacctgcaagatagatttccgttcaatgtggattcccactctgtacgggtcatcaagagctag

SEQ ID NO: 34259 - protein, 919 aa, Muscodor strobelii
  misc_feature: SGI Peptide ID NO. 571836
  misc_feature (462)..(572): Pfam Id: PF03370 Pfam Desc: phosphatase regulatory subunit
  misc_feature (474)..(572): Pfam Id: PF03370 Pfam Desc: phosphatase regulatory subunit
  misc_feature (137)..(918): NCBI GI: 46124231 Blast Desc: FG06493.1 [Gibberella zeae PH-1]
  misc_feature (102)..(798): NCBI GI: 145609503 Blast Desc: MGG_07660 [Magnaporthe grisea 70-15] gi|145016873|gb|EDK01303.1| MGG_07660 [Magnaporthe grisea 70-15]
  misc_feature (137)..(918): NCBI GI: 171685130 Blast Desc: protein product [Podospora anserina] gi|170942526|emb|CAP68177.1| protein product [Podospora anserina]
  misc_feature (137)..(918): NCBI GI: 256726579 Blast Desc: carbohydrate-binding module family 21 [Nectria haematococca mpVI 77-13-4]
  misc_feature (137)..(826): NCBI GI: 154290203 Blast Desc: BC1G_15778 [Botryotinia fuckeliana B05.10] gi|150847834|gb|EDN23027.1| BC1G_15778 [Botryotinia fuckeliana B05.10]
  misc_feature (137)..(804): NCBI GI: 164425925 Blast Desc: NCU08779 [Neurospora crassa OR74A] gi|157071124|gb|EAA26986.2| [Neurospora crassa OR74A]
  misc_feature (229)..(826): NCBI GI: 116208646 Blast Desc: CHGG_03616 [Chaetomium globosum CBS 148.51] gi|88184213|gb|EAQ91681.1| CHGG_03616 [Chaetomium globosum CBS 148.51]
  misc_feature (307)..(728): NCBI GI: 261354223 Blast Desc: protein phosphatase regulator [Verticillium albo-atrum VaMs.102]
  misc_feature (235)..(824): NCBI GI: 156052433 Blast Desc: SS1G_06382 [Sclerotinia sclerotiorum 1980] gi|154704162|gb|EDO03901.1| SS1G_06382 [Sclerotinia sclerotiorum 1980]
  misc_feature (133)..(781): NCBI GI: 115384378 Blast Desc: conserved [Aspergillus terreus NIH2624] gi|114196428|gb|EAU38128.1| conserved [Aspergillus terreus NIH2624]
  misc_feature: Useful for introducing or modulating the production of volatile compounds
MPTEALRCERPVALRHHRPVELIAHCDPKTAHCPLALQPRHPISWMLTARRNMLTELFYHPGFYVDPDGPTSLKLAAAADLAACEPWYQIWRTRIFPCLPRPRPPPHPPKPASVVFADVHVTALLPSLPRQPKSLGMPYTPPSHRSPASSAPTSPDTSRRGSFGAPASAPTKPALPRSASYLTKHRRTPSATNLVTNGSTPDITPPGTSDDLKSLAASHGPVRQSPPPIADSQAMPPGAVISPPESSSEDEGAAELEERGRAIENLKEAISAIPQCRVGSPNRISPGDILLLPSQIEKLAEGPKRPSLVTAGFKSERKILHTRSNTDSNIYFSKSAGASLSGSEDSDEQDEPIKKPQMVRKKSGELVRPALRPAAALRRPSSMPGTPTFSKAVHFDSHLEHVRHFLQVDRPLAVSAGSSPADNYESDTEYPFKTGDKPGVRSPPYEWEIVINNFPAETPIRKGLPVRLERVWMSPDQKSLIGSIAVANLAFQKFVVCRFTFDYWKTTSEVGAEFHHEMRPKETEAGHDRFQFSIKLADIANLESKTLYFCIRYNVNGQEYWDNNGNVNFQVDFRKKMLPQNGKRGLQGASSRPANALPRSNRRTNPSTVARPRSMPVGALDEFGHESHLADFDQPIHEILGETGPTLRLKSSKSTTSIPSDNLSSRLSAPSGAFANRYDFGASLNAAKQAHKSSNANQRDSDGLYMKAHKRAPFTSESPTEMSPISPRTMPTSSSPLGQQLVESPAPGSGPVDTLGADSSSNSIASASYEEILNKYCFFNGSKQTSPQLKDGTLQVGRYDGADDSSSQSISSTNSSLNGSPSSMANRVLGATLSQPSRQNLGSFFTNAYTTATGVSSYVPAASSSGGLRSDANISSVNYVTASTTPNGTVPDHGAYHTDHLQDRFPFNVDSHSVRVIKS

SEQ ID NO: 34260 - DNA, 4281 bp, Muscodor strobelii
  misc_feature: SGI EST ID NO. CUFF.82087.0
  misc_feature: Variant of the nucleotide sequence at SEQ ID NO 34258
ctacaccactaggagcgttctccagtattctcccgcagacaattctcacctcttcttctgctcttttagtctctatcctccctcctcggccattcctcacctgcttccttggctgaccacctgcctctccctacctatcgacaacctcataggcaggccccggattgtacagcatcacttcacctcaatcccgcagtcgaggtctccaggcgttggctgtttcccccccgaaggagagagttctggttcgactctcgtcctctgctctggccgtccccatcatcttccggccacaccccacgatctctgccgtgtgtcgttaatttcgatctacacctaagaaagagctgctatcttcctggcgtgcttttctatttcaaggtaggatattttttcatttctttttcacagcaatttacagagcacgagtcgacgacggggtgggagggaatagccaggctagagaagggtgggaaaaaattacgaagctttggccggatagaagcaacaaagaattagtccacgcacaattctccccttgtcttcgaatcctcgaaatctcaacagcggctttttagatcttccctccattgcgcttcaacctcacgtctgggcattcctctctgccgccgtcaccacattgggggtgcgctgctctgccgtcactgaaaccggaagcctcgcgagaattgatatcatccaatgtcacatcggtctgtcagctaacattgataccgcagcagtctttgtgtgccgtgtttgcgtgtgactagcgtttgacattcaattctcatcctgctattccacagtcgacgtcaaaagagcggtcgatcttttctctcattcgccgagacaccccacccggacatctctggaactgtggcgtcgtgcactgttgctggaatactgcctttgcactcgactcacaggagatcccgttcagtttcggccgctgcaaattagcttggacagagacgctcgcaatagcttctgttccattaccattgttgcttctacgtagaccccgacggccctactagcttgaagcttgctgccgccgccgatctagctgcgtgtgagccctggtaccagatctggcgcaccagaatattcccctgcctgcctcgccccagaccgcctccgcatccgccgaagcctgccagcgttgtcttcgccgacgtccacgtcaccgcccttctaccctcactcccgcggcaacccaaatccctggggatgccgtacactccgccctcccaccgttctcccgcttcctcggctcccacctcccccgacaccagccgtcggggctccttcggcgcgcctgcttcagcccccacgaagcccgccttgcctcgctccgcctcgtatctgaccaagcaccgacgcacgccatcggctaccaatctcgtcaccaatgggtccacgccggatataacccctccggggacatcggatgacctgaagagtctggcggccagtcacgggcctgtgcggcagtccccgcctccgattgccgactcgcaggcgatgcctccgggggctgtcatctcacctccggagtcgtctagtgaagacgagggagctgcagagctggaggagcggggccgagcgatcgagaacttgaaagaggccatcagcgcgattccccagtgtcgagtcggctccccgaacaggatttcgcccggcgacatcttgttgctcccgtcacaaatcgagaagctcgctgaagggcccaagcgtccaagcctggtcaccgctggattcaagtcggagcgtaagatactgcacactaggtccaataccgactccaacatctacttctccaaatcggccggcgcctcgttgagcggctcagaggacagcgacgagcaggatgagcctatcaagaagccccagatggtgcgcaagaagtctggcgagcttgtccgacctgctctgcgacccgcagcggctctgcgtcgcccctcgagcatgcccggcacgccgacattctccaaagctgtccactttgactcgcacttagagcacgtgcgacatttcttgcaagtagatcgcccgcttgccgtcagcgcaggctcgtcgcccgccgataattacgaaagcgataccgaatatcctttcaagactggcgacaagccaggagtccggtcaccgccttacgagtgggaaatcgtcatcaacaacttcccagccgagaccccgatccgcaagggtctgcctgtgcgactagagcgagtctggatgtctccggatcagaagtcgttgatcggctccatcgccgttgccaacttggctttccaaaagtttgtcgtttgcagattcaccttcgactactggaagacgacatctgaagttggagccgagttccaccacgaaatgcgacccaaagagacggaagcaggccacgacagattccagttctctatcaaactcgctgacattgccaatctcgaatccaagacgctttacttttgcattcgatataatgttaacggacaggagtactgggacaacaacggcaacgtcaacttccaggtcgatttccgcaagaagatgttgccccagaacggcaagaggggccttcagggggcctcctcgcgccctgccaatgccttgccacggagcaaccgtcgtaccaacccctccacggtggcacggcctcgatctatgcccgttggtgcattggacgagtttggccatgagtcgcacttggccgatttcgaccaacctatccacgagattcttggcgagactgggccaactttgcgattgaagagctccaagtcaacgacaagcattcccagcgacaacctatctagccggttgtcagcccctagcggtgcgtttgctaaccgatacgatttcggggcctcccttaatgcggccaagcaggctcataagagctccaatgcgaatcagcgtgatagcgacggtttgtacatgaaggcccataaaagggcccctttcacctccgagtcacccactgaaatgtctccgatctccccacgcacgatgcccacttccagctcccctctgggccaacaactcgtcgaatcaccggcacctggatctggccctgtggacacccttggagcggactcgtcttccaacagcatcgcttctgcctcctatgaagagattctcaacaagtattgctttttcaacggttccaagcagaccagccctcaactgaaggatggaactctgcaagtgggccgatacgacggcgctgatgacagctcttctcagagtatctctagcacaaattctagcttgaatggaagcccttcctccatggccaacagagtgcttggcgctactttgtcacagccttcgcgtcagaatttgggctcgttctttaccaatgcgtacacaacggccactggtgtctcatcatatgtgccggcagcgtcatcatcaggtggtcttcgctcggatgcaaacatatcttctgtgaactacgtcacggcctcgacaacacccaacgggaccgtccctgatcatggtgcataccataccgatcacctgcaagatagatttccgttcaatgtggattcccactctgtacgggtcatcaagagctaggggaagtgactggattgtatgaatctttcgcctacaaaaagtttgggtctggttgatgaacttcataagctatgctctctatacccttctcttttgatattttcggcgttacggagcatgttagatcagtagggatattctgatttgtagcatcaaggcgttggtggtggtttttgtttcaccatgatacccgcacgtacacgacagggcgggtgtgtgcacatttcatcaccttgatgcacatacagaggaacgtggaactaagattggaagtgtgtggtggtaatgcataatacggtccctacaccgaagtctacgtcgccgcggtgagttagatcgtggcttctgcttctgacagcaaaggttgggccttttgacccgctcagagttgggcaaaattcggacctgggcattatcacggtgaagatttgggatcctgggcaagagattgccgctgatagagaagaggggaggtaacacccctcacgtccttgggcaagagaagcaaaggcaacatgtgacaatgcttccgtatggattgctcggctgcatgctttgcttgtcccaagcaagaaatggaaagggaaggatttggtacggaagggaacggtatggaaaagaaattatattattagccaacggtttaaaattgattgaatatatctgccaaagcttgtaagagccatctattccgtg

SEQ ID NO: 34261 - DNA, 588 bp, Muscodor strobelii
  misc_feature: SGI cDNA ID NO. 571837
  misc_feature: Elevated expression when VOC is produced
  misc_feature: Encodes the peptide sequence at SEQ ID NO 34262
atgaagcgcgacgactcgtctctcatccggaccataaccatagtacgccctcaatcaacaatcatcgctacatggactctcggaaatggcgcgacggaccctaccgagacgccaattgctgttgtcccagtttccaagtcatcgtcatctggtcgctctcgatcctatcgctcgagaagttcgtcgagtcgaagcgggtctggatctaccgaaaagagtagcagtcgcagttcgcgcagctctggcggctcaacccgatcaggcggaagcggcgagtcggcagcgagcgaggctatggcagaaccatggcacccacctgcacaacggatgccaggcatgcctcctcaggctgttcctcgatttggagggcctttcggcggcggcccgcctggagcgacgcctacaccggggcttggaccgggaggttttgggggaccaccacctggagtaggaatggcatttcccatgggtcgcggaggacctcctcctggcatgatgggaagaggcggaccgccacctgtgcgttcagggcctccgccaataccaccacttgttggaggtggtggcccgccggttatgccccaataa

SEQ ID NO: 34262 - protein, 195 aa, Muscodor strobelii
  misc_feature: SGI Peptide ID NO. 571837
  misc_feature: Useful for introducing or modulating the production of volatile compounds
MKRDDSSLIRTITIVRPQSTIIATWTLGNGATDPTETPIAVVPVSKSSSSGRSRSYRSRSSSSRSGSGSTEKSSSRSSRSSGGSTRSGGSGESAASEAMAEPWHPPAQRMPGMPPQAVPRFGGPFGGGPPGATPTPGLGPGGFGGPPPGVGMAFPMGRGGPPPGMMGRGGPPPVRSGPPPIPPLVGGGGPPVMPQ

SEQ ID NO: 34263 - DNA, 903 bp, Muscodor strobelii
  misc_feature: SGI cDNA ID NO. 571838
  misc_feature: Elevated expression when VOC is produced
  misc_feature: Encodes the peptide sequence at SEQ ID NO 34264
atggacagactggaacaaataactggctggcgccgacaaggccacagcagacaacgccagccatcactactagcctattcatctctccctacaacaccgaatccgtcagaatccatcctatatccgagaccctcctcttcacatctctccttatcaaaacaccttgcggatttcacccttggttttgcggacggtcttactgtcccattcgcattaacagcaggtctctcatctcttgggaataccaatactgtcatatttgcgggctctgcggagctctgcgcgggatgcattagcatgggcataggcggctatctagccaccaagggagaagagagacgcgatgccctaaaagacgatggcgaagacgaggaaattgaaaagggctctgaaagtgacgagcaaagggatatacgaaattatcttgccccgctccagctttctgccaacttactcgagcttatcactgcgcatgtcgacagctctccaggtatcaccgagcagctacggatgattggtctctcgaccgcttccgaggagcccgagaagatctcgcccattatgtcaggactctcggtagctctcggatatctgctcggtggtctgttgccactcactccctatttcttcgttcacgaccttgcgactggcgtgcgctggagcttcgctatctgtctactagctcttttcatcttcggattttcgaaagagtacgttctgcaggctaaaccaccaatcgctaggtggagctctatgcaaacaaaacgtcgcctaggacagtggaacttgatcaaacccagcttgctggagggcttgaggatggtaatcttagggggcttggccgctgtcgctgctgtgctttgcgtcaaattgtttgagaatattgtctcagatgccagctga

SEQ ID NO: 34264 - protein, 300 aa, Muscodor strobelii
  misc_feature: SGI Peptide ID NO. 571838
  misc_feature (54)..(291): Pfam Id: PF01988 Pfam Desc: Integral membrane protein DUF125
  misc_feature (179)..(239): Pfam Id: PF01988 Pfam Desc: Integral membrane protein DUF125
  misc_feature (54)..(112): Pfam Id: PF01988 Pfam Desc: Integral membrane protein DUF125
  misc_feature (52)..(295): NCBI GI: 171685120 Blast Desc: protein product [Podospora anserina] gi|170942521|emb|CAP68172.1| protein product [Podospora anserina]
  misc_feature (55)..(300): NCBI GI: 145252336 Blast Desc: An16g03690 [Aspergillus niger] gi|134083229|emb|CAK42867.1| protein product [Aspergillus niger]
  misc_feature (53)..(278): NCBI GI: 256722769 Blast Desc: NECHADRAFT_64595 [Nectria haematococca mpVI 77-13-4]
  misc_feature (55)..(300): NCBI GI: 169770461 Blast Desc: [Aspergillus oryzae RIB40] gi|83767559|dbj|BAE57698.1| protein product [Aspergillus oryzae]
  misc_feature (53)..(297): NCBI GI: 119491935 Blast Desc: vacuolar iron transporter Ccc1, [Neosartorya fischeri NRRL 181] gi|119411622|gb|EAW21565.1| vacuolar iron transporter Ccc1, [Neosartorya fischeri NRRL 181]
  misc_feature (53)..(297): NCBI GI: 70999810 Blast Desc: vacuolar iron transporter Ccc1 [Aspergillus fumigatus Af293] gi|66852259|gb|EAL92584.1| vacuolar iron transporter Ccc1, [Aspergillus fumigatus Af293]
  misc_feature (53)..(297): NCBI GI: 159127636 Blast Desc: vacuolar iron transporter Ccc1, [Aspergillus fumigatus A1163]
  misc_feature (43)..(293): NCBI GI: 115396118 Blast Desc: conserved [Aspergillus terreus NIH2624] gi|114193267|gb|EAU34967.1| conserved [Aspergillus terreus NIH2624]
  misc_feature (47)..(297): NCBI GI: 121705468 Blast Desc: vacuolar iron transporter Ccc1, [Aspergillus clavatus NRRL 1] gi|119399143|gb|EAW09571.1| vacuolar iron transporter Ccc1, [Aspergillus clavatus NRRL 1]
  misc_feature (50)..(241): NCBI GI: 46126603 Blast Desc: FG07679.1 [Gibberella zeae PH-1]
  misc_feature: Useful for introducing or modulating the production of volatile compounds
MDRLEQITGWRRQGHSRQRQPSLLAYSSLPTTPNPSESILYPRPSSSHLSLSKHLADFTLGFADGLTVPFALTAGLSSLGNTNTVIFAGSAELCAGCISMGIGGYLATKGEERRDALKDDGEDEEIEKGSESDEQRDIRNYLAPLQLSANLLELITAHVDSSPGITEQLRMIGLSTASEEPEKISPIMSGLSVALGYLLGGLLPLTPYFFVHDLATGVRWSFAICLLALFIFGFSKEYVLQAKPPIARWSSMQTKRRLGQWNLIKPSLLEGLRMVILGGLAAVAAVLCVKLFENIVSDAS

SEQ ID NO: 34265 - DNA, 2367 bp, Muscodor strobelii
  misc_feature: SGI EST ID NO. CUFF.81206.0
  misc_feature: Variant of the nucleotide sequence at SEQ ID NO 34263
tgcatctcggaagcctcgctatcgccactcacaaagtcctttggtcccgccgagcgcctgcagtagataaccccggcttcgacccaagtatccttgcatgctttctaggccgatcgtatctgcttgttggaatacaccccggagcacctgccggttgtctcccaggggattggtcaatcactccttcctgcgccttcgtgtactccgaggaccataatcatctttccagatactttaattggtcgcccatctcaacgccgcatcatcttctcaacttattgaccctaccaaccgagaacgtagcgattatatcacgatcttactggaacgcgaagtcgatatctcttctgcatttggtgccggatcaatgagcttatcaaagctcaagcttcgcccttaacttgggtggccaagcgtggaagcatctccatcctgcctttcgcattaggaggctaaacacatcatcactttcgcaaatcaaagcaccatttacaccatttctatcatttcaatagtacattcgatggacagactggaacaaataactggctggcgccgacaaggccacagcagacaacgccagccatcactactagcctattcatctctccctacaacaccgaatccgtcagaatccatcctatatccgagaccctcctcttcacatctctccttatcaaaacaccttgcggatttcacccttggttttgcggacggtcttactgtcccattcgcattaacagcaggtctctcatctcttgggaataccaatactgtcatatttgcgggctctgcggagctctgcgcgggatgcattagcatgggcataggcggctatctagccaccaagggagaagagagacgcgatgccctaaaagacgatggcgaagacgaggaaattgaaaagggctctgaaagtgacgagcaaagggatatacgaaattatcttgccccgctccagctttctgccaacttactcgagcttatcactgcgcatgtcgacagctctccaggtatcaccgagcagctacggatgattggtctctcgaccgcttccgaggagcccgagaagatctcgcccattatgtcaggactctcggtagctctcggatatctgctcggtggtctgttgccactcactccctatttcttcgttcacgaccttgcgactggcgtgcgctggagcttcgctatctgtctactagctcttttcatcttcggattttcgaaagagtacgttctgcaggctaaaccaccaatcgctaggtggagctctatgcaaacaaaacgtcgcctaggacagtggaacttgatcaaacccagcttgctggagggcttgaggatggtaatcttagggggcttggccgctgtcgctgctgtgctttgcgtcaaattgtttgagaatattgtctcagatgccagctgaaacctcgcccacacttgaagcccgatagaatcatttcattagcattcattatcctgccctgatatacaattgcgtccgtcttccattcattattggggcataaccggcgggccaccacctccaacaagtggtggtattggcggaggccctgaacgcacaggtggcggtccgcctcttcccatcatgccaggaggaggtcctccgcgacccatgggaaatgccattcctactccaggtggtggtcccccaaaacctcccggtccaagccccggtgtaggcgtcgctccaggcgggccgccgccgaaaggccctccaaatcgaggaacagcctgaggaggcatgcctggcatccgttgtgcaggtgggtgccatggttctgccatagcctcgctcgctgccgactcgccgcttccgcctgatcgggttgagccgccagagctgcgcgaactgcgactgctactcttttcggtagatccagacccgcttcgactcgacgaacttctcgagcgataggatcgagagcgacctgcgaagatgcattagcgttgtcaaaggaacaagtatgtttatcgcatgaatggcataggagagtaatcacctcggcggcagcaaacccagacgatgagaagaaatactataacgacgacaactgcactcaaaatacccccgacactagctgagcttagaccagatgacgatgacttggaaactgggacaacagcaattggcgtctcggtagggtccgtcgcgccatttccgagagtccatgtagcgatgattgttgattgagggcgtactatggttatggtccggatgagagacgagtcgtcgcgcttcatgcctgtgtatttatatgtagtatacatatcccatgaaacagaaaatgatatctcggtattttttaaaccacaacaggtcttgtttccgtgtcaacctcttta

SEQ ID NO: 34266 - DNA, 1221 bp, Muscodor strobelii
  misc_feature: SGI cDNA ID NO. 571839
  misc_feature: Elevated expression when VOC is produced
  misc_feature: Encodes the peptide sequence at SEQ ID NO 34267
atgcactccgttatatcctctgtgttgctcctagcgggcgctgttgccgctcaggagaatatgtacactgcgacggctacgaaatcagtcgctgccgctgccgctaccgccttgacatacagccctactagcgacgtgaagggcaaggtcttcgatcgctatgtcgttatctggctcgagaacactgattatgacatggctgctggtgacccgaatttggcatggcttgcttcgaaaggtcaaactctcaggaaataccatgccgtcactcatccttcccagcccaactatgctgcagccattggaggtgactattttggtatgcagaatgacgacttcgatcagattgtcgccaacgtctccaccactatcgacctacttgaagataagggaatctcgtggggtcactatcaagaaggcatgcctttctccggcttcgaagctaattgggtaaatcagcagactgggcggaatatgtatgttcggaagcataacccagcaattaattacaactctgttgctggtaaattggatcgtcttgctctggacaagaacttaaccatgttctacaaggatctcgagaacgagacgctgcctcaatggatgttcatcacacccaacatgacgtctgatggtcacgattctacaatcactgttgctggcacatggactcgaaactttctcgagcctctgcttgacgatagtcgcttcatgaacaacacattggtcatagtcactttcgatgagaacgagacttatacactgaagaacaacattatggccatcttgcttggcgacgcgctcccaaccgaacttgtaggaacaaccgacgataactattacaaccactacagcaacatcgcgactgttgaggccaattgggaccttcatactctcggccgttgggacgttggtgccaacgtgttcaagttcgttgctgatgtgactggcgacaccgtccgtgaatggagcggctccgttccgtttgacgacatctacttcaacagctcctatgccggccgtttcaacgaatatggtgggaatcaggaataccctggtcctaacctaggcgcttgcagcccctccaagcgcactgttctccccagcattaaggctacctgggccaacagcaccaaccctgtatattacacaaacagactcgagattccagatggacagcaccctcctgctggctatactccacttgacttcctaacttaa

SEQ ID NO: 34267 - protein, 406 aa, Muscodor strobelii
  misc_feature: SGI Peptide ID NO. 571839
  misc_feature (51)..(297): Pfam Id: PF04185 Pfam Desc: Phosphoesterase family
  misc_feature (73)..(297): Pfam Id: PF04185 Pfam Desc: Phosphoesterase family
  misc_feature (32)..(399): NCBI GI: 169595330 Blast Desc: SNOG_00403 [Phaeosphaeria nodorum SN15] gi|160701072|gb|EAT91898.2| SNOG_00403 [Phaeosphaeria nodorum SN15]
  misc_feature (41)..(402): NCBI GI: 46126601 Blast Desc: FG07678.1 [Gibberella zeae PH-1]
  misc_feature (24)..(392): NCBI GI: 154317964 Blast Desc: BC1G_02965 [Botryotinia fuckeliana B05.10] gi|150843623|gb|EDN18816.1| BC1G_02965 [Botryotinia fuckeliana B05.10]
  misc_feature (1)..(396): NCBI GI: 170113334 Blast Desc: acid phosphatase [Laccaria bicolor S238N-H82] gi|164637228|gb|EDR01515.1| acid phosphatase [Laccaria bicolor S238N-H82]
  misc_feature (23)..(392): NCBI GI: 156050107 Blast Desc: SS1G_07639 [Sclerotinia sclerotiorum 1980] gi|154692041|gb|EDN91779.1| SS1G_07639 [Sclerotinia sclerotiorum 1980]
  misc_feature (36)..(396): NCBI GI: 37999237 Blast Desc: acid phosphatase [Pholiota nameko] gi|37999239|dbj|BAD00140.1| acid phosphatase [Pholiota nameko]
  misc_feature (30)..(388): NCBI GI: 45188111 Blast Desc: ADR238Cp [Ashbya gossypii ATCC 10895] gi|44982928|gb|AAS52158.1| ADR238Cp [Ashbya gossypii ATCC 10895]
  misc_feature (28)..(382): NCBI GI: 39974603 Blast Desc: MGG_00552 [Magnaporthe grisea 70-15] gi|145018547|gb|EDK02826.1| MGG_00552 [Magnaporthe grisea 70-15]
  misc_feature (30)..(376): NCBI GI: 50304485 Blast Desc: PHOX_KLULA [Kluyveromyces lactis] gi|585687|sp|P08540.2|PHOX_KLULA RecName: Full= acid phosphatase gi|49641324|emb|CAH02585.1| KLLA0B14839p [Kluyveromyces lactis]
  misc_feature (30)..(376): NCBI GI: 1325996 Blast Desc: protein product [Kluyveromyces lactis]
  misc_feature (45)..(374): SWISSPROT Homolog: EC 3.1.3.2 Acid phosphatase
  misc_feature: Useful for introducing or modulating the production of volatile compounds
MHSVISSVLLLAGAVAAQENMYTATATKSVAAAAATALTYSPTSDVKGKVFDRYVVIWLENTDYDMAAGDPNLAWLASKGQTLRKYHAVTHPSQPNYAAAIGGDYFGMQNDDFDQIVANVSTTIDLLEDKGISWGHYQEGMPFSGFEANWVNQQTGRNMYVRKHNPAINYNSVAGKLDRLALDKNLTMFYKDLENETLPQWMFITPNMTSDGHDSTITVAGTWTRNFLEPLLDDSRFMNNTLVIVTFDENETYTLKNNIMAILLGDALPTELVGTTDDNYYNHYSNIATVEANWDLHTLGRWDVGANVFKFVADVTGDTVREWSGSVPFDDIYFNSSYAGRFNEYGGNQEYPGPNLGACSPSKRTVLPSIKATWANSTNPVYYTNRLEIPDGQHPPAGYTPLDFLT

SEQ ID NO: 34268 - DNA, 1522 bp, Muscodor strobelii
  misc_feature: SGI EST ID NO. CUFF.81212.0
  misc_feature: Variant of the nucleotide sequence at SEQ ID NO 34266
aggcgaagtcatttctggaagttcgtcggcttgtgaataaatactccctcttcgtaatattgctagtcctgcttatcagaggtctcgtcttcacacgctctttttagttctctaggtctctgttcgaggttgttgtgcaaacacaatagcggcaagtcaaaatgcactccgttatatcctctgtgttgctcctagcgggcgctgttgccgctcaggagaatatgtacactgcgacggctacgaaatcagtcgctgccgctgccgctaccgccttgacatacagccctactagcgacgtgaagggcaaggtcttcgatcgctatgtcgttatctggctcgagaacactgattatgacatggctgctggtgacccgaatttggcatggcttgcttcgaaaggtcaaactctcaggaaataccatgccgtcactcatccttcccagcccaactatgctgcagccattggaggtgactattttggtatgcagaatgacgacttcgatcagattgtcgccaacgtctccaccactatcgacctacttgaagataagggaatctcgtggggtcactatcaagaaggcatgcctttctccggcttcgaagctaattgggtaaatcagcagactgggcggaatatgtatgttcggaagcataacccagcaattaattacaactctgttgctggtaaattggatcgtcttgctctggacaagaacttaaccatgttctacaaggatctcgagaacgagacgctgcctcaatggatgttcatcacacccaacatgacgtctgatggtcacgattctacaatcactgttgctggcacatggactcgaaactttctcgagcctctgcttgacgatagtcgcttcatgaacaacacattggtcatagtcactttcgatgagaacgagacttatacactgaagaacaacattatggccatcttgcttggcgacgcgctcccaaccgaacttgtaggaacaaccgacgataactattacaaccactacagcaacatcgcgactgttgaggccaattgggaccttcatactctcggccgttgggacgttggtgccaacgtgttcaagttcgttgctgatgtgactggcgacaccgtccgtgaatggagcggctccgttccgtttgacgacatctacttcaacagctcctatgccggccgtttcaacgaatatggtgggaatcaggaataccctggtcctaacctaggcgcttgcagcccctccaagcgcactgttctccccagcattaaggctacctgggccaacagcaccaaccctgtatattacacaaacagactcgagattccagatggacagcaccctcctgctggctatactccacttgacttcctaacttaagggatcttgacggagctgtcgataaagtaaatcaagacttgatgtaaaaggctgggcgggttatagatgtcgaaatgtatataattggaatcacaaactgttggttacatcaattgtcctccttaacacttcatgagcgc

SEQ ID NO: 34269 - DNA, 1365 bp, Muscodor strobelii
  misc_feature: SGI cDNA ID NO. 571840
  misc_feature: Encodes the peptide sequence at SEQ ID NO 34270
atggcagtgtcacgtcgccgaaagagatcgcctcaaagcgaggatggttccgtggcaaagaaacggagaacattactcaagctttcgggctgtgtgtcaagtcacacagttcagaagccgaataacaaaaaatttagcccggcatacaggaagaagcagacaggcggtactcgtcttcagaccatatcaacgctcaacgctctatctccagcttcagtaccgctcatcgatcttactgttgagggcaatccggagagcctcatacgtgttatcacaaagaaaatcgaagtcatcgacttgactaccgatccagcacccgaacgacatctgccgcctcctccacctatgtcaggtcgcgtacccagtttcagattcggcgaaccatttaccataaaaggcagagtctttaagccgaagacctatgatacatcatatttcttcgactctgtcagccgaaatcaggcagccaggtttcctttggaaatgaaggatccaaacgaatgcctctcgcttcgcgcttccacgtttcctgtttcgaggtttcaaaactcctcgggcggtggcatagatccaaagctcaacagcaagcacggcataattccacatggctttctcaaacggaaatgtcccacaattatctacgacattccggaactgtctgacatgatcaatgctcatctcagtgggcggatggaccgccagagtgaattcagctcatgggcagctgatatatgggtggcaaacagcttttgccttgggtcctcgggcagacatatcgcagttcttgatacaagtcgactggaaagtcacgttcgcgcttaccatgtcccgtctctttacaaagcagggcttgctactggaacatatcctcatgagtaccttgtctacggacccgtacgtggtgcagcatttcattgcgtacgatatagagagcttgttaatgctggtatcgaaacaattgagaaacattctctaggtttttcgaggcccgctgatttcgagacgagcgtcaacaaggccaaggagatagcgaagcttttctgcccggctgagatatcgagttcagaaatctttatcacagtcaccgttgcactgatatgcagagatgcgcctacatctggtgagggccgtgatcatgtactcaatactttgctcaagcacttatctggagatatgaaggctattgatcttccttctccgggacacaaagcacagcacctcggcctcgtcaaccctaatacttataccagtggccctcgcgacaggctttggatcgcgctcgacgttctccgacagattgaggatgttattaaaaaggatcgagcgaatgcagtaggccaggtcgacggcgctaaaacacgatga

SEQ ID NO: 34270 - protein, 454 aa, Muscodor strobelii
  misc_feature: SGI Peptide ID NO. 571840
  misc_feature (147)..(317): NCBI GI: 169599609 Blast Desc: SNOG_02628 [Phaeosphaeria nodorum SN15] gi|111068239|gb|EAT89359.1| SNOG_02628 [Phaeosphaeria nodorum SN15]
  misc_feature (170)..(318): NCBI GI: 189191812 Blast Desc: conserved [Pyrenophora tritici-repentis Pt-1C-BFP] gi|187973851|gb|EDU41350.1| conserved [Pyrenophora tritici-repentis Pt-1C-BFP]
MAVSRRRKRSPQSEDGSVAKKRRTLLKLSGCVSSHTVQKPNNKKFSPAYRKKQTGGTRLQTISTLNALSPASVPLIDLTVEGNPESLIRVITKKIEVIDLTTDPAPERHLPPPPPMSGRVPSFRFGEPFTIKGRVFKPKTYDTSYFFDSVSRNQAARFPLEMKDPNECLSLRASTFPVSRFQNSSGGGIDPKLNSKHGIIPHGFLKRKCPTIIYDIPELSDMINAHLSGRMDRQSEFSSWAADIWVANSFCLGSSGRHIAVLDTSRLESHVRAYHVPSLYKAGLATGTYPHEYLVYGPVRGAAFHCVRYRELVNAGIETIEKHSLGFSRPADFETSVNKAKEIAKLFCPAEISSSEIFITVTVALICRDAPTSGEGRDHVLNTLLKHLSGDMKAIDLPSPGHKAQHLGLVNPNTYTSGPRDRLWIALDVLRQIEDVIKKDRANAVGQVDGAKTR

SEQ ID NO: 34271 - DNA, 1626 bp, Muscodor strobelii
  misc_feature: SGI cDNA ID NO. 571841
  misc_feature: Encodes the peptide sequence at SEQ ID NO 34272
atggcaccaccaagattcaaggcccctaagaagaaccaaggcgcaacaagccttgttgacgcagaggattatcttgtacagggtgacttgcatgaagaggcaatgcgaaagcatcgcgtcggagatcccgtgaaggcgttgcggttcgccgatagagctctcgatgtctatgcccaggggctggctaaatttccccgtagctttgatctagcatataacaaagcacggctcgaacttgagaaggcaactgatgatgagctatcagaagtgccccaaggttcgctcatcacggtactgcagcaagcgcttgagtcacatcagtttgcacgaaatatagacccacttcatgcggacacacttttcaacatggcgcaagtgttgacaagcatggccgagattcgtgcacaagacgacgagacagatgacacggaggcacttcaaaacatccagcaagctctcgagtttcagagccagtgtttcgacctgcagctcaagaacttcttacagaatcgtctagagctggaacaagcaatgcgcgagtccgcggagatccaatcacgaaccaacagtatccaggacacacataactcggcaacggaacctcaaaattccaaccaggaggagcaatgggttagcatcgaggaaccagtcactgcctcaactttgcttgacaccattattgcgcaaatagagaccctgacccttctctgtagcgtcctcaactcctcgttctcaccagtcacggcttcacgaggtcttgcaactccgacatcgatggtctggattgactcatattccgcgaagctattgacgcagactttaccatccttgttgagtgaaaatcgcgacactctcgaggcgcgattacccgaagtagcattacctcgggcgatattcacaagcaactaccttgagctttccctccgaatgtccacgatcaccgtcgagaaatacaagcaagaattagactccgctttctcgcagccagggatcgacatgacgtctgcaaatatcttgatagaacgtactcaggccctgatgttattcaatttaggacttgctgatcgtgcgattattttggcgaacgaaactccaggggaagctcatgcgacactgagatggaagattttacttgaagcacaatctcatatcgccactattgcgaacgataaacatgctaacaaccaactcatcggaaagactcataagcgtaggggtgatatctcattgttgctccagatgcttgcatatccgcctgcttcgtatccgcaggcgagaacgacgtcaccacagcttttgaagaacgcggaagtctattataggaacgctgggaagcttctagatgccgctgggagctcaactaagaaagacaaaatcatttgccaactgagaggtggcgtggtcactgttctgcaacaagttctcgcggcgcagagctctgctagtagtagcacaggccaagacaatacaggggcattgatcgggctgcaagcgtcccgcgagcaaattggacaagcattacaacctgtcctgaatgtgaagtcggaacactgggttcgtgatcagattgaagagatggtgacggcgggtttgatcagagaagaaattttctcggccgtgttataa

SEQ ID NO: 34272 - protein, 541 aa, Muscodor strobelii
  misc_feature: SGI Peptide ID NO. 571841
  misc_feature (21)..(462): NCBI GI: 212539694 Blast Desc: conserved [Penicillium marneffei ATCC 18224] gi|210067301|gb|EEA21393.1| conserved [Penicillium marneffei ATCC 18224]
  misc_feature (21)..(496): NCBI GI: 242803914 Blast Desc: conserved [Talaromyces stipitatus ATCC 10500] gi|218717614|gb|EED17035.1| conserved [Talaromyces stipitatus ATCC 10500]
  misc_feature (25)..(453): NCBI GI: 238843299 Blast Desc: conserved [Microsporum canis CBS 113480]
  misc_feature (10)..(480): NCBI GI: 119189345 Blast Desc: CIMG_04720 [Coccidioides immitis RS]
  misc_feature (10)..(480): NCBI GI: 258576397 Blast Desc: conserved [Uncinocarpus reesii 1704] gi|237902646|gb|EEP77047.1| conserved [Uncinocarpus reesii 1704]
  misc_feature (21)..(452): NCBI GI: 226287377 Blast Desc: conserved [Paracoccidioides brasiliensis Pb18]
  misc_feature (21)..(467): NCBI GI: 226279068 Blast Desc: conserved [Paracoccidioides brasiliensis Pb01]
  misc_feature (21)..(446): NCBI GI: 239609494 Blast Desc: conserved [Ajellomyces dermatitidis ER-3]
  misc_feature (21)..(446): NCBI GI: 261196540 Blast Desc: conserved [Ajellomyces dermatitidis SLH14081] gi|239595918|gb|EEQ78499.1| conserved [Ajellomyces dermatitidis SLH14081]
  misc_feature (1)..(462): NCBI GI: 115432966 Blast Desc: conserved [Aspergillus terreus NIH2624] gi|114189472|gb|EAU31172.1| conserved [Aspergillus terreus NIH2624]
MAPPRFKAPKKNQGATSLVDAEDYLVQGDLHEEAMRKHRVGDPVKALRFADRALDVYAQGLAKFPRSFDLAYNKARLELEKATDDELSEVPQGSLITVLQQALESHQFARNIDPLHADTLFNMAQVLTSMAEIRAQDDETDDTEALQNIQQALEFQSQCFDLQLKNFLQNRLELEQAMRESAEIQSRTNSIQDTHNSATEPQNSNQEEQWVSIEEPVTASTLLDTIIAQIETLTLLCSVLNSSFSPVTASRGLATPTSMVWIDSYSAKLLTQTLPSLLSENRDTLEARLPEVALPRAIFTSNYLELSLRMSTITVEKYKQELDSAFSQPGIDMTSANILIERTQALMLFNLGLADRAIILANETPGEAHATLRWKILLEAQSHIATIANDKHANNQLIGKTHKRRGDISLLLQMLAYPPASYPQARTTSPQLLKNAEVYYRNAGKLLDAAGSSTKKDKIICQLRGGVVTVLQQVLAAQSSASSSTGQDNTGALIGLQASREQIGQALQPVLNVKSEHWVRDQIEEMVTAGLIREEIFSAVL

SEQ ID NO: 34273 - DNA, 1889 bp, Muscodor strobelii
  misc_feature: SGI EST ID NO. CUFF.81246.0
  misc_feature: Variant of the nucleotide sequence at SEQ ID NO 34271
tttcaatcgacaccattcttttaagaaatcttctaagtatccgaataacagaacttgtttctctcattctgatccgtgtgcgtcatccactatggcaccaccaagattcaaggcccctaagaagaaccaaggcgcaacaagccttgttgacgcagaggattatcttgtacagggtgacttgcatgaagaggcaatgcgaaagcatcgcgtcggagatcccgtgaaggcgttgcggttcgccgatagagctctcgatgtctatgcccaggggctggctaaatttccccgtagctttgatctagcatataacaaagcacggctcgaacttgagaaggcaactgatgatgagctatcagaagtgccccaaggttcgctcatcacggtactgcagcaagcgcttgagtcacatcagtttgcacgaaatatagacccacttcatgcggacacacttttcaacatggcgcaagtgttgacaagcatggccgagattcgtgcacaagacgacgagacagatgacacggaggcacttcaaaacatccagcaagctctcgagtttcagagccagtgtttcgacctgcagctcaagaacttcttacagaatcgtctagagctggaacaagcaatgcgcgagtccgcggagatccaatcacgaaccaacagtatccaggacacacataactcggcaacggaacctcaaaattccaaccaggaggagcaatgggttagcatcgaggaaccagtcactgcctcaactttgcttgacaccattattgcgcaaatagagaccctgacccttctctgtagcgtcctcaactcctcgttctcaccagtcacggcttcacgaggtcttgcaactccgacatcgatggtctggattgactcatattccgcgaagctattgacgcagactttaccatccttgttgagtgaaaatcgcgacactctcgaggcgcgattacccgaagtagcattacctcgggcgatattcacaagcaactaccttgagctttccctccgaatgtccacgatcaccgtcgagaaatacaagcaagaattagactccgctttctcgcagccagggatcgacatgacgtctgcaaatatcttgatagaacgtactcaggccctgatgttattcaatttaggacttgctgatcgtgcgattattttggcgaacgaaactccaggggaagctcatgcgacactgagatggaagattttacttgaagcacaatctcatatcgccactattgcgaacgataaacatgctaacaaccaactcatcggaaagactcataagcgtaggggtgatatctcattgttgctccagatgcttgcatatccgcctgcttcgtatccgcaggcgagaacgacgtcaccacagcttttgaagaacgcggaagtctattataggaacgctgggaagcttctagatgccgctgggagctcaactaagaaagacaaaatcatttgccaactgagaggtggcgtggtcactgttctgcaacaagttctcgcggcgcagagctctgctagtagtagcacaggccaagacaatacaggggcattgatcgggctgcaagcgtcccgcgagcaaattggacaagcattacaacctgtcctgaatgtgaagtcggaacactgggttcgtgatcagattgaagagatggtgacggcgggtttgatcagagaagaaattttctcggccgtgttataagaacgttgcccagatagctaactatcgcagcatatagcaacacaacagatccattgctggtcatctctagtttgcgcccgccatgtgtatagattgcgcctgtgttctctctatcaaatcctattgcagactacataatcattgtcacaaagtggcccgcttattcggggta

SEQ ID NO: 34274 - DNA, 885 bp, Muscodor strobelii
  misc_feature: SGI cDNA ID NO. 571842
  misc_feature: Elevated expression when VOC is produced
  misc_feature: Encodes the peptide sequence at SEQ ID NO 34275
atgtccagagtgaacgacaacattgaactgggagctcgacaacagccacggcctgtgggctacgatcagtgggcaacatggatcgctacagacgccgacagcgaaacatttgtgtttcgcaagtttgacaaactagcagcactcaacttgctgtacctacagagcgagattctcgaaattgaagcggagttggatagactcaatcaagagattattgagaacccgcgatgtgatgtcgcgacagtcaacgcaatgcgcgagttcgaatccttagtcgggcagtgtggggatgaggagcatcgaaaggaggcagcaaacagagtggcgttgatcaagaaactacgatcggccatgcaggaatatcaggaggctctgctacgtcaaagtagggttgcagaactccagtcgccaagtaaccgagtccttcgcgcactgaagcagatgttttggcacaatggcagccctgtcatcgaaggcaaagccgcgggatatttggaagagaaagaagacctggtagccctcaagagtgctggcaaggaccctctgtctagctatctcagaggagcgatggcgacacaagggaagaataatgtgatgcccgcggaaccacgaatcgcgcgcttcaaagagagcagcgttactcgactcgtgaatatagcgacaacgatcgtggccgccatatttctcatcggaccaatcctggctctgtatttcgtgcagagctcagcagccaagttggcactcattgctgttttcacggctggatttgctttgagcgtgacagctatcactagtgctcggcgggcggaaatcttcgctggcactgcaacatatgcagctgtgctcgttgtgtttgtcagtaatggtcaactctcgaatggatga

SEQ ID NO: 34275 - protein, 294 aa, Muscodor strobelii
  misc_feature: SGI Peptide ID NO. 571842
  misc_feature (1)..(286): NCBI GI: 256726540 Blast Desc: NECHADRAFT_79592 [Nectria haematococca mpVI 77-13-4]
  misc_feature (17)..(272): NCBI GI: 115491261 Blast Desc: [Aspergillus terreus NIH2624] gi|114197118|gb|EAU38818.1| [Aspergillus terreus NIH2624]
  misc_feature (5)..(276): NCBI GI: 256731937 Blast Desc: NECHADRAFT_80821 [Nectria haematococca mpVI 77-13-4]
  misc_feature (20)..(270): NCBI GI: 169616612 Blast Desc: SNOG_11479 [Phaeosphaeria nodorum SN15] gi|111060067|gb|EAT81187.1| SNOG_11479 [Phaeosphaeria nodorum SN15]
  misc_feature (20)..(271): NCBI GI: 256734893 Blast Desc: NECHADRAFT_75615 [Nectria haematococca mpVI 77-13-4]
  misc_feature (20)..(276): NCBI GI: 169609999 Blast Desc: SNOG_08091 [Phaeosphaeria nodorum SN15] gi|111063247|gb|EAT84367.1| SNOG_08091 [Phaeosphaeria nodorum SN15]
  misc_feature (20)..(287): NCBI GI: 256724957 Blast Desc: NECHADRAFT_91425 [Nectria haematococca mpVI 77-13-4]
  misc_feature (20)..(287): NCBI GI: 46126473 Blast Desc: FG07614.1 [Gibberella zeae PH-1]
  misc_feature (20)..(283): NCBI GI: 189196947 Blast Desc: conserved [Pyrenophora tritici-repentis Pt-1C-BFP] gi|187980759|gb|EDU47385.1| conserved [Pyrenophora tritici-repentis Pt-1C-BFP]
  misc_feature (20)..(287): NCBI GI: 156063086 Blast Desc: SS1G_01659 [Sclerotinia sclerotiorum 1980] gi|154696995|gb|EDN96733.1| SS1G_01659 [Sclerotinia sclerotiorum 1980]
  misc_feature: Useful for introducing or modulating the production of volatile compounds
MSRVNDNIELGARQQPRPVGYDQWATWIATDADSETFVFRKFDKLAALNLLYLQSEILEIEAELDRLNQEIIENPRCDVATVNAMREFESLVGQCGDEEHRKEAANRVALIKKLRSAMQEYQEALLRQSRVAELQSPSNRVLRALKQMFWHNGSPVIEGKAAGYLEEKEDLVALKSAGKDPLSSYLRGAMATQGKNNVMPAEPRIARFKESSVTRLVNIATTIVAAIFLIGPILALYFVQSSAAKLALIAVFTAGFALSVTAITSARRAEIFAGTATYAAVLVVFVSNGQLSNG

SEQ ID NO: 34276 - DNA, 1091 bp, Muscodor strobelii
  misc_feature: SGI EST ID NO. CUFF.81250.0
  misc_feature: Variant of the nucleotide sequence at SEQ ID NO 34274
ctgtaatatgccttgagaaaagcctagggctgaaggcgcggaaagctcctgtccaatagtcagcatgattcacaattagctagatccagcatttgagctgcccaggcaaacctcacatttcagtattctaacctctcctaccaatactatgagtcccgattgatgtccagagtgaacgacaacattgaactgggagctcgacaacagccacggcctgtgggctacgatcagtgggcaacatggatcgctacagacgccgacagcgaaacatttgtgtttcgcaagtttgacaaactagcagcactcaacttgctgtacctacagagcgagattctcgaaattgaagcggagttggatagactcaatcaagagattattgagaacccgcgatgtgatgtcgcgacagtcaacgcaatgcgcgagttcgaatccttagtcgggcagtgtggggatgaggagcatcgaaaggaggcagcaaacagagtggcgttgatcaagaaactacgatcggccatgcaggaatatcaggaggctctgctacgtcaaagtagggttgcagaactccagtcgccaagtaaccgagtccttcgcgcactgaagcagatgttttggcacaatggcagccctgtcatcgaaggcaaagccgcgggatatttggaagagaaagaagacctggtagccctcaagagtgctggcaaggaccctctgtctagctatctcagaggagcgatggcgacacaagattcaaaccaggggaagaataatgtgatgcccgcggaaccacgaatcgcgcgcttcaaagagagcagcgttactcgactcgtgaatatagcgacaacgatcgtggccgccatatttctcatcggaccaatcctggctctgtatttcgtgcagagctcagcagccaagttggcactcattgctgttttcacggctggatttgctttgagcgtgacagctatcactagtgctcggcgggcggaaatcttcgctggcactgcaacatatgcagctgtgctcgttgtgtttgtcagtaatggtcaactctcgaatggatgattctcacagaggtgagaatggtgaccgtggaa

SEQ ID NO: 34277 - DNA, 1722 bp, Muscodor strobelii
  misc_feature: SGI cDNA ID NO. 571843
  misc_feature: Encodes the peptide sequence at SEQ ID NO 34278
atgtcaataactaccacaaattccgtcattaatatagactatggtatgacctacactggcgtagcgtatgcgaccactcaagatgatcagaggcaaagccctcgtcaaatatcacttgtagaccagtggggctcctcatctggtgcggaagacatcaaaaaggtcattgcgcgggatccggacaccgacctctatagatcatacgtcattcgtcacagggacaacgtccgcgaggtcgtgacgacttcggggccctttttgacaggtcaagaagctatgatgtctcttgagcaaatccacctaagtccctcgcccgctatggattcgcaacagctgaacgatatctcgccagagcctatgcagacgcgcattcagcaagtgcgacgtgaagctgagatgctcaaggaccgaatcaagcagaagaaggatgagttggtcgacactgccgtcaaatttcccgtctcgcggcttctggcagatttaaaacaaagaaccgccactgtcgataagattacacgggaagcttcggtgatggttacccgagcaagacaggcgcaaactgttaaagaaatactcgcgaaacaagggtatattcccagtttgcagatcgaagagaacgtttcctggttcttcaatggcttgggccttgacgatgcatactttgcagtcgaaacagcagacgtaatcgcaagtcaagtcacatccctatatgctgcaaagtctgtaggtggattgaccagatccgtagctgaaatcagcaattatgagtggcatatcgagggtaccgtcaatacgcaaaacatcgaagctctagcggatacaggtgcgagtatcaatgccatctccgcagacatgacagctggcatggatatcgagactggagtgaatagcaagccgcagcgcattcgcttgccaagtggcggaacgtgcctcacgctcggaacagctctattaaacttctcattcgctaatgagaaggctgcccaacttattcgatgtcacgttgtgccgaacctaaatcacaaattgatacttggctacaacttcctccgtaagacgaagacgctgtcccagttcaagcataggctcaaagaagttctctactcggggataaagaggctgtctctcagactattggatgattgtgaatcttgtgatgagagtagagcgcgagtccacggtctcatcgatggtgctccactgcttgcagttcccgacactggatctaacatcatggccatttcctcctcacgggcacggaaattaggattgaagatcgacgctcgaaagagaaaagaaatcgagtttgctgatggctcaacagacataacgctcggagttgtccaagctaaatggcagttctcatcatggggttacatgtctcctgatgatgagttatacccgtcaacggggtacgaatggcacgtcatagacggattgacggcggacgccattttgagcattgacttcattaagacacatgatgtcttcggccgatacgagcatacccttatggacgccgacagcgtcaacttgtcagagatctacggcatctatgccacctcggagtatctgggacagtcgtcttgtgatactccattagctgatgaaatgcgcgaagattcttctcgatacagaaccgagaaagcgttcgcaggaacatggttaatcgacgactacaatcaatgccactggagcaaatacaaaacaatcaagctgtag

SEQ ID NO: 34278 - protein, 573 aa, Muscodor strobelii
  misc_feature: SGI Peptide ID NO. 571843
  misc_feature (214)..(524): NCBI GI: 256726541 Blast Desc: NECHADRAFT_79593 [Nectria haematococca mpVI 77-13-4]
  misc_feature (259)..(497): NCBI GI: 145610933 Blast Desc: MGG_00796 [Magnaporthe grisea 70-15] gi|145018267|gb|EDK02546.1| MGG_00796 [Magnaporthe grisea 70-15]
  misc_feature (247)..(509): NCBI GI: 115491263 Blast Desc: [Aspergillus terreus NIH2624] gi|114197119|gb|EAU38819.1| [Aspergillus terreus NIH2624]
  misc_feature (164)..(240): NCBI GI: 76253270 Blast Desc: NAD+ dependent glutamate dehydrogenase [Gibberella fujikuroi]
  misc_feature (306)..(501): NCBI GI: 169616614 Blast Desc: SNOG_11480 [Phaeosphaeria nodorum SN15] gi|111060068|gb|EAT81188.1| SNOG_11480 [Phaeosphaeria nodorum SN15]
  misc_feature (164)..(240): NCBI GI: 46116550 Blast Desc: FG04117.1 [Gibberella zeae PH-1]
  misc_feature (265)..(505): NCBI GI: 256724849 Blast Desc: NECHADRAFT_76965 [Nectria haematococca mpVI 77-13-4]
  misc_feature (164)..(240): NCBI GI: 256725735 Blast Desc: [Nectria haematococca mpVI 77-13-4]
  misc_feature (107)..(151): NCBI GI: 3023840 Blast Desc: GBB_CRYPA RecName: Full=Guanine nucleotide-binding protein subunit beta gi|2459698|gb|AAC49838.1| GTP binding protein beta subunit [Cryphonectria parasitica]
  misc_feature (152)..(247): NCBI GI: 39939986 Blast Desc: NAD-specific glutamate dehydrogenase [Magnaporthe grisea 70-15] gi|145010473|gb|EDJ95129.1| NAD-specific glutamate dehydrogenase [Magnaporthe grisea 70-15]
MSITTTNSVINIDYGMTYTGVAYATTQDDQRQSPRQISLVDQWGSSSGAEDIKKVIARDPDTDLYRSYVIRHRDNVREVVTTSGPFLTGQEAMMSLEQIHLSPSPAMDSQQLNDISPEPMQTRIQQVRREAEMLKDRIKQKKDELVDTAVKFPVSRLLADLKQRTATVDKITREASVMVTRARQAQTVKEILAKQGYIPSLQIEENVSWFFNGLGLDDAYFAVETADVIASQVTSLYAAKSVGGLTRSVAEISNYEWHIEGTVNTQNIEALADTGASINAISADMTAGMDIETGVNSKPQRIRLPSGGTCLTLGTALLNFSFANEKAAQLIRCHVVPNLNHKLILGYNFLRKTKTLSQFKHRLKEVLYSGIKRLSLRLLDDCESCDESRARVHGLIDGAPLLAVPDTGSNIMAISSSRARKLGLKIDARKRKEIEFADGSTDITLGVVQAKWQFSSWGYMSPDDELYPSTGYEWHVIDGLTADAILSIDFIKTHDVFGRYEHTLMDADSVNLSEIYGIYATSEYLGQSSCDTPLADEMREDSSRYRTEKAFAGTWLIDDYNQCHWSKYKTIKL

SEQ ID NO: 34279 - DNA, 2146 bp, Muscodor strobelii
  misc_feature: SGI EST ID NO. CUFF.81253.0
  misc_feature: Variant of the nucleotide sequence at SEQ ID NO 34277
atcgttaactttgtcgaactgcagttgatgcccttcgatttatgagtttcgaagtgatctttgttaacgtgcctctcttcgttgcgatctcccgactgctaccatgtcaataactaccacaaattccgtcattaatatagactatggtatgacctacactggcgtagcgtatgcgaccactcaagatgatcagaggcaaagccctcgtcaaatatcacttgtagaccagtggggctcctcatctggtgcggaagacatcaaaaaggtcattgcgcgggatccggacaccgacctctatagatcatacgtcattcgtcacagggacaacgtccgcgaggtcgtgacgacttcggggccctttttgacaggtcaagaagctatgatgtctcttgagcaaatccacctaagtccctcgcccgctatggattcgcaacagctgaacgatatctcgccagagcctatgcagacgcgcattcagcaagtgcgacgtgaagctgagatgctcaaggaccgaatcaagcagaagaaggatgagttggtcgacactgccgtcaaatttcccgtctcgcggcttctggcagatttaaaacaaagaaccgccactgtcgataagattacacgggaagcttcggtgatggttacccgagcaagacaggcgcaaactgttaaagaaatactcgcgaaacaagggtatattcccagtttgcagatcgaagagaacgtttcctggttcttcaatggcttgggccttgacgatgcatactttgcagtcgaaacagcagacgtaatcgcaagtcaagtcacatccctatatgctgcaaagtctgtaggtggattgaccagatccgtagctgaaatcagcaattatgagtggcatatcgagggtaccgtcaatacgcaaaacatcgaagctctagcggatacaggtgcgagtatcaatgccatctccgcagacatgacagctggcatggatatcgagactggagtgaatagcaagccgcagcgcattcgcttgccaagtggcggaacgtgcctcacgctcggaacagctctattaaacttctcattcgctaatgagaaggctgcccaacttattcgatgtcacgttgtgccgaacctaaatcacaaattgatacttggctacaacttcctccgtaagacgaagacgctgtcccagttcaagcataggctcaaagaagttctctactcggggataaagaggctgtctctcagactattggatgattgtgaatcttgtgatgagagtagagcgcgagtccacggtctcatcgatggtgctccactgcttgcagttcccgacactggatctaacatcatggccatttcctcctcacgggcacggaaattaggattgaagatcgacgctcgaaagagaaaagaaatcgagtttgctgatggctcaacagacataacgctcggagttgtccaagctaaatggcagttctcatcatggggttacatgtctcctgatgatgagttatacccgtcaacggggtacgaatggcacgtcatagacggattgacggcggacgccattttgagcattgacttcattaagacacatgatgtcttcggccgatacgagcatacccttatggacgccgacagcgtcaacttgtcagagatctacggcatctatgccacctcggagtatctgggacagtcgtcttgtgatactccattagctgatgaaatgcgcgaagatttatactcgtcggagcccttcagcttctcgatacagaaccgagaaagcgttcgcaggaacatggttaatcgacgactacaatcaatgccactggagcaaatacaaaacaatcaagctgtagagaatgagcggataagacgctgggatgagatggcggaagagttccacaagactggccctagagggaattggctagaattacgagacgaattcatacgacgtttctgctcgaataacatgttgctagccaggaatcacgcagtccctagattgctgaagagcccgtcaagaacattctggccttggagaaggtggaaagtgggttcgaaggtagactttcgttcttgatttggatgatacatacttgttcgtattatagagataccctttgtattgtatatagcgtttgaagaaacccct

SEQ ID NO: 34280 - DNA, 1749 bp, Muscodor strobelii
  misc_feature: SGI cDNA ID NO. 571844
  misc_feature: Reduced expression when VOC is produced
  misc_feature: Encodes the peptide sequence at SEQ ID NO 34281
atgtccgaactaccgtcctcgcctccccacgaggccaccgccgacgagtctctcgcctggtacaagaagcaatatgagcagctggccgatgagctggccgagtttcgggagtccagtcatgagctggaagccgagctggaaaaggacctcgacctggccgataagcgacagagggagatggaacagaaagccgagactctacagttcgaagccgaggaatggaaggaaaaatgcagaaaaacaaaatccgaggccaacgcggcccagacaacattagagaaagaaatcacaacgctccgggacagcaatcggagtctgcacctcaagctgcgcgacatcgaagtagccaatgatgatttcgaacgccaagctaggaataccacctcgtctctcgaggacatggagtccaaatacaacgtcgccatcgagaggaccgtcatgatggaggaagagatcaagataggggagcaggagcgagagaatctgcgcatcgaggcccagaggctgcgcgaggagctgtcagatctcaaggtcgaagccgagatcatgcaagacaagctcaagaaggccgagcaccgccatctgtccaccatctctaccgacatctccatgcccgggtcgcccaccttcgagacctctccccagtcaacggctagttcgcctttgatcacgacgcctcccgaatccgtctctctgccacccttgcccaaggaggagctctcgctgcacgagcccccctcgcctcccatgtccgacgcctcagtcccattgccccggccgtcctcgaagctcaagacgcccctaccttcggcgcagaagaagtccagaataccgtcggcagaccacagcatcactcccaagcccaggaccatcgcatctactgccatgcgcccgcctggggctcggtctgtcaccaccacgcgcacccccgcaccttctcgcaccgtcgccaaccgctctacgtctaacaagcttccttcgtcgacatccctcaaccatattcgctctttgaccgcccagatgcaacgtctggaggcccgtgtgcagaatgcgaggtccagattacccgctcccgtcaacacgccgccgcgcgcctctccccgctcctctgtgcaaggcgtagccagcattccttccaccgtcactatgcgatcgcgcaagcgtacggtagggtcagctgcatcttccgtggtggacgacactcccacgcaaggcgcgaccacgaatggggccagcaaacatcaatctcgacttagtacatcgggggtgtcgcggctctcattcgggcccttgccaaacaggtccaacaactacgacccagatggctctgccacgggcatttctcgtcccagtagtcgagctagtatctcgggcttcgccagacctgaaagacctgctagtcgcacggagatagcacgtccgctttcccgcacaagtctttcaggcgcccggacacccatggggctgcgtccaagatcttctatgagtggcagtctgcacggtcattctcagagtgtcagtcatatggaggtggacgagatggaagagcggacacccagcaggcgcggcacctacagcaagttcgattcaaacggggttggcagcgctattccggctcccagcggtattccaatgtcacgacggcagagcggcggtctgggttcctcgacttcgcggagagttagtgccggcaccgcgaacgatgggacacggccccggaagctgagtgatttaggagagacatattaa

SEQ ID NO: 34281 - protein, 582 aa, Muscodor strobelii
  misc_feature: SGI Peptide ID NO. 571844
  misc_feature (130)..(279): Pfam Id: PF04880 Pfam Desc: NUDE protein, C-terminal conserved region
  misc_feature (130)..(188): Pfam Id: PF04880 Pfam Desc: NUDE protein, C-terminal conserved region
  misc_feature (1)..(565): NCBI GI: 261354217 Blast Desc: nuclear distribution protein nudE [Verticillium albo-atrum VaMs.102]
  misc_feature (1)..(582): NCBI GI: 145609457 Blast Desc: MGG_07611 [Magnaporthe grisea 70-15] gi|145016819|gb|EDK01249.1| MGG_07611 [Magnaporthe grisea 70-15]
  misc_feature (16)..(562): NCBI GI: 171685388 Blast Desc: protein product [Podospora anserina] gi|170942655|emb|CAP68307.1| protein product [Podospora anserina]
  misc_feature (2)..(582): NCBI GI: 46124407 Blast Desc: FG06581.1 [Gibberella zeae PH-1] gi|108860812|sp|Q4I877.1|NDE1_GIBZE RecName: Full=Nuclear distribution protein nudE homolog 1
  misc_feature (1)..(582): NCBI GI: 116208460 Blast Desc: CHGG_03523 [Chaetomium globosum CBS 148.51] gi|88184120|gb|EAQ91588.1| CHGG_03523 [Chaetomium globosum CBS 148.51]
  misc_feature (2)..(582): NCBI GI: 85109254 Blast Desc: NCU08566 [Neurospora crassa OR74A] gi|74581823|sp|O13335.1|NDE1_NEUCR RecName: Full=Nuclear distribution protein nudE homolog 1; AltName: Full=Nuclear ro-11
  misc_feature (1)..(582): NCBI GI: 156052363 Blast Desc: SS1G_06347 [Sclerotinia sclerotiorum 1980] gi|154704127|gb|EDO03866.1| SS1G_06347 [Sclerotinia sclerotiorum 1980]
  misc_feature (1)..(582): NCBI GI: 154298801 Blast Desc: BC1G_11292 [Botryotinia fuckeliana B05.10] gi|150857688|gb|EDN32880.1| BC1G_11292 [Botryotinia fuckeliana B05.10]
  misc_feature (6)..(582): NCBI GI: 226285054 Blast Desc: nuclear distribution protein nudE [Paracoccidioides brasiliensis Pb01]
  misc_feature (14)..(582): NCBI GI: 240282327 Blast Desc: nuclear distribution protein NudE [Ajellomyces capsulatus H143]
  misc_feature: Useful for introducing or modulating the production of volatile compounds
MSELPSSPPHEATADESLAWYKKQYEQLADELAEFRESSHELEAELEKDLDLADKRQREMEQKAETLQFEAEEWKEKCRKTKSEANAAQTTLEKEITTLRDSNRSLHLKLRDIEVANDDFERQARNTTSSLEDMESKYNVAIERTVMMEEEIKIGEQERENLRIEAQRLREELSDLKVEAEIMQDKLKKAEHRHLSTISTDISMPGSPTFETSPQSTASSPLITTPPESVSLPPLPKEELSLHEPPSPPMSDASVPLPRPSSKLKTPLPSAQKKSRIPSADHSITPKPRTIASTAMRPPGARSVTTTRTPAPSRTVANRSTSNKLPSSTSLNHIRSLTAQMQRLEARVQNARSRLPAPVNTPPRASPRSSVQGVASIPSTVTMRSRKRTVGSAASSVVDDTPTQGATTNGASKHQSRLSTSGVSRLSFGPLPNRSNNYDPDGSATGISRPSSRASISGFARPERPASRTEIARPLSRTSLSGARTPMGLRPRSSMSGSLHGHSQSVSHMEVDEMEERTPSRRGTYSKFDSNGVGSAIPAPSGIPMSRRQSGGLGSSTSRRVSAGTANDGTRPRKLSDLGETY

SEQ ID NO: 34282 - DNA, 3031 bp, Muscodor strobelii
  misc_feature: SGI EST ID NO. CUFF.81259.0
  misc_feature: Variant of the nucleotide sequence at SEQ ID NO 34280
cgagtctccctccaacaacaacatcgccagccaacatcgccaacctcaggtcgccggcccactaacccccagcagcacagcgacgacactcgacaatccaacaacggcatcagcggcgataaggtaagccagcaacagaaggacaccagcagcagcatcagtattcgactcgcgacaacgacacacgacacacgacacgacgacaacgcacctctctcggctccaacgccccggatcatctcattatcatctcttttgcgacgcgcggcgaacagacaagcaaccacacccactgccaactacgaagggacgtctttcatttgcatctaacccgactcacaatcaaatttacgggtagagaaagacatctcatctgcattgtcgcacgggcacaagggggctcccagcatgcgtgcctacatctgtttgtagagccgagacaacgaccattcttcaattcgctctttcgattattcaatagtttcacagtacatactctacatacactacacactcgacttctttccaacccgctgttttccttacttattatcggaactctcttgcgtctcttccgatctcatttccgagtcgcactacgtcaccagcatatgcgacaccaactttgggcctgaagaggaagcatctcatcgtgcacatagcctctcagtccaacaaccgcaagaatgtccgaactaccgtcctcgcctccccacgaggccaccgccgacgagtctctcgcctggtacaagaagcaatatgagcagctggccgatgagctggccgagtttcgggagtccagtcatgagctggaagccgagctggaaaaggacctcgacctggccgataagcgacagagggagatggaacagaaagccgagactctacagttcgaagccgaggaatggaaggaaaaatgcagaaaaacaaaatccgaggccaacgcggcccagacaacattagagaaagaaatcacaacgctccgggacagcaatcggagtctgcacctcaagctgcgcgacatcgaagtagccaatgatgatttcgaacgccaagctaggaataccacctcgtctctcgaggacatggagtccaaatacaacgtcgccatcgagaggaccgtcatgatggaggaagagatcaagataggggagcaggagcgagagaatctgcgcatcgaggcccagaggctgcgcgaggagctgtcagatctcaaggtcgaagccgagatcatgcaagacaagctcaagaaggccgagcaccgccatctgtccaccatctctaccgacatctccatgcccgggtcgcccaccttcgagacctctccccagtcaacggctagttcgcctttgatcacgacgcctcccgaatccgtctctctgccacccttgcccaaggaggagctctcgctgcacgagcccccctcgcctcccatgtccgacgcctcagtcccattgccccggccgtcctcgaagctcaagacgcccctaccttcggcgcagaagaagtccagaataccgtcggcagaccacagcatcactcccaagcccaggaccatcgcatctactgccatgcgcccgcctggggctcggtctgtcaccaccacgcgcacccccgcaccttctcgcaccgtcgccaaccgctctacgtctaacaagcttccttcgtcgacatccctcaaccatattcgctctttgaccgcccagatgcaacgtctggaggcccgtgtgcagaatgcgaggtccagattacccgctcccgtcaacacgccgccgcgcgcctctccccgctcctctgtgcaaggcgtagccagcattccttccaccgtcactatgcgatcgcgcaagcgtacggtagggtcagctgcatcttccgtggtggacgacactcccacgcaaggcgcgaccacgaatggggccagcaaacatcaatctcgacttagtacatcgggggtgtcgcggctctcattcgggcccttgccaaacaggtccaacaactacgacccagatggctctgccacgggcatttctcgtcccagtagtcgagctagtatctcgggcttcgccagacctgaaagacctgctagtcgcacggagatagcacgtccgctttcccgcacaagtctttcaggcgcccggacacccatggggctgcgtccaagatcttctatgagtggcagtctgcacggtcattctcagagtgtcagtcatatggaggtggacgagatggaagagcggacacccagcaggcgcggcacctacagcaagttcgattcaaacggggttggcagcgctattccggctcccagcggtattccaatgtcacgacggcagagcggcggtctgggttcctcgacttcgcggagagttagtgccggcaccgcgaacgatgggacacggccccggaagctgagtgatttaggagagacatattaatggctcttctttcacactttcgacataattgcgggcctcgtcttcttatttacaaagagactgacggggtcttgacggcgttacgagatcacgatggcgggcatataccaaaaccaaccgtacttactactaccctactttatttgaaaatactggtgcttcatcggatacccttcatccatcagccccaccgcacaaaagactagaatcggattcggtgttggaggcttggaatcttgggggagcattgagcatcattactctatttgtttcctgctggttgtttggggcattcattcattgcatcgagcattccttttgcggggcgcgttcactgtctaaattgattaggcgctacctactagatcatggcttggaggctttggcgactgattgattgtatatacatttttctgtgcatgcgcggggttttgtgtaggggaaggtacgacataggggttgtggacgagaggaaggtggtgtgaggagaagtaatacatacagtaggcctgactggtccatatagttttcttttgttccaatcaaacatctcagttgagaaccgataatcttttaggctccgacttgcctctgcg

SEQ ID NO: 34283 - DNA, 2550 bp, Muscodor strobelii
  misc_feature: SGI cDNA ID NO. 571845
  misc_feature: Encodes the peptide sequence at SEQ ID NO 34284
atggaggcactgggtgcaggggccaacgccgtggcattcattgtactggcagctcagctatccaagacggtctacaccacgttctcctcgatcaaagacggcccagccaatgtccaaggcgttgcgaacgatatcttacgattacacaggaccttggagctactccaagcctatccagtgtttgcgggcgatccttctctctccagtcaaatcacggcttgtgttctggatctgaactccttaatccagagcgtccacagcctacagcctacaaataacgagcgtaggctcggcaggtcttggaagcgctttagagcctttcttgatgagaagaaactagagcagattcgaaatcagatcgatgcgcatactaatgcgttaagttctcgccttatcattttgcagagtgttcatgtccatggcatctcagcgactgtgcaatcaatggaccattctgtcatcgacataggcggcagaattgatcagcatttcaacactcagacgtctaatctaacaactgttcatcaagacctccgagaccgccaaactgcaacagggcggacgtttcaggatggcttatcttccctcgaaaacacagttcgaaatgttgagagtctgaggcaaaccgatgcgggtaccatgatcactcttctgcaagagttgaaaggcttgttaattacacaccacaacccacctcagcccgataaaggccacgacaatccatcgaacatggccagtgaagacgatgagctaacatatgcacaaacaagtccccaccagggtcaagcaggcgacgatatcttagtatcgagcatcacgagtctctgtagtctaattgaagagaaagaacagacgttcaatactgacgcagatatggatgacagagtagaagatattttagaagacattcaaaatatgattcgctcagctcagcagtacgctaaagtcgagccaggtttcaagacaagaaaaacacatcttcgtagggatctccggcaattcagacaagcttttgggcaatattcccttgctctcaattcagacaagaacaaggccggaagcaccataattcaacgcaaacgggagttctcaacgttcgaacttggtgatctaggcacggtgacaatcattaagggaacccgaatcaggtcatttcccaataggaaagactccgaccctaatcactatcttgatccaacagactgcatattcactgttacgtttctaccgaagaattgcagtcaattcaatatgctggtagcgtcaactatgtggcaatcctcttccagaagcggcattcaatctatttcatccctcgcagtgaaccgagtgctgccgggaggatctaaggtgttcgaagtggctcgaagcggcgaagttcaagaactagaaaaaatgctgcgtcgaggagaagcatcgctacgagatcatgatgaatggggagctagtctcctactttactcaacgcaacaacccaaaatgtgtcacttcttgctcgaacatggagcggatgttgatcatgttggtggaaataggggtgcttggaaaaaagcagaagaatatcctgtgggcttgattatggtcttagacgaggcactaccattgaatcccccgataaatggttctagcgagcttaggcgcattatcgagtcccgacagtttcttctcgatgccggtgcagaccccctattgcatctatatcatcacaaacctgagttcattatacaatttagtgttgatagtacattatttctcatacaaaatggagccgatgtggacgcccgcgatgatgtcggacagactgcatttgagtgggcatatcaacactgtcacgaggagtactttgggaacaaatattggggaagcttcgctggcgatatgtgggatgccgtccttcattactgtggttatgacatccgccagtttcgaaaaggccatcagcgaagagccgcatatagcctaaaatatacgcgtcggattttcgaaggactttggaaggggcgggagtcacaatgtccgtactgggacgataatccatggcctgctgacgctccctggcaatcctttgtcgattatccatgcagaaaccatctctgtaatggctgttaccctgagccttgtgatgacgaagagtgcgtgaaatgcagaattagaaagaggaaccacatcaaaccagtttcttggtctactatcgaaacgcagaagagtgaggtcggaagtttacaggagacagaaagtgatgacaatgatgatgagggttctcaaatccagaacgaccttcattcacatgtcttcaatgcggatcacaacgacacctacgaggacgagctcgagtccatctacgatatcgattacaagagcgatagcgaaggcgaatctatagagaatggcgaacaatttgctaatgaggctatctacgatgtcgatcacgagaacgacagagacagtgaatctagcaagagtagtggagaatgtgacaatggtcgtcacaacgccactatggaatatccggggtcatcagctctttacgaaaacccgtggcaggattga

SEQ ID NO: 34284 - protein, 849 aa, Muscodor strobelii
  misc_feature: SGI Peptide ID NO. 571845
  misc_feature (1)..(562): NCBI GI: 46135745 Blast Desc: FG09388.1 [Gibberella zeae PH-1]
  misc_feature (1)..(347): NCBI GI: 256735548 Blast Desc: NECHADRAFT_75501 [Nectria haematococca mpVI 77-13-4]
  misc_feature (1)..(513): NCBI GI: 256725473 Blast Desc: [Nectria haematococca mpVI 77-13-4]
  misc_feature (576)..(685): NCBI GI: 256724510 Blast Desc: NECHADRAFT_88161 [Nectria haematococca mpVI 77-13-4]
  misc_feature (577)..(681): NCBI GI: 46135745 Blast Desc: FG09388.1 [Gibberella zeae PH-1]
  misc_feature (579)..(702): NCBI GI: 256725473 Blast Desc: [Nectria haematococca mpVI 77-13-4]
  misc_feature (438)..(527): NCBI GI: 256735548 Blast Desc: NECHADRAFT_75501 [Nectria haematococca mpVI 77-13-4]
  misc_feature (439)..(674): NCBI GI: 261356804 Blast Desc: [Verticillium albo-atrum VaMs.102]
  misc_feature (355)..(598): NCBI GI: 256724510 Blast Desc: NECHADRAFT_88161 [Nectria haematococca mpVI 77-13-4]
  misc_feature (1)..(153): NCBI GI: 256724510 Blast Desc: NECHADRAFT_88161 [Nectria haematococca mpVI 77-13-4]
MEALGAGANAVAFIVLAAQLSKTVYTTFSSIKDGPANVQGVANDILRLHRTLELLQAYPVFAGDPSLSSQITACVLDLNSLIQSVHSLQPTNNERRLGRSWKRFRAFLDEKKLEQIRNQIDAHTNALSSRLIILQSVHVHGISATVQSMDHSVIDIGGRIDQHFNTQTSNLTTVHQDLRDRQTATGRTFQDGLSSLENTVRNVESLRQTDAGTMITLLQELKGLLITHHNPPQPDKGHDNPSNMASEDDELTYAQTSPHQGQAGDDILVSSITSLCSLIEEKEQTFNTDADMDDRVEDILEDIQNMIRSAQQYAKVEPGFKTRKTHLRRDLRQFRQAFGQYSLALNSDKNKAGSTIIQRKREFSTFELGDLGTVTIIKGTRIRSFPNRKDSDPNHYLDPTDCIFTVTFLPKNCSQFNMLVASTMWQSSSRSGIQSISSLAVNRVLPGGSKVFEVARSGEVQELEKMLRRGEASLRDHDEWGASLLLYSTQQPKMCHFLLEHGADVDHVGGNRGAWKKAEEYPVGLIMVLDEALPLNPPINGSSELRRIIESRQFLLDAGADPLLHLYHHKPEFIIQFSVDSTLFLIQNGADVDARDDVGQTAFEWAYQHCHEEYFGNKYWGSFAGDMWDAVLHYCGYDIRQFRKGHQRRAAYSLKYTRRIFEGLWKGRESQCPYWDDNPWPADAPWQSFVDYPCRNHLCNGCYPEPCDDEECVKCRIRKRNHIKPVSWSTIETQKSEVGSLQETESDDNDDEGSQIQNDLHSHVFNADHNDTYEDELESIYDIDYKSDSEGESIENGEQFANEAIYDVDHENDRDSESSKSSGECDNGRHNATMEYPGSSALYENPWQD

SEQ ID NO: 34285 - DNA, 3240 bp, Muscodor strobelii
  misc_feature: SGI EST ID NO. CUFF.81262.0
  misc_feature: Variant of the nucleotide sequence at SEQ ID NO 34283
gccgactcccagtgaaaacccgatctcgacaagtctgatcacccgcggaatccacaatccactcattctctctacgttctctttcacggcgctctcccgatgagtagcaattagtatcgcgttaggactggttgccgatacattatggaggcactgggtgcaggggccaacgccgtggcattcattgtactggcagctcagctatccaagacggtctacaccacgttctcctcgatcaaagacggcccagccaatgtccaaggcgttgcgaacgatatcttacgattacacaggaccttggagctactccaagcctatccagtgtttgcgggcgatccttctctctccagtcaaatcacggcttgtgttctggatctgaactccttaatccagagcgtccacagcctacagcctacaaataacgagcgtaggctcggcaggtcttggaagcgctttagagcctttcttgatgagaagaaactagagcagattcgaaatcagatcgatgcgcatactaatgcgttaagttctcgccttatcattttgcagagtgttcatgtccatggcatctcagcgactgtgcaatcaatggaccattctgtcatcgacataggcggcagaattgatcagcatttcaacactcagacgtctaatctaacaactgttcatcaagacctccgagaccgccaaactgcaacagggcggacgtttcaggatggcttatcttccctcgaaaacacagttcgaaatgttgagagtctgaggcaaaccgatgcgggtaccatgatcactcttctgcaagagttgaaaggcttgttaattacacaccacaacccacctcagcccgataaaggccacgacaatccatcgaacatggccagtgaagacgatgagctaacatatgcacaaacaagtccccaccagggtcaagcaggcgacgatatcttagtatcgagcatcacgagtctctgtagtctaattgaagagaaagaacagacgttcaatactgacgcagatatggatgacagagtagaagatattttagaagacattcaaaatatgattcgctcagctcagcagtacgctaaagtcgagccaggtttcaagacaagaaaaacacatcttcgtagggatctccggcaattcagacaagcttttgggcaatattcccttgctctcaattcagacaagaacaaggccggaagcaccataattcaacgcaaacgggagttctcaacgttcgaacttggtgatctaggcacggtgacaatcattaagggaacccgaatcaggtcatttcccaataggaaagactccgaccctaatcactatcttgatccaacagactgcatattcactgttacgtttctaccgaagaattgcagtcaattcaatatgctggtagcgtcaactatgtggcaatcctcttccagaagcggcattcaatctatttcatccctcgcagtgaaccgagtgctgccgggaggatctaaggtgttcgaagtggctcgaagcggcgaagttcaagaactagaaaaaatgctgcgtcgaggagaagcatcgctacgagatcatgatgaatggggagctagtctcctactttactcaacgcaacaacccaaaatgtgtcacttcttgctcgaacatggagcggatgttgatcatgttggtggaaataggggtgcttggaaaaaagcagaagaatatcctgtgggcttgattatggtcttagacgaggcactaccattgaatcccccgataaatggttctagcgagcttaggcgcattatcgagtcccgacagtttcttctcgatgccggtgcagaccccctattgcatctatatcatcacaaacctgagttcattatacaatttagtgttgatagtacattagaatctttccaagcattctggaactgggctcgacttcaaccctttaatcccattaatcacatctgtcaagcttctgattacaatggatatactccgttactgatcatgtgtgaaaaattctatttgtcaaatgcactacataaactttcagttctgttgagagcaggggcagatatagagatgcgcgattctcgtggcaagtcatgcctccacgttgctcttcaatcctttcgcgattggatgatatcacgttcaacgagatgttgttatcatcccatccagtttctcatacaaaatggagccgatgtggacgcccgcgatgatgtcggacagactgcatttgagtgggcatatcaacactgtcacgaggagtactttgggaacaaatattggggaagcttcgctggcgatatgtgggatgccgtccttcattactgtggttatgacatccgccagtttcgaaaaggccatcagcgaagagccgcatatagcctaaaatatacgcgtcggattttcgaaggactttggaaggggcgggagtcacaatgtccgtactgggacgataatccatggcctgctgacgctccctggcaatcctttgtcgattatccatgcagaaaccatctctgtaatggctgttaccctgagccttgtgatgacgaagagtgcgtgaaatgcagaattagaaagaggaaccacatcaaaccagtttcttggtctactatcgaaacgcagaagagtgaggtcggaagtttacaggagacagaaagtgatgacaatgatgatgagggttctcaaatccagaacgaccttcattcacatgtcttcaatgcggatcacaacgacacctacgaggacgagctcgagtccatctacgatatcgattacaagagcgatagcgaaggcgaatctatagagaatggcgaacaatttgctaatgaggctatctacgatgtcgatcacgagaacgacagagacagtgaatctagcaagagtagtggagaatgtgacaatggtcgtcacaacgccactatggaatatccggggtcatcagctctttacgaaaacccgtggcaggattgatatcgaggatgaagttgcaggcacaggcagcaggcacatgacttatgattgatttttgtcacaacttgcgggatgttgatctttacacgtctagtcatggagaatgctgtcactcgaattctacagatatatattatccatattatatttttaacggtgcatattcgtttgtcgtgccgagaacatagggattggtttacgaagtcagtgcatcgacaaggcttgatacccgattactcttagctaattcgcacaatccttaag

SEQ ID NO: 34286 - DNA, 1737 bp, Muscodor strobelii
  misc_feature: SGI cDNA ID NO. 571846
  misc_feature: Encodes the peptide sequence at SEQ ID NO 34287
atggcaacatcccctctccaagaccaccgagtagtgaatgctctttcggcccttgatgagatcgagcttcctcatccttctggaccattattagcatctataatcacagaggcattggatcctatccgcgctgcaatctatgtcagtcaacgaacgacgacactggaggatgctcggtcgttgctgtctgactggatttacatcatccaatgcatcacagataacagtacactacctgcaaagccagatgcagaggaaagaaaggctatcgtacgacgagacggcggtagatgctgcatcactggcaaggccggtagtccattcgaccccctctgcgttgcgcccatcctgtcccttcccaatggttggatgactggccaggtcaccatatctgacgttcttggtgcgtttttcgggccagcgtacagggactggtggctctcctacgtagaaaggcctcgtttcaccacgccatatgcgaaccattggctggttcgcaagtctgccgcaaaggaatttgctgaaggacatgtatgcttagagagacaacagccgtcgatgacagagtatcgggtagcacgtctgcttatgggcacacacccacccctcgacctcaatggagattatcccttactaggcgatcattcgagaatgagagttgagacagtcgacccacgctttgttggcacacattatcgactggctactagtattcgtctcgtggacatcgcaaagcgcattgcacctgagattttgaacaaatcagtcgttcagccgaagccgcggccggctgcgcgcaaatatgaatatttcctatcaatattgtcgtcaattctgttctttgtactgcctctgagcattgttggcaagtctttactcgcgatgtggcgctcagtaccggatgcagtccgcttagctacttaccgaatgcttttgcgagcgggtagggctatttatggctaccccgactttgccttttcgaccgttcagaggctacctttcggcctctacttaaaatatcaaggagatgttgcagggcgacgtaatgagtatgctgcaattcgattagtccgacagtacacctcaattccagttccatacgcggttgatgtggtcttaactagacaggaggaggaaccgaccgacgagtcatctctatcatcaccggacgcctggcttctgatctcgcgacttcctggggtgccgctgtcgcgctgccaggacaccttgtcagagaaagatcgcagaagggtcatcagccagctgcaaggctatgttgcccaactacgacgcattcccaacatggtcaataaggactttccgatttgtaatgctcaaggtgggccagtgctggaccatcgcatccgaggcgggaggccggtagggcccttcgccgacgaggcgtctttcagccagaatctgcggttttcggacgaacccagtcggcgaggacacgatattgtgttctcacatgcagacctcaatccacgaaacattttagttgatgaggtgacgaacagtgatggaagtacatcctatgaagtgacaggaattgttgactgggaaacggctgggttttaccccgagtattgggattataccaaagctttactcgaaaagttcaggtggactaaacgttaccaaaacatggttcatgaactcttttcagaatttggcgactattccaaagagttcgatgttgaggtgaggagctgggaatcgggcgatgccgtatag

SEQ ID NO: 34287 - protein, 578 aa, Muscodor strobelii
  misc_feature: SGI Peptide ID NO. 571846
  misc_feature (328)..(561): Pfam Id: PF01636 Pfam Desc: Phosphotransferase enzyme family
  misc_feature (345)..(532): Pfam Id: PF01636 Pfam Desc: Phosphotransferase enzyme family
  misc_feature (1)..(570): NCBI GI: 149210377 Blast Desc: MGCH7_ch7g666 [Magnaporthe grisea 70-15] gi|86196621|gb|EAQ71259.1| MGCH7_ch7g666 [Magnaporthe grisea 70-15]
  misc_feature (1)..(570): NCBI GI: 145609886 Blast Desc: MGG_02902 [Magnaporthe grisea 70-15] gi|145017273|gb|EDK01636.1| MGG_02902 [Magnaporthe grisea 70-15]
  misc_feature (357)..(578): NCBI GI: 116195466 Blast Desc: CHGG_04331 [Chaetomium globosum CBS 148.51] gi|88180244|gb|EAQ87712.1| CHGG_04331 [Chaetomium globosum CBS 148.51]
  misc_feature (429)..(578): NCBI GI: 212545556 Blast Desc: conserved [Penicillium marneffei ATCC 18224] gi|210065901|gb|EEA19995.1| conserved [Penicillium marneffei ATCC 18224]
  misc_feature (330)..(572): NCBI GI: 116178998 Blast Desc: CHGG_00127 [Chaetomium globosum CBS 148.51] gi|88184424|gb|EAQ91892.1| CHGG_00127 [Chaetomium globosum CBS 148.51]
  misc_feature (212)..(573): NCBI GI: 154312278 Blast Desc: BC1G_06172 [Botryotinia fuckeliana B05.10] gi|150850135|gb|EDN25328.1| BC1G_06172 [Botryotinia fuckeliana B05.10]
  misc_feature (133)..(366): NCBI GI: 212545556 Blast Desc: conserved [Penicillium marneffei ATCC 18224] gi|210065901|gb|EEA19995.1| conserved [Penicillium marneffei ATCC 18224]
  misc_feature (272)..(560): NCBI GI: 255954483 Blast Desc: Pc21g09570 [Penicillium chrysogenum Wisconsin 54-1255] gi|211589705|emb|CAP95854.1| Pc21g09570 [Penicillium chrysogenum Wisconsin 54-1255]
  misc_feature (295)..(558): NCBI GI: 225555826 Blast Desc: conserved [Ajellomyces capsulatus G186AR]
  misc_feature (454)..(578): NCBI GI: 171683159 Blast Desc: protein product [Podospora anserina] gi|170941539|emb|CAP67191.1| protein product [Podospora anserina]
MATSPLQDHRVVNALSALDEIELPHPSGPLLASIITEALDPIRAAIYVSQRTTTLEDARSLLSDWIYIIQCITDNSTLPAKPDAEERKAIVRRDGGRCCITGKAGSPFDPLCVAPILSLPNGWMTGQVTISDVLGAFFGPAYRDWWLSYVERPRFTTPYANHWLVRKSAAKEFAEGHVCLERQQPSMTEYRVARLLMGTHPPLDLNGDYPLLGDHSRMRVETVDPRFVGTHYRLATSIRLVDIAKRIAPEILNKSVVQPKPRPAARKYEYFLSILSSILFFVLPLSIVGKSLLAMWRSVPDAVRLATYRMLLRAGRAIYGYPDFAFSTVQRLPFGLYLKYQGDVAGRRNEYAAIRLVRQYTSIPVPYAVDVVLTRQEEEPTDESSLSSPDAWLLISRLPGVPLSRCQDTLSEKDRRRVISQLQGYVAQLRRIPNMVNKDFPICNAQGGPVLDHRIRGGRPVGPFADEASFSQNLRFSDEPSRRGHDIVFSHADLNPRNILVDEVTNSDGSTSYEVTGIVDWETAGFYPEYWDYTKALLEKFRWTKRYQNMVHELFSEFGDYSKEFDVEVRSWESGDAV

SEQ ID NO: 34288 - DNA, 528 bp, Muscodor strobelii
  misc_feature: SGI EST ID NO. CUFF.81271.0
  misc_feature: Variant of the nucleotide sequence at SEQ ID NO 34286
ttcttggtgcgtttttcgggccagcgtacagggactggtggctctcctacgtagaaaggcctcgtttcaccacgccatatgcgaaccattggctggttcgcaagtctgccgcaaaggaatttgctgaaggacatgtatgcttagagagacaacagccgtcgatgacagagtatcgggtagcacgtctgcttatgggcacacacccacccctcgacctcaatggagattatcccttactaggcgatcattcgagaatgagagttgagacagtcgacccacgctttgttggcacacattatcgactggctactagtattcgtctcgtggacatcgcaaagcgcattgcacctgagattttgaacaaatcagtcgttcagccgaagccgcggccggctgcgcgcaaatatgaatatttcctatcaatattgtcgtcaattctgttctttgtactgcctctgagcattgttggcaagtctttactcgcgatgtggcgctcagtaccggatgcagtccgcttagctacttacc

SEQ ID NO: 34289 - DNA, 6840 bp, Muscodor strobelii
  misc_feature: SGI cDNA ID NO. 571847
  misc_feature: Encodes the peptide sequence at SEQ ID NO 34290
atggcttctcagacaaacggcaaggctgccaccaacggcaaccggacggtgcccgtcgccaatggcaagcccacgtacgccgagaagcacagagtcgcggaccacttcattggcggtaaccggctcgagaatgcccccccctccaaggtcaaggacttcgtggccagccacgatggccacaccgtcatcacaaacgttctgattgccaacaacggtatcgctgccgtcaaggagatccgatcagtacgaaaatgggcctacgagacgtttggcgacgagaaggccatccagttcaccgtcatggccacccctgaagatctagctgccaacgccgattacatcagaatggcggaccactacgtcgaggttcccggtggtacgaataaccacaactacgccaatgtagagctgattgtcgatgttgccgaacggatgaacgtgcacgccgtatgggctggttggggtcacgcttcagaaaaccctaaactgcccgagtcgctggccgcctctccaaacaagatcgtcttcatcggacccccaggatccgccatgcgatctctcggtgacaagatctcctccaccatcgtcgcccagcacgccgaagtgccctgcattccgtggtcgggtaccggtgtagacaaggtcgaggtcgacgaccagggcattgtcacagttgcggacgatgtctaccttaagggctgtgtccagtcgtgggaagagggtctggaaaaggccaagcaaatcggcttccccgtcatgatcaaggcctccgaaggtggtggcggcaagggtatccgaaaagccttgtcggaagacggctttgagcagctctacaaggctgccgcgagcgagattcccggttcccccatcttcatcatgaagctggctggaaacgcccgtcacttagaggtccagctgctagctgatcagtacggaaacaacatttctctgttcggcagagattgttccgtccagagacgacaccagaagattatcgaagaggccccggtaacgattgcgaagccgcccacgttcaagggtatggaagaagctgccgtccgtctgggccgacttgtcggatatgtttctgccggtactgtcgagtatctgtactcctacgaagacgacaagttttacttcttggagttgaaccctcgtcttcaggtcgagcatcccacaactgaaatggtcagcggtgtcaacctgcccgtcgctcagcttcaagttgctatgggtatcccattacaccgcatcagcgacatccggctgctgtatggtgtcgatcccaagaccagcaccgagattgacttcgagttcaagagcccccagagcgacaagactcaacgtagaccacagcccagaggacattgtacggcctgccgtatcacttccgaagatcccggcgagggcttcaagccttccaacggtgtcatgcacgacttgaatttccgtagtagcgccaacgtttggggttatttctccgtcagtacctcgtccagtattcacagtttctccgacagtcagttcggtcacatttttgcctacggagagagccgtgctgcttccaggaagaatatggtcgtggctctgaaagagttgagcatccgtggtgatttccgaacaaccgtcgagtatctcatcaaacttctcgagaccgaggctttcgaggataacacaatcaccacgggctggctggatgagctgatctctaagaaattgaccgccgaacggccagaccccattctcgccattgtttgcggtgctacaaccaaggctcacattgcatgcgaagcaacaattgccgagtaccgagccgggctcgaacgcggtcaagtaccctctaaggacatcctcaagacggtcttccctgtcgacttcatctacgaaggtcaccgctacaaattcacggcaactcgtgcgggtcccacgagctaccacctctttatcaatggctccaagtgtcaagtcggtattcgacccctcagtgatggcggtctgcttattttaatcaacggtcggagtcacagtgtctactggaaggaggaagtcggtgctacccgtgtttcagtggacagcaaaacatgtctcttggagcaggagaatgaccctacccagctccggacaccaagtcctggcaagctcgtgaaatacaccgtggaaaatggtgagcacgtcaaggccggccagactttcgctgaggtcgaagtcatgaaaatgttcatgcctttgatcgcccaggaagacggcattgtgcaactcatcaagcagcccggtgtcaccatcgaagctggcgacatcttgggtattctagctctcgatgacccaacccgcgtgaagcaggcccagcccttcgtcggccaactccccaacctgggatcaccgcagaatctgggtaacaagccttctcagagattcaatctggcattcgcaatcctccaaaacattttgaagggctacgataactccgtaatcatgcaacagaccttaaaggagatggtcgaggtcttgcgcaatcccgagcttccctacagcgagtggtctgcccaccattctgctctgcactctagaatgcctcagcctttggacgcggcgttcactcaaatcattgagaagtccaagcaacgaggagctgaattcccagccaagactcttgcgagatgtttcaccaagttcatcaccgagaataccactcccagcgaggcagataccctcaagaccaccgtccagcctctgctggatgtcctcataaactatgccgagggtcagaaagtccgagagctcaatgccatttccgaactcctcaatgagtacgtggaagtggagtctctattcgccaaccgccgtagccaggatgaagatatcgtcttgaagctgcgtgatgagaacaaggaagattacacgaaggtcatcgagaccgtcctctcgcacagtcgtgttggatccaagaaccacttgattcttgcactattggacgaatatcgccctaacaagcctaactctggaaatgttgctcgacacctgcgagatgttctccgtgagttagccgagcttgactcgcgctctactgccaaggtctccctcaaggccagagagattttgatccagtgtgctctcccctcattggaggagcgcactgcccaaatggaacacattctccgctcgtccgtcgtcgagaacaagtacggagagactggctgggagcacagacagcccaaccttgatgttatcaaggaagttgtcgactccaaatacactgtgttcgacgtgttgggcacgttcttcgctcatgaggacgcttgggtcgctgctgcggcgcttgaagtatatgtccgccgggcttaccgtgcctacaatgttagcaagattgaataccatgccgacgacaccgataccaatccggctttcctttcgtgggacttctccttcagaaagagcgaatccgagcttgacatcatgcctcagtcgaccaatccatctgttcctggtactccgatgaaggaagaatttggattccaccgcatcagctcggtcagcgacatgacttatcttagcgagaagaccgaggcccagcctatcagaaagggtgttattgttccctgcaagtatcttgatgaggctgatgagtggctaccgaaagccatcgagactctacctctcaagaaagctcgcacaccgagtgctctacctaacctcgatgggaagcgcaagtacttcaagaccgaggaagatgagcttgcgaacgtcatcaacgtggctgtccgcgatgctgagtcagtggacgatcaggagatcattgctagaatcaggtccatgatcgacgccaacaaatctgaccttctttctcatcgcgttcgtcgcgtcacgtttgtctgcaatcgtaatgatgggtcaaaccctcggtactacaccttccgtgggcctgagtatgtcgaagacgagacgatccgtcacattgagccttctcttgccttccagctggagctccagcgtctggccaagttcaaaatctctccagtcttcaccgagaacaagaacattcacgtgtacgaggcagtgggcaaaggtgtggagaccgacaagcgttacttcactcgtgccgtcatccgacccggtcgtctacgagacgacatccccactgtcgaatacctggtttctgagacagaccgtgtgatcaacgatatctttgatgccatggagatcattggcaacaacaattctgatctgaaccacatgttcctcaacttctcacctgtcttccagctgaagccggatgaggtcgagaagtctctccagggattcctcgacagatttggcccccgtgcttggcgtctgcgtgtgtcccatgtcgagattcgcattgtctgcaccgacggtactaccgggcagccagtccccttgcgtgtgttgatcagcaatacatctgggtatgtcattcaagtcgaaatctacgcagaacgtaagtccgagaagggcgaaatgattttccactcgatcagcggtaccaacagaatcggctctatgcatctcatgtctgtgtccgcgccatatcccacgaagaactggctgcagcccaagcggtacagagcccacctgcttggtacgcagtacgtgtatgatttccctgagctgttcagacaagctgtcgagaatagctggacccaaatccttaagaagcagggccacctcgcagataagaaacccgcccagggtgagtgtattgactaccacgagcttgttctcgacgaccatgacaagcttgccgaggtctcacgtgagcctggcaccaacacctgtggtatggttggttgggtcatcaacgctcggactcctgagtatcccaagggccgtaagttcgttgtcgtcgccaacgatatcacctacaagattggttcatttggtcctaaggaagatcacttcttcaacaagtgcacagaactggctcgcagcatgggtattccccgtatctacctgtctgctaactctggtgcccgcttgggtgttgccgatgagctcatcccgcatttcaaggtagcctggaacgacccgaacaagcaggaatcaggcttcaagtacttgtacctcgatgacgctgcaaagaagcgattcgaggacggggcttctaaggatgtcattaccgagaccgtcagcgaggacggcgaggagcgtcacaaaattgtggccattgtgggtgctgaagatggtctcggtgtcgaatgcttgcgtggatccggtttaattgctggcgctacaagtcgtgcttacaacgatatcttcactgttacgttgatcacctgtagatccattggtatcggtgcctatctcgtccgtcttggtcagcgtgctgtccaaatcgaaggccagccaattattttgactggtgctggcgccctgaacaacctgctcggtcgtgaggtctatacttccaaccttcaacttggtggtactcaaattatgtatcgtaacggtgtttctcacatgaccgccaacgatgattttgctggtgtctctaagatcgtcgaatggctgtcgtttgttccagctcaacgcggccttcctgttcctatcactcccagcttcgattcttgggatcgtgagatcgtctacacaccaccgaacaagcagccttatgatgtcagatggctgattggcggtaagcaggatgaggatggcttccaacctggcctcttcgacaaagactcttttgttgaggctcttggcggatgggcccgcacagtcgttgttggtcgtgctcgtctcggtggcattcctatgggtgttattgcagtggagacccgcactgtcgagaacgtgacgcccgcggatcctgccaacgccgactcggtcgagcaggttgtcaacgaggctggcggtgtctggtaccccaactccgctttcaagactgcccaggccatcaacgacttcaatcacggcgagcaactgcctcttatgatccttgccaactggagaggcttctcgggaggccaacgtgacatgtataacgaggtcttgaaatacggttcttatattgtcgatgctctcgtcaaatacgagcagcctatcttcgtgtacatcccacccttcggtgaacttcgcggtggctcttgggtcgtcgttgatcctaccatcaaccctgtcgccatggagatgtacgccgatgtcgaggctcgcgctggtgtccttgagcccgaaggtatcattggtatcaagtacaagaaggacaagcagcttgagaccatggctcgtctcgatgctacttatgctgctctgaagaagcaggcctccgtggaaggcttgtccaaggagcaagccgacgagctcaagaagaagatgactgcccgagagagacagctgctgccaatttatgcccagatcagcatccagttcgccgatctccatgatcgtgctggccgcatgaaagccaagggcactatccgcgaagctatcgaatggaagaacgctcgtcgcttcttctactggcgagctcgcagacgtctcaacgaggactatatcctcaagcgcatggccactgccagcaactccaaaattgctgacaagtgcagccccgccgccgtcactcagcggaaagagcacttgggtatgcttgctgcgtggtctggcgtgcccaacttctctcacagtgacagagacgttgtcaactggtacgagagcaatgccaaggtcatctccaccaagatcgaagcaatcaagatcgaggctgttggtagacagatgtccgacttgatgagtggtgacaaggtcgctgctctgaagggtctaaaggagatgttgcacatgatgcccattggtgagcgtgaggagatcatgaagtacttgaaataa

SEQ ID NO: 34290 - protein, 2279 aa, Muscodor strobelii
  misc_feature: SGI Peptide ID NO. 571847
  misc_feature (771)..(1508): Pfam Id: PF08326 Pfam Desc: Acetyl-CoA carboxylase, central region
  misc_feature (459)..(566): Pfam Id: PF02785 Pfam Desc: Biotin carboxylase C-terminal domain
  misc_feature (704)..(770): Pfam Id: PF00364 Pfam Desc: Biotin-requiring enzyme
  misc_feature (1605)..(2165): Pfam Id: PF01039 Pfam Desc: Carboxyl transferase domain
  misc_feature (62)..(187): Pfam Id: PF00289 Pfam Desc: Carbamoyl-phosphate synthase L chain, N-terminal domain
  misc_feature (189)..(422): Pfam Id: PF02786 Pfam Desc: Carbamoyl-phosphate synthase L chain, ATP binding domain
  misc_feature (235)..(415): Pfam Id: PF02786 Pfam Desc: Carbamoyl-phosphate synthase L chain, ATP binding domain
  misc_feature (25)..(2278): NCBI GI: 85109643 Blast Desc: acetyl-CoA carboxylase [Neurospora crassa OR74A] gi|28924665|gb|EAA33781.1| acetyl-CoA carboxylase [Neurospora crassa OR74A]
  misc_feature (17)..(2279): NCBI GI: 171685386 Blast Desc: protein product [Podospora anserina] gi|170942654|emb|CAP68306.1| protein product [Podospora anserina]
  misc_feature (1)..(2279): NCBI GI: 256726526 Blast Desc: [Nectria haematococca mpVI 77-13-4]
  misc_feature (1)..(2279): NCBI GI: 46124405 Blast Desc: FG06580.1 [Gibberella zeae PH-1]
  misc_feature (9)..(2278): NCBI GI: 156052365 Blast Desc: SS1G_06348 [Sclerotinia sclerotiorum 1980] gi|154704128|gb|EDO03867.1| SS1G_06348 [Sclerotinia sclerotiorum 1980]
  misc_feature (25)..(2278): NCBI GI: 225684207 Blast Desc: acetyl-CoA carboxylase [Paracoccidioides brasiliensis Pb03]
  misc_feature (25)..(2278): NCBI GI: 258574187 Blast Desc: acetyl-CoA carboxylase [Uncinocarpus reesii 1704] gi|237901541|gb|EEP75942.1| acetyl-CoA carboxylase [Uncinocarpus reesii 1704]
  misc_feature (27)..(2278): NCBI GI: 121698358 Blast Desc: acetyl-CoA carboxylase [Aspergillus clavatus NRRL 1] gi|119395938|gb|EAW06370.1| acetyl-CoA carboxylase [Aspergillus clavatus NRRL 1]
  misc_feature (26)..(2279): NCBI GI: 240282329 Blast Desc: acetyl-CoA carboxylase [Ajellomyces capsulatus H143]
  misc_feature (26)..(2279): NCBI GI: 225559392 Blast Desc: acetyl-CoA carboxylase [Ajellomyces capsulatus G186AR]
  misc_feature (31)..(2274): SWISSPROT Homolog: EC 6.4.1.2 Acetyl-CoA carboxylase
  misc_feature (31)..(2274): SWISSPROT Homolog: EC 6.3.4.14 Biotin carboxylase
MASQTNGKAATNGNRTVPVANGKPTYAEKHRVADHFIGGNRLENAPPSKVKDFVASHDGHTVITNVLIANNGIAAVKEIRSVRKWAYETFGDEKAIQFTVMATPEDLAANADYIRMADHYVEVPGGTNNHNYANVELIVDVAERMNVHAVWAGWGHASENPKLPESLAASPNKIVFIGPPGSAMRSLGDKISSTIVAQHAEVPCIPWSGTGVDKVEVDDQGIVTVADDVYLKGCVQSWEEGLEKAKQIGFPVMIKASEGGGGKGIRKALSEDGFEQLYKAAASEIPGSPIFIMKLAGNARHLEVQLLADQYGNNISLFGRDCSVQRRHQKIIEEAPVTIAKPPTFKGMEEAAVRLGRLVGYVSAGTVEYLYSYEDDKFYFLELNPRLQVEHPTTEMVSGVNLPVAQLQVAMGIPLHRISDIRLLYGVDPKTSTEIDFEFKSPQSDKTQRRPQPRGHCTACRITSEDPGEGFKPSNGVMHDLNFRSSANVWGYFSVSTSSSIHSFSDSQFGHIFAYGESRAASRKNMVVALKELSIRGDFRTTVEYLIKLLETEAFEDNTITTGWLDELISKKLTAERPDPILAIVCGATTKAHIACEATIAEYRAGLERGQVPSKDILKTVFPVDFIYEGHRYKFTATRAGPTSYHLFINGSKCQVGIRPLSDGGLLILINGRSHSVYWKEEVGATRVSVDSKTCLLEQENDPTQLRTPSPGKLVKYTVENGEHVKAGQTFAEVEVMKMFMPLIAQEDGIVQLIKQPGVTIEAGDILGILALDDPTRVKQAQPFVGQLPNLGSPQNLGNKPSQRFNLAFAILQNILKGYDNSVIMQQTLKEMVEVLRNPELPYSEWSAHHSALHSRMPQPLDAAFTQIIEKSKQRGAEFPAKTLARCFTKFITENTTPSEADTLKTTVQPLLDVLINYAEGQKVRELNAISELLNEYVEVESLFANRRSQDEDIVLKLRDENKEDYTKVIETVLSHSRVGSKNHLILALLDEYRPNKPNSGNVARHLRDVLRELAELDSRSTAKVSLKAREILIQCALPSLEERTAQMEHILRSSVVENKYGETGWEHRQPNLDVIKEVVDSKYTVFDVLGTFFAHEDAWVAAAALEVYVRRAYRAYNVSKIEYHADDTDTNPAFLSWDFSFRKSESELDIMPQSTNPSVPGTPMKEEFGFHRISSVSDMTYLSEKTEAQPIRKGVIVPCKYLDEADEWLPKAIETLPLKKARTPSALPNLDGKRKYFKTEEDELANVINVAVRDAESVDDQEIIARIRSMIDANKSDLLSHRVRRVTFVCNRNDGSNPRYYTFRGPEYVEDETIRHIEPSLAFQLELQRLAKFKISPVFTENKNIHVYEAVGKGVETDKRYFTRAVIRPGRLRDDIPTVEYLVSETDRVINDIFDAMEIIGNNNSDLNHMFLNFSPVFQLKPDEVEKSLQGFLDRFGPRAWRLRVSHVEIRIVCTDGTTGQPVPLRVLISNTSGYVIQVEIYAERKSEKGEMIFHSISGTNRIGSMHLMSVSAPYPTKNWLQPKRYRAHLLGTQYVYDFPELFRQAVENSWTQILKKQGHLADKKPAQGECIDYHELVLDDHDKLAEVSREPGTNTCGMVGWVINARTPEYPKGRKFVVVANDITYKIGSFGPKEDHFFNKCTELARSMGIPRIYLSANSGARLGVADELIPHFKVAWNDPNKQESGFKYLYLDDAAKKRFEDGASKDVITETVSEDGEERHKIVAIVGAEDGLGVECLRGSGLIAGATSRAYNDIFTVTLITCRSIGIGAYLVRLGQRAVQIEGQPIILTGAGALNNLLGREVYTSNLQLGGTQIMYRNGVSHMTANDDFAGVSKIVEWLSFVPAQRGLPVPITPSFDSWDREIVYTPPNKQPYDVRWLIGGKQDEDGFQPGLFDKDSFVEALGGWARTVVVGRARLGGIPMGVIAVETRTVENVTPADPANADSVEQVVNEAGGVWYPNSAFKTAQAINDFNHGEQLPLMILANWRGFSGGQRDMYNEVLKYGSYIVDALVKYEQPIFVYIPPFGELRGGSWVVVDPTINPVAMEMYADVEARAGVLEPEGIIGIKYKKDKQLETMARLDATYAALKKQASVEGLSKEQADELKKKMTARERQLLPIYAQISIQFADLHDRAGRMKAKGTIREAIEWKNARRFFYWRARRRLNEDYILKRMATASNSKIADKCSPAAVTQRKEHLGMLAAWSGVPNFSHSDRDVVNWYESNAKVISTKIEAIKIEAVGRQMSDLMSGDKVAALKGLKEMLHMMPIGEREEIMKYLK

SEQ ID NO: 34291 - DNA, 7738 bp, Muscodor strobelii
  misc_feature: SGI EST ID NO. CUFF.82370.1
  misc_feature: Variant of the nucleotide sequence at SEQ ID NO 34289
ttttttttctcgctggcttgatgtttaattattattattacatgaaggatatcccgtccgcttctcaccacctgatcccgagactttcttcctctcttgcacatactcccaaacctcgcactcccatcccgtcgttatcgacttctctccatcctcgttgcttactaccactgctgctgcccgtgctcctcttttatagaagagggcattgtaataacctgtctttctcggcatagcttgggtgtgctcatagtccgctgtccctgatatcccactcccaaaaaggggtccattatctgattggagatacccgggtagaattggtgtggtcttgccttgttgtacattgcgcactttcgtcctgcttgtgcttgaattctctcggccactttttcccgtccgccctcgccaatcgacctccccgctgctgtctgaccagcagcccactcccccccatcgccgaaatccaccgaaccgtacagtcagctagctgcagcagctgagctgtcgacgctgtggttcgacagcactccctcgccgcaagaggataccaacacggctctcaattcgggcacagctggagcttggatgatccgctatccatcctacacagtcactatctaatcctttcgacgtcctctccccacccgtcgaacccctccccctccaaaccacaccttctttagacgaaaccatggcttctcagacaaacggcaaggctgccaccaacggcaaccggacggtgcccgtcgccaatggcaagcccacgtacgccgagaagcacagagtcgcggaccacttcattggcggtaaccggctcgagaatgcccccccctccaaggtcaaggacttcgtggccagccacgatggccacaccgtcatcacaaacgttctgattgccaacaacggtatcgctgccgtcaaggagatccgatcagtacgaaaatgggcctacgagacgtttggcgacgagaaggccatccagttcaccgtcatggccacccctgaagatctagctgccaacgccgattacatcagaatggcggaccactacgtcgaggttcccggtggtacgaataaccacaactacgccaatgtagagctgattgtcgatgttgccgaacggatgaacgtgcacgccgtatgggctggttggggtcacgcttcagaaaaccctaaactgcccgagtcgctggccgcctctccaaacaagatcgtcttcatcggacccccaggatccgccatgcgatctctcggtgacaagatctcctccaccatcgtcgcccagcacgccgaagtgccctgcattccgtggtcgggtaccggtgtagacaaggtcgaggtcgacgaccagggcattgtcacagttgcggacgatgtctaccttaagggctgtgtccagtcgtgggaagagggtctggaaaaggccaagcaaatcggcttccccgtcatgatcaaggcctccgaaggtggtggcggcaagggtatccgaaaagccttgtcggaagacggctttgagcagctctacaaggctgccgcgagcgagattcccggttcccccatcttcatcatgaagctggctggaaacgcccgtcacttagaggtccagctgctagctgatcagtacggaaacaacatttctctgttcggcagagattgttccgtccagagacgacaccagaagattatcgaagaggccccggtaacgattgcgaagccgcccacgttcaagggtatggaagaagctgccgtccgtctgggccgacttgtcggatatgtttctgccggtactgtcgagtatctgtactcctacgaagacgacaagttttacttcttggagttgaaccctcgtcttcaggtcgagcatcccacaactgaaatggtcagcggtgtcaacctgcccgtcgctcagcttcaagttgctatgggtatcccattacaccgcatcagcgacatccggctgctgtatggtgtcgatcccaagaccagcaccgagattgacttcgagttcaagagcccccagagcgacaagactcaacgtagaccacagcccagaggacattgtacggcctgccgtatcacttccgaagatcccggcgagggcttcaagccttccaacggtgtcatgcacgacttgaatttccgtagtagcgccaacgtttggggttatttctccgtcagtacctcgtccagtattcacagtttctccgacagtcagttcggtcacatttttgcctacggagagagccgtgctgcttccaggaagaatatggtcgtggctctgaaagagttgagcatccgtggtgatttccgaacaaccgtcgagtatctcatcaaacttctcgagaccgaggctttcgaggataacacaatcaccacgggctggctggatgagctgatctctaagaaattgaccgccgaacggccagaccccattctcgccattgtttgcggtgctacaaccaaggctcacattgcatgcgaagcaacaattgccgagtaccgagccgggctcgaacgcggtcaagtaccctctaaggacatcctcaagacggtcttccctgtcgacttcatctacgaaggtcaccgctacaaattcacggcaactcgtgcgggtcccacgagctaccacctctttatcaatggctccaagtgtcaagtcggtattcgacccctcagtgatggcggtctgcttattttaatcaacggtcggagtcacagtgtctactggaaggaggaagtcggtgctacccgtgtttcagtggacagcaaaacatgtctcttggagcaggagaatgaccctacccagctccggacaccaagtcctggcaagctcgtgaaatacaccgtggaaaatggtgagcacgtcaaggccggccagactttcgctgaggtcgaagtcatgaaaatgttcatgcctttgatcgcccaggaagacggcattgtgcaactcatcaagcagcccggtgtcaccatcgaagctggcgacatcttgggtattctagctctcgatgacccaacccgcgtgaagcaggcccagcccttcgtcggccaactccccaacctgggatcaccgcagaatctgggtaacaagccttctcagagattcaatctggcattcgcaatcctccaaaacattttgaagggctacgataactccgtaatcatgcaacagaccttaaaggagatggtcgaggtcttgcgcaatcccgagcttccctacagcgagtggtctgcccaccattctgctctgcactctagaatgcctcagcctttggacgcggcgttcactcaaatcattgagaagtccaagcaacgaggagctgaattcccagccaagactcttgcgagatgtttcaccaagttcatcaccgagaataccactcccagcgaggcagataccctcaagaccaccgtccagcctctgctggatgtcctcataaactatgccgagggtcagaaagtccgagagctcaatgccatttccgaactcctcaatgagtacgtggaagtggagtctctattcgccaaccgccgtagccaggatgaagatatcgtcttgaagctgcgtgatgagaacaaggaagattacacgaaggtcatcgagaccgtcctctcgcacagtcgtgttggatccaagaaccacttgattcttgcactattggacgaatatcgccctaacaagcctaactctggaaatgttgctcgacacctgcgagatgttctccgtgagttagccgagcttgactcgcgctctactgccaaggtctccctcaaggccagagagattttgatccagtgtgctctcccctcattggaggagcgcactgcccaaatggaacacattctccgctcgtccgtcgtcgagaacaagtacggagagactggctgggagcacagacagcccaaccttgatgttatcaaggaagttgtcgactccaaatacactgtgttcgacgtgttgggcacgttcttcgctcatgaggacgcttgggtcgctgctgcggcgcttgaagtatatgtccgccgggcttaccgtgcctacaatgttagcaagattgaataccatgccgacgacaccgataccaatccggctttcctttcgtgggacttctccttcagaaagagcgaatccgagcttgacatcatgcctcagtcgaccaatccatctgttcctggtactccgatgaaggaagaatttggattccaccgcatcagctcggtcagcgacatgacttatcttagcgagaagaccgaggcccagcctatcagaaagggtgttattgttccctgcaagtatcttgatgaggctgatgagtggctaccgaaagccatcgagactctacctctcaagaaagctcgcacaccgagtgctctacctaacctcgatgggaagcgcaagtacttcaagaccgaggaagatgagcttgcgaacgtcatcaacgtggctgtccgcgatgctgagtcagtggacgatcaggagatcattgctagaatcaggtccatgatcgacgccaacaaatctgaccttctttctcatcgcgttcgtcgcgtcacgtttgtctgcaatcgtaatgatgggtcaaaccctcggtactacaccttccgtgggcctgagtatgtcgaagacgagacgatccgtcacattgagccttctcttgccttccagctggagctccagcgtctggccaagttcaaaatctctccagtcttcaccgagaacaagaacattcacgtgtacgaggcagtgggcaaaggtgtggagaccgacaagcgttacttcactcgtgccgtcatccgacccggtcgtctacgagacgacatccccactgtcgaatacctggtttctgagacagaccgtgtgatcaacgatatctttgatgccatggagatcattggcaacaacaattctgatctgaaccacatgttcctcaacttctcacctgtcttccagctgaagccggatgaggtcgagaagtctctccagggattcctcgacagatttggcccccgtgcttggcgtctgcgtgtgtcccatgtcgagattcgcattgtctgcaccgacggtactaccgggcagccagtccccttgcgtgtgttgatcagcaatacatctgggtatgtcattcaagtcgaaatctacgcagaacgtaagtccgagaagggcgaaatgattttccactcgatcagcggtaccaacagaatcggctctatgcatctcatgtctgtgtccgcgccatatcccacgaagaactggctgcagcccaagcggtacagagcccacctgcttggtacgcagtacgtgtatgatttccctgagctgttcagacaagctgtcgagaatagctggacccaaatccttaagaagcagggccacctcgcagataagaaacccgcccagggtgagtgtattgactaccacgagcttgttctcgacgaccatgacaagcttgccgaggtctcacgtgagcctggcaccaacacctgtggtatggttggttgggtcatcaacgctcggactcctgagtatcccaagggccgtaagttcgttgtcgtcgccaacgatatcacctacaagattggttcatttggtcctaaggaagatcacttcttcaacaagtgcacagaactggctcgcagcatgggtattccccgtatctacctgtctgctaactctggtgcccgcttgggtgttgccgatgagctcatcccgcatttcaaggtagcctggaacgacccgaacaagcaggaatcaggcttcaagtacttgtacctcgatgacgctgcaaagaagcgattcgaggacggggcttctaaggatgtcattaccgagaccgtcagcgaggacggcgaggagcgtcacaaaattgtggccattgtgggtgctgaagatggtctcggtgtcgaatgcttgcgtggatccggtttaattgctggcgctacaagtcgtgcttacaacgatatcttcactgttacgttgatcacctgtagatccattggtatcggtgcctatctcgtccgtcttggtcagcgtgctgtccaaatcgaaggccagccaattattttgactggtgctggcgccctgaacaacctgctcggtcgtgaggtctatacttccaaccttcaacttggtggtactcaaattatgtatcgtaacggtgtttctcacatgaccgccaacgatgattttgctggtgtctctaagatcgtcgaatggctgtcgtttgttccagctcaacgcggccttcctgttcctatcactcccagcttcgattcttgggatcgtgagatcgtctacacaccaccgaacaagcagccttatgatgtcagatggctgattggcggtaagcaggatgaggatggcttccaacctggcctcttcgacaaagactcttttgttgaggctcttggcggatgggcccgcacagtcgttgttggtcgtgctcgtctcggtggcattcctatgggtgttattgcagtggagacccgcactgtcgagaacgtgacgcccgcggatcctgccaacgccgactcggtcgagcaggttgtcaacgaggctggcggtgtctggtaccccaactccgctttcaagactgcccaggccatcaacgacttcaatcacggcgagcaactgcctcttatgatccttgccaactggagaggcttctcgggaggccaacgtgacatgtataacgaggtcttgaaatacggttcttatattgtcgatgctctcgtcaaatacgagcagcctatcttcgtgtacatcccacccttcggtgaacttcgcggtggctcttgggtcgtcgttgatcctaccatcaaccctgtcgccatggagatgtacgccgatgtcgaggctcgcgctggtgtccttgagcccgaaggtatcattggtatcaagtacaagaaggacaagcagcttgagaccatggctcgtctcgatgctacttatgctgctctgaagaagcaggcctccgtggaaggcttgtccaaggagcaagccgacgagctcaagaagaagatgactgcccgagagagacagctgctgccaatttatgcccagatcagcatccagttcgccgatctccatgatcgtgctggccgcatgaaagccaagggcactatccgcgaagctatcgaatggaagaacgctcgtcgcttcttctactggcgagctcgcagacgtctcaacgaggactatatcctcaagcgcatggccactgccagcaactccaaaattgctgacaagtgcagccccgccgccgtcactcagcggaaagagcacttgggtatgcttgctgcgtggtctggcgtgcccaacttctctcacagtgacagagacgttgtcaactggtacgagagcaatgccaaggtcatctccaccaagatcgaagcaatcaagatcgaggctgttggtagacagatgtccgacttgatgagtggtgacaaggtcgctgctctgaagggtctaaaggagatgttgcacatgatgcccattggtgagcgtgaggagatcatgaagtacttgaaataagatttatgggatggaatgaggtcgtcaatgtaaattattggtctgctgtgtggtgtatttagtgcgggtttcggtttttgtgcttagataacctggcgcttatatcttaaaagggaggcagcattagtggatttcgctatcttggtatattgttttagatgaacattccaattcaaaactgttcaaattagttgccatggccga

SEQ ID NO: 34292 - DNA, 636 bp, Muscodor strobelii
  misc_feature: SGI cDNA ID NO. 571848
  misc_feature: Encodes the peptide sequence at SEQ ID NO 34293
atgggaaagtcgctcggcaagactattatcgaaggaatcgagcttcaaccgcgttgggcgggagaggttgaaagattatggtctttctacaatgacgctcttggttggcaccgtaccaccaaatacttccctgaaggcttcgctgcggcaattgactacacaagcaagaagtggatagaacgaatgaaacgcacggtacgcgaacatccacatcataagaagcatctcgtcttaaaggacaggatcgagacatatgaaaaatacaaggcgtggctgggggggaagtgtaggcaaacacaccctaaagatcctaaaaaggatcagcgagaggatcaagaagagggtcagaaagagaatcaaaaaggaggcggtggtgatgatcatgagacaaacgccaaggatcgtcggatttatagtgctgagacattgaagcatattaccgatttcttcatacgccgccgagcggatggaaaactagacggctggccacaggcagatattaaattctttctcgatgaggtttgctctgtgcccatcaccacccagttcgaggctgagggccaaagccaaatgtcaggtgcagggcgtaaagaagttgaacagcgctgggaagcaattgcagctcaggtccattaa

SEQ ID NO: 34293 - protein, 211 aa, Muscodor strobelii
  misc_feature: SGI Peptide ID NO. 571848
MGKSLGKTIIEGIELQPRWAGEVERLWSFYNDALGWHRTTKYFPEGFAAAIDYTSKKWIERMKRTVREHPHHKKHLVLKDRIETYEKYKAWLGGKCRQTHPKDPKKDQREDQEEGQKENQKGGGGDDHETNAKDRRIYSAETLKHITDFFIRRRADGKLDGWPQADIKFFLDEVCSVPITTQFEAEGQSQMSGAGRKEVEQRWEAIAAQVH

SEQ ID NO: 34294 - DNA, 1890 bp, Muscodor strobelii
  misc_feature: SGI cDNA ID NO. 571849
  misc_feature: Encodes the peptide sequence at SEQ ID NO 34295
atgcctgggaaacgtcctatcagggtggctggcgcctctggtggctatacggatcgtcaacgtgcaattcatgatctggctgcagaatgtgaactcgacgtgatcactggagactggatggccgagggcacaatggtgatgcacgggttgaagaagttagagcgaaagaagatcatggccgagaacccgactggaccaataccagacggcgctttcgacccctatttcgttggtacgattgagcgtgcactccctgtactagccgagaaacgagtcaaggtagccgtcaatgcaggcgccagcgatccagatctactctccaaacagctggctgcgaggtgcaaagagctgggactcgatctcaaggtagcatgggtggagggggatgagtgtatcgacgcaatccaagagctgcggaaaaagggagagcaactgaacaatctcgatactggcaaagcgctcaaagactggggcttcgagcccgtgtatgcgcaatgctatctagggtcattcggtatcgccgaagcatttaagagaggtgccgatattgtcattgctggcagagttgctgatgctgcgccgactattggtgccgcgatatggtggcacggttgggatcggagtaatttgaacgaagtcgccggtgcattgatggcaggccacgttatcgaatgctctgcctatgcaaccggcggctactattctgggttcaagaacttgatgagcggatgcgagaatctgggcttccccatcgccgagattgacgctgctggcgaaacgactttcacgaagggtgccggccctggtggagagatgtcgatcggtacagcgacatcacaactcctatacgagatacaaggtccgctgtatttcaactcagatgtagttgccgatatatcgggcatcaggttcgaggacgctgggaaggaccgcgtaaagatgacgggcgtaaagggacttccgccgcctccaacaaccaaagtcgggattatttccgagccgggcaagatgtggcaagcggagtttcatttcttcttggtaggtatagatatcaaggagaaagcggaatggacagagaagcagattcgctacgctatgcgtgatcatatacacaagtttactaccctcaaattctccctggtcggttcgagtgcagacgatcccacagaccaaaattctgcaacagtggactttcgagttttcgcgcagacacgcgatccgaccatcgtaggattgggcggtgctgccgccggaactggcttgggtactatgacgaccgggacatttaccagatggtgcctcgagaactttctgcaaagctgccctggtgcgacggtcgaagttgacacgagacaaagtatggcacgtcctgttctggagtactggccgacgatcatgcctcaaagcatgttcacggagagaatggtactggagtggagcgacgaggttgttgaaattcctggtccgaccgagacgaagacgtacggcccacaagactcatacgataccgtgggtcccgttgatctgggctcattcggtccaacaacgaaaggcccgctgggatggattgcgctaggtcgctcaggcgacaaagcatcggatgccaacaccggtttctttgttagatacgatgacgaatgggactggttaagaacgcttctctcaatagatacctttaagaagctactggccaatgagtatctaggtcatcgtatcgataggtgcgagttcccaggagccaaggccgtccacttcttgttgaaagatcatttggaccgtgggtccgttagtagctcgtccatggatccattcggcaagaatttgtgtgaatatatcagggcgaggcatgttgatataccgaataagttcttggaaagaggacgggtgtag

SEQ ID NO: 34295 - protein, 629 aa, Muscodor strobelii
  misc_feature: SGI Peptide ID NO. 571849
  misc_feature (9)..(382): Pfam Id: PF07287 Pfam Desc: Domain of function (DUF1446)
  misc_feature (9)..(356): Pfam Id: PF07287 Pfam Desc: Domain of function (DUF1446)
  misc_feature (4)..(629): NCBI GI: 261355824 Blast Desc: conserved [Verticillium albo-atrum VaMs.102]
  misc_feature (4)..(629): NCBI GI: 261354680 Blast Desc: conserved [Verticillium albo-atrum VaMs.102]
  misc_feature (4)..(629): NCBI GI: 189197007 Blast Desc: PTRG_04508 [Pyrenophora tritici-repentis Pt-1C-BFP] gi|187980789|gb|EDU47415.1| PTRG_04508 [Pyrenophora tritici-repentis Pt-1C-BFP]
  misc_feature (6)..(629): NCBI GI: 256724636 Blast Desc: NECHADRAFT_48019 [Nectria haematococca mpVI 77-13-4]
  misc_feature (5)..(629): NCBI GI: 169773091 Blast Desc: [Aspergillus oryzae RIB40] gi|238491030|ref|XP_002376752.1| DUF1446 domain protein [Aspergillus flavus NRRL3357] gi|83768875|dbj|BAE59012.1| protein
  misc_feature (1)..(517): NCBI GI: 261358937 Blast Desc: conserved [Verticillium albo-atrum VaMs.102]
  misc_feature (5)..(629): NCBI GI: 119472007 Blast Desc: NFIA_057110 [Neosartorya fischeri NRRL 181] gi|119406411|gb|EAW16362.1| conserved [Neosartorya fischeri NRRL 181]
  misc_feature (4)..(629): NCBI GI: 240108773 Blast Desc: CPC735_022780 [Coccidioides posadasii C735 delta SOWgp]
  misc_feature (5)..(629): NCBI GI: 226278633 Blast Desc: conserved [Paracoccidioides brasiliensis Pb01]
  misc_feature (5)..(629): NCBI GI: 226293580 Blast Desc: conserved [Paracoccidioides brasiliensis Pb18]
MPGKRPIRVAGASGGYTDRQRAIHDLAAECELDVITGDWMAEGTMVMHGLKKLERKKIMAENPTGPIPDGAFDPYFVGTIERALPVLAEKRVKVAVNAGASDPDLLSKQLAARCKELGLDLKVAWVEGDECIDAIQELRKKGEQLNNLDTGKALKDWGFEPVYAQCYLGSFGIAEAFKRGADIVIAGRVADAAPTIGAAIWWHGWDRSNLNEVAGALMAGHVIECSAYATGGYYSGFKNLMSGCENLGFPIAEIDAAGETTFTKGAGPGGEMSIGTATSQLLYEIQGPLYFNSDVVADISGIRFEDAGKDRVKMTGVKGLPPPPTTKVGIISEPGKMWQAEFHFFLVGIDIKEKAEWTEKQIRYAMRDHIHKFTTLKFSLVGSSADDPTDQNSATVDFRVFAQTRDPTIVGLGGAAAGTGLGTMTTGTFTRWCLENFLQSCPGATVEVDTRQSMARPVLEYWPTIMPQSMFTERMVLEWSDEVVEIPGPTETKTYGPQDSYDTVGPVDLGSFGPTTKGPLGWIALGRSGDKASDANTGFFVRYDDEWDWLRTLLSIDTFKKLLANEYLGHRIDRCEFPGAKAVHFLLKDHLDRGSVSSSSMDPFGKNLCEYIRARHVDIPNKFLERGRV

SEQ ID NO: 34296 - DNA, 2649 bp, Muscodor strobelii
  misc_feature: SGI cDNA ID NO. 571850
  misc_feature: Encodes the peptide sequence at SEQ ID NO 34297
atggccgacaatagagacatagtctctgttgggggacacgtgttctccgcggaagaaaacccgcaaaccgccgccttctttcctgcgatggctgaagtgactcttggagaagagaacgaggatagatttaaggacctgcccccagcgtcgatacatcatccggaagctcctcctcctcctgggttcgggtttgccgttgatccagagctcatcgacccagcactcatggctggggcaggtcaaggattatctctaggcgcatcaggggcattttttacgcgaagtccaacgcgaagcccccctcagccagccggtggcatgtcatcgcctggtaatccaccccctagtctctcgcccggccagccgatatctcctggaggtcctgtagctggcggtatctctcccggacagcaacccgtatcgcctgctaacccattcgctactggactttcaccaggacagcaacaacaacccgcgtcgcctggtggtctgccggctgctgctgtctccccaggacagcaaccccaaactcctggccagaacttgccgccacagtctcccggcgggtttgtgcctttcactggtaatagcccgccagcctttggcctgtctccctttgacaatcctgtttcgcctagcgcaattctggaatcagcgggagtaactaatcttgatcctgattcgccgagcgccatcctggaatcggcgggaataatgaatctcgatcctgtgtcgccaagtaccgttttccagccagcagtgtccaaccaaacgggcattccttttgccccggccgcgggccaaaacatcgatctcacacttccaggatttgtatcgcagcagcaatatccgtctggatttgtatcgcaggagcgatatccgcctcttcattctcttcctcctgcttcagctgtggatcatagcggcatcaatcctacaagttccggtatgcctcagtttcctcttgcttctactctgaccccagccccggatttgggagcatcacagcccggggaacacaggggcatcgatcttgcaagtcttggtaggtctttttctcccagtccagcaactattttcggagccagcaccagaacaaacccagatccggtgggagaacccagtccagcaactattttcggagccagcaccagaaccaacccagatccggtgggagaactttcaagcataaggtgcgaaaggtgcgccaggcaacataaggcatgcggcagagagttgccgcagtgcactaagtgccaagaggacggtgccatgtgcgtctatccgcagcggaggccatgggaacgcaaccgtgatcccgagcagcattcagcgtcgcccccacaggttgagtttggactccagacgaatccggcgccactcacacaggttgagaccgccttccaaccgcagtcggcgcttaatgaccctacacggctgtctacggctccagcaccgcttcccacaccgttttctgggccgtcatccgcaccgattcaattacccacatttgcggaaagacagaggaacacaaataggcaggacagacgtaatgcaagatggcaggcaccatggcagcctcgaccgcaacgccacagtgcacgatcgtcaccagcactttctcctggtcctgactctcctggtcttgatatgtcaagccgacgcgttcgaatcgatcgcgaattagtgacgcttcttgcatttatagcttggaaggagatggaagaggctgtgggaggtgtggagagtatggttttgtatgcgtcgccatgggcagacctctcccctccaatcccgctcagtcggtccgtagggctgcgagaggcatcagcgcctgtcaaaattgccataagggcacaaaccgccgggctgcagcccaaggcaggcacgaaagtcacctacgaaggcgagatgccaggaggtggtatgcctacctatctttctacattcgggtggggtccgcaaggtccacgaggtggcgctcgagcggaccaggtggttgtgcagccagggccgcaagaccatctccagtgggctgctactcatccgaatcaccctgctttagctgcgcaaggtgcccccggtcaaggtgcagcgcctacctctctgccggcaaatccatctactagttttcttggtccagctttaacttcagctccagatctcactttcgaatctgcatatcctgatccagaagctcttggtcaagtcccagcttccgcccctactccagcgccgacatttcctgatccttccagcacgtctgcttttccccctactaccatttcagctgccgatcctctaccaccttctaccggcgctatgggccagccctttactttccctcctagaaccctaccaaatcccgatgatccatttcctctcaccgatttctctggtttaatagaccctatgatcactggtggaaatccctatgtgcctcctacttctagcgctgctgagcctgagccatcccgtgtcacatatgacccattttttggtgcgcctcaagaaaatgataacgacaatccctatgtgcctcctacatctagcgctgctcagcctgagccatctcgtgtcacatatgacgataatgaaatggatcttgacgaatttttgaattttccaccagatctaggcccggattaa

SEQ ID NO: 34297 - protein, 882 aa, Muscodor strobelii
  misc_feature: SGI Peptide ID NO. 571850
  misc_feature (399)..(435): Pfam Id: PF00172 Pfam Desc: Fungal Zn(2)-Cys(6) binuclear cluster domain
MADNRDIVSVGGHVFSAEENPQTAAFFPAMAEVTLGEENEDRFKDLPPASIHHPEAPPPPGFGFAVDPELIDPALMAGAGQGLSLGASGAFFTRSPTRSPPQPAGGMSSPGNPPPSLSPGQPISPGGPVAGGISPGQQPVSPANPFATGLSPGQQQQPASPGGLPAAAVSPGQQPQTPGQNLPPQSPGGFVPFTGNSPPAFGLSPFDNPVSPSAILESAGVTNLDPDSPSAILESAGIMNLDPVSPSTVFQPAVSNQTGIPFAPAAGQNIDLTLPGFVSQQQYPSGFVSQERYPPLHSLPPASAVDHSGINPTSSGMPQFPLASTLTPAPDLGASQPGEHRGIDLASLGRSFSPSPATIFGASTRTNPDPVGEPSPATIFGASTRTNPDPVGELSSIRCERCARQHKACGRELPQCTKCQEDGAMCVYPQRRPWERNRDPEQHSASPPQVEFGLQTNPAPLTQVETAFQPQSALNDPTRLSTAPAPLPTPFSGPSSAPIQLPTFAERQRNTNRQDRRNARWQAPWQPRPQRHSARSSPALSPGPDSPGLDMSSRRVRIDRELVTLLAFIAWKEMEEAVGGVESMVLYASPWADLSPPIPLSRSVGLREASAPVKIAIRAQTAGLQPKAGTKVTYEGEMPGGGMPTYLSTFGWGPQGPRGGARADQVVVQPGPQDHLQWAATHPNHPALAAQGAPGQGAAPTSLPANPSTSFLGPALTSAPDLTFESAYPDPEALGQVPASAPTPAPTFPDPSSTSAFPPTTISAADPLPPSTGAMGQPFTFPPRTLPNPDDPFPLTDFSGLIDPMITGGNPYVPPTSSAAEPEPSRVTYDPFFGAPQENDNDNPYVPPTSSAAQPEPSRVTYDDNEMDLDEFLNFPPDLGPD

SEQ ID NO: 34298 - DNA, 1479 bp, Muscodor strobelii
  misc_feature: SGI cDNA ID NO. 571851
  misc_feature: Encodes the peptide sequence at SEQ ID NO 34299
atggctcagccagctagcaatgaggcggaatggggccccgcccccgatttcagctcagaaaacgattccccgggcgctaactacgatgccaccaacgaagcctggttcaaccactcaacagcgaagcgaaccaacacggatgtggtgattgcaaaggcactatcgcgacaataccctaacttgcagctcgtcatcgcgccgcccgtcagtggtctcagcttgctgaaatatgcacaagctggtaatgcaacatgcaagccaattgaagggaaattgggctatgcgggagacttctcacctgtggcctggacaatctacatcccgcctagaagccgcatcgacggtagctccggtgccctgggagagaaagtgaattttggaaaattcgcatacaaatggcagggtcatgacttcatcctgtatattgccgaagggcgcgatgggaactatccgtacggcggcacaaacaaccactatcttctggccacggaaaggcaccgcgctgatgcgttgcttctcgctgctggaagctggagcaacgagctgcacgaggaagtatgggtctttgatcagggttactggcagaagaatgcggacctctttcgcagcattatcggtgcctcttgggacaatgtgattcttgatgccgacatgaaagagtcgatcatcgatgatcacttgtcttttttcaagtcccgcgacacatatagcaagctgaaggtgccatggaagcgtggcatcatataccacggaccacctggtaacgggaagacaatctccatcaaagccaccatgcgcatgctttacgagctaaaggacccggtcccaacgctctatgtgcgaacgttgagctcgttttcaccaccggagttctcactcaaagcgatctttgagaaagctagacaatttgccccttgctatcttgtgttcgaagatctagacagtatcgtgaccgatcgtgttcgaagctattttctcaacgaggtagatggcttgaagagcaatgacgggatattcatgatagggtcgactaatcacttggatcgccttgacccgggtatcgctaaacgtccttcacgttttgacaggaagtacttcttcccagaccctgacttggaacagcgtattgcgtactgcaagttctggcaggggaagctggctgacaacgatgagattgaattccccgacaaactgtgcaaggcaatcgcagatatcaccgacaaattcagctttgcgtacatgcaagaagctttcgtcgctgcactacttgcgatcgctcggaaatcgggagatagtgaaggaaaaagagaggagccactggcacgggatgtgggtgatggatggctagatgtacgctccgtggatggagacgatgatgggttggacggtaacacattatggaccgagatcaaaaaacaggtcgcgatattgcgagaaggcttgggagaaggagaaagcatgaattctagcaagaactag

SEQ ID NO: 34299 - protein, 492 aa, Muscodor strobelii
  misc_feature: SGI Peptide ID NO. 571851
  misc_feature (246)..(423): Pfam Id: PF00004 Pfam Desc: ATPase family associated with various cellular activities (AAA)
  misc_feature (32)..(485): NCBI GI: 116194274 Blast Desc: CHGG_03735 [Chaetomium globosum CBS 148.51] gi|88179648|gb|EAQ87116.1| CHGG_03735 [Chaetomium globosum CBS 148.51]
  misc_feature (19)..(481): NCBI GI: 145615370 Blast Desc: MGG_05537 [Magnaporthe grisea 70-15] gi|145022211|gb|EDK06231.1| MGG_05537 [Magnaporthe grisea 70-15]
  misc_feature (28)..(481): NCBI GI: 164429162 Blast Desc: NCU05160 [Neurospora crassa OR74A] gi|157072963|gb|EAA32628.2| conserved [Neurospora crassa OR74A]
  misc_feature (21)..(481): NCBI GI: 46122827 Blast Desc: FG05791.1 [Gibberella zeae PH-1]
  misc_feature (24)..(483): NCBI GI: 171683679 Blast Desc: protein product [Podospora anserina] gi|170941799|emb|CAP67453.1| protein product [Podospora anserina]
  misc_feature (29)..(483): NCBI GI: 169596402 Blast Desc: SNOG_00961 [Phaeosphaeria nodorum SN15] gi|111071336|gb|EAT92456.1| SNOG_00961 [Phaeosphaeria nodorum SN15]
  misc_feature (29)..(483): NCBI GI: 189202120 Blast Desc: ATP-dependent Zn protease [Pyrenophora tritici-repentis Pt-1C-BFP] gi|187984495|gb|EDU49983.1| ATP-dependent Zn protease [Pyrenophora tritici-repentis
  misc_feature (16)..(434): NCBI GI: 171683697 Blast Desc: protein product [Podospora anserina] gi|170941808|emb|CAP67462.1| protein product [Podospora anserina]
  misc_feature (23)..(441): NCBI GI: 189197453 Blast Desc: proteasome-activating nucleotidase [Pyrenophora tritici-repentis Pt-1C-BFP] gi|187981012|gb|EDU47638.1| proteasome-activating nucleotidase [Pyrenophora tritici-repentis
  misc_feature (51)..(436): NCBI GI: 169861662 Blast Desc: CC1G_01377 [Coprinopsis cinerea okayama7#130] gi|116501486|gb|EAU84381.1| CC1G_01377 [Coprinopsis cinerea okayama7#130]
MAQPASNEAEWGPAPDFSSENDSPGANYDATNEAWFNHSTAKRTNTDVVIAKALSRQYPNLQLVIAPPVSGLSLLKYAQAGNATCKPIEGKLGYAGDFSPVAWTIYIPPRSRIDGSSGALGEKVNFGKFAYKWQGHDFILYIAEGRDGNYPYGGTNNHYLLATERHRADALLLAAGSWSNELHEEVWVFDQGYWQKNADLFRSIIGASWDNVILDADMKESIIDDHLSFFKSRDTYSKLKVPWKRGIIYHGPPGNGKTISIKATMRMLYELKDPVPTLYVRTLSSFSPPEFSLKAIFEKARQFAPCYLVFEDLDSIVTDRVRSYFLNEVDGLKSNDGIFMIGSTNHLDRLDPGIAKRPSRFDRKYFFPDPDLEQRIAYCKFWQGKLADNDEIEFPDKLCKAIADITDKFSFAYMQEAFVAALLAIARKSGDSEGKREEPLARDVGDGWLDVRSVDGDDDGLDGNTLWTEIKKQVAILREGLGEGESMNSSKN

SEQ ID NO: 34300 - DNA, 1969 bp, Muscodor strobelii
  misc_feature: SGI EST ID NO. CUFF.81325.0
  misc_feature: Variant of the nucleotide sequence at SEQ ID NO 34298
cgcggcacagcacatcttcaaatgcagtgcatcgaccatctcgtattgtcgatcggccaggcagccatccagtatccttcccagtaatgtaacatacttgccaagcacgacggagggacttacatttcgagaaacaatgcgtcccatcagatagaagtccaccattcatcatcgatcattctcaggaccttgcccttttatctatcttcctgccgtcatcagctcgagaagaaaccgtacgagaacagtcatggctcagccagctagcaatgaggcggaatggggccccgcccccgatttcagctcagaaaacgattccccgggcgctaactacgatgccaccaacgaagcctggttcaaccactcaacagcgaagcgaaccaacacggatgtggtgattgcaaaggcactatcgcgacaataccctaacttgcagctcgtcatcgcgccgcccgtcagtggtctcagcttgctgaaatatgcacaagctggtaatgcaacatgcaagccaattgaagggaaattgggctatgcgggagacttctcacctgtggcctggacaatctacatcccgcctagaagccgcatcgacggtagctccggtgccctgggagagaaagtgaattttggaaaattcgcatacaaatggcagggtcatgacttcatcctgtatattgccgaagggcgcgatgggaactatccgtacggcggcacaaacaaccactatcttctggccacggaaaggcaccgcgctgatgcgttgcttctcgctgctggaagctggagcaacgagctgcacgaggaagtatgggtctttgatcagggttactggcagaagaatgcggacctctttcgcagcattatcggtgcctcttgggacaatgtgattcttgatgccgacatgaaagagtcgatcatcgatgatcacttgtcttttttcaagtcccgcgacacatatagcaagctgaaggtgccatggaagcgtggcatcatataccacggaccacctggtaacgggaagacaatctccatcaaagccaccatgcgcatgctttacgagctaaaggacccggtcccaacgctctatgtgcgaacgttgagctcgttttcaccaccggagttctcactcaaagcgatctttgagaaagctagacaatttgccccttgctatcttgtgttcgaagatctagacagtatcgtgaccgatcgtgttcgaagctattttctcaacgaggtagatggcttgaagagcaatgacgggatattcatgatagggtcgactaatcacttggatcgccttgacccgggtatcgctaaacgtccttcacgttttgacaggaagtacttcttcccagaccctgacttggaacagcgtattgcgtactgcaagttctggcaggggaagctggctgacaacgatgagattgaattccccgacaaactgtgcaaggcaatcgcagatatcaccgacaaattcagctttgcgtacatgcaagaagctttcgtcgctgcactacttgcgatcgctcggaaatcgggagatagtgaaggaaaaagagaggagccactggcacgggatgtgggtgatggatggctagatgtacgctccgtggatggagacgatgatgggttggacggtaacacattatggaccgagatcaaaaaacaggtcgcgatattgcgagaaggcttgggagaaggagaaagcatgaattctagcaagaactaggtgttaatgagggctttgtccgagcctgtgctggcgagtgttctggcatacgctctatagcttaaagcacacgctcgaagcttgggggatttcgttctgccttctcaatacaaggattcattggagatgtatagtaatttcgtttgaagaattccttctgtgaagaaagtgacagcatagctggttctatacgaatatgttttgatgcgacacagaattgaagaaaaccttacaactgcg

SEQ ID NO: 34301 - DNA, 879 bp, Muscodor strobelii
  misc_feature: SGI cDNA ID NO. 571852
  misc_feature: Elevated expression when VOC is produced
  misc_feature: Encodes the peptide sequence at SEQ ID NO 34302
atgcccgaacgtaccgataaacacgatgcgtttgccttgacatcgacgctcactggattccacacggagttcgtgggcggagtcaaaggtgaatcagtgcctgacaaagcgttaccttggggctataacagggaatctctcaaggagaccgagcttggaagttggagaggacatatgaacgtggttcgcaggatagtcgaagacaacttagaatctgcgctaatcatggaggacgacatggattgggacgtcaggctcaagtcacaactaagtaagatagcagaagggtctcgtaagctcatgccatctggcgataacccttcatcgccttatggcgatgcctgggatgtgctgtggctcggccactgtggcgagatattccccgaaacactgcccgaaaacgagggtaagaaagaacacccaaaattcatgatcagcaatgaccctaccgtgccacccgtcgacaagatcactggcttaaccgacttccacaactatcccgagcatacgcgatttgtacacgttagcggagggccgatctgcagtttcgcctatgccctgtctcaacaaggcgcgcgaaaagtgctctatcagctgtccgtggatcacctcaacatggcatttgacaattcgctggcagtcctatgtcgagatggcgcttcgggaaacgttgatgggctgcaagcgaaatgtcttactgtcacgccaccaatcttcttccatcatcgggctaaggggccgatagcgagtgatagcgatattcagaacccggatagcaaagacgtgagggagaaaggagtgacggagaatatcagatggagcgcgagaaataatatcaagaacatgatcatggggttagagatggaaagtcaattttga

SEQ ID NO: 34302 - protein, 292 aa, Muscodor strobelii
  misc_feature: SGI Peptide ID NO. 571852
  misc_feature (1)..(292): NCBI GI: 154290384 Blast Desc: BC1G_15746 [Botryotinia fuckeliana B05.10] gi|150847768|gb|EDN22961.1| BC1G_15746 [Botryotinia fuckeliana B05.10]
  misc_feature (1)..(292): NCBI GI: 156050769 Blast Desc: SS1G_07972 [Sclerotinia sclerotiorum 1980] gi|154692372|gb|EDN92110.1| SS1G_07972 [Sclerotinia sclerotiorum 1980]
  misc_feature (1)..(285): NCBI GI: 154296527 Blast Desc: BC1G_12838 [Botryotinia fuckeliana B05.10] gi|150843361|gb|EDN18554.1| BC1G_12838 [Botryotinia fuckeliana B05.10]
  misc_feature (1)..(292): NCBI GI: 85080981 Blast Desc: NCU05138 [Neurospora crassa OR74A] gi|28881428|emb|CAD70545.1| [Neurospora crassa] gi|28917708|gb|EAA27400.1| [Neurospora crassa OR74A]
  misc_feature (1)..(283): NCBI GI: 238843367 Blast Desc: conserved [Microsporum canis CBS 113480]
  misc_feature (1)..(285): NCBI GI: 156047773 Blast Desc: SS1G_09576 [Sclerotinia sclerotiorum 1980] gi|154693971|gb|EDN93709.1| SS1G_09576 [Sclerotinia sclerotiorum 1980]
  misc_feature (1)..(292): NCBI GI: 116208356 Blast Desc: CHGG_03471 [Chaetomium globosum CBS 148.51] gi|88184068|gb|EAQ91536.1| CHGG_03471 [Chaetomium globosum CBS 148.51]
  misc_feature (23)..(287): NCBI GI: 116193081 Blast Desc: CHGG_06258 [Chaetomium globosum CBS 148.51] gi|88182171|gb|EAQ89639.1| CHGG_06258 [Chaetomium globosum CBS 148.51]
  misc_feature (15)..(292): NCBI GI: 212530252 Blast Desc: conserved [Penicillium marneffei ATCC 18224] gi|210074681|gb|EEA28768.1| conserved [Penicillium marneffei ATCC 18224]
  misc_feature (1)..(289): NCBI GI: 145602931 Blast Desc: MGG_13779 [Magnaporthe grisea 70-15] gi|145011279|gb|EDJ95935.1| MGG_13779 [Magnaporthe grisea 70-15]
  misc_feature: Useful for introducing or modulating the production of volatile compounds
MPERTDKHDAFALTSTLTGFHTEFVGGVKGESVPDKALPWGYNRESLKETELGSWRGHMNVVRRIVEDNLESALIMEDDMDWDVRLKSQLSKIAEGSRKLMPSGDNPSSPYGDAWDVLWLGHCGEIFPETLPENEGKKEHPKFMISNDPTVPPVDKITGLTDFHNYPEHTRFVHVSGGPICSFAYALSQQGARKVLYQLSVDHLNMAFDNSLAVLCRDGASGNVDGLQAKCLTVTPPIFFHHRAKGPIASDSDIQNPDSKDVREKGVTENIRWSARNNIKNMIMGLEMESQF

SEQ ID NO: 34303 - DNA, 1569 bp, Muscodor strobelii
  misc_feature: SGI EST ID NO. CUFF.81337.0
  misc_feature: Variant of the nucleotide sequence at SEQ ID NO 34301
ttcgcgacaaggggtgtttgggggctgatcacagcatggtgaccgatatgattccgcgtagttggtgcttgttacctcgggccttcatacgtcggtttccgtaaaacctccttcactctcatcgccaattctttgctcccaagcagaacgaacccaagtccgagatgggcggatcgtcgaaacctatgcgacaatcatctcgtcgtgtctgtgtcagttttctgacctgcttgattgtgatattcgtcttggtctccttatcctcttcctcaaaaccaatccatagcaggccattaccaaatgccagaccaaaaccatcgcacgatgacatactcaagaagcctccgaaacaatcaccactaagggagaatgattcctacaagaatggtaccctcggcttttcgaaaatctttgtccttggcatgcccgaacgtaccgataaacacgatgcgtttgccttgacatcgacgctcactggattccacacggagttcgtgggcggagtcaaaggtgaatcagtgcctgacaaagcgttaccttggggctataacagggaatctctcaaggagaccgagcttggaagttggagaggacatatgaacgtggttcgcaggatagtcgaagacaacttagaatctgcgctaatcatggaggacgacatggattgggacgtcaggctcaagtcacaactaagtaagatagcagaagggtctcgtaagctcatgccatctggcgataacccttcatcgccttatggcgatgcctgggatgtgctgtggctcggccactgtggcgagatattccccgaaacactgcccgaaaacgagggtaagaaagaacacccaaaattcatgatcagcaatgaccctaccgtgccacccgtcgacaagatcactggcttaaccgacttccacaactatcccgagcatacgcgatttgtacacgttagcggagggccgatctgcagtttcgcctatgccctgtctcaacaaggcgcgcgaaaagtgctctatcagctgtccgtggatcacctcaacatggcatttgacaattcgctggcagtcctatgtcgagatggcgcttcgggaaacgttgatgggctgcaagcgaaatgtcttactgtcacgccaccaatcttcttccatcatcgggctaaggggccgatagcgagtgatagcgatattcagaacccggatagcaaagacgtgagggagaaaggagtgacggagaatatcagatggagcgcgagaaataatatcaagaacatgatcatggggttagagatggaaagtcaattttgatgggcgcgtgatgagcgaggagttgtgtgtgtttatgcccatcttatagtgtatactatatttcactttgcagaggcgagcaagcgctactcgaaaccatatttgtgttcatggatgattgcaatgagatgtagcgcctgattttgtgttctggctctggagcttcaaagacgagatcttatggacacacgcgttcatctagttggggtacaatggtcgtgaagacaccatagcttagaaggaaggagtgacgtttcgcacatgcggc

SEQ ID NO: 34304 - DNA, 1089 bp, Muscodor strobelii
  misc_feature: SGI cDNA ID NO. 571853
  misc_feature: Encodes the peptide sequence at SEQ ID NO 34305
atgcgctggtctcccggctcgtctccggcatacccggcgctgctcgccatcctcagcctcgcatctgccgccgacagctcttcctccacaaagacggtcacgtcctgcaccgcatcctcgacgtccggcgcattcttcgacctcaggcccgacgccgccgtcaagccgaaacccgacggctcgcggccctccagcagccacaatgcgcctttgacggactacacggcccgcggccatgactacggcttcaacttcactctcaacatctgcaacgccgtcgtcgagcctatcgagcatgccatcggcgttccctccgacaggtgggccaacatcagcgcccactaccactccggcggcgaatattacagcctgggcacccagtccggcgaactcgtcgcccgcggcaaagagctggtactgcagtacttccacggctcgccttgtggcttgaaagacccatgggcgaagcgaagtctgacggggcgcgataccgtacacgagggagcgtcatacggcggctacggcagtgacgaggacagcagcgacagtggatggcagtccaccgacgtgagctctggccccgtgtccagctcgagctgggacgatggagaggtcaagctcgagaagtcgacaaccatcttcttcagctgcgaccgtgacgcgacgagcgccattgtctccttcgtcggggtcgacccctacgagtgcaactacgtcttcaaggccaagtcgccacacgcgtgcggcggcgccgaaccacacaagcccgggagcgtcggccctggctccgtcttcgccatcatcctggccatcgccttcctcgtctacgtgcttggcggcgtcttctacaatagaaccgtcgagaatgctcgaggttggagacaactacctaactactcattatggtcaggcgtctggagttttatctgtgacatgtttgtgattttgacatcgtcgtgtgcccgtttccttccaaaccgcaggggctaccactatcttgccggcaacggcagtgctcggggcgggcggaacagccgcgatgacgagaaccggctgatcgatcagtatgacgaagaatgggaagactga

SEQ ID NO: 34305 - protein, 362 aa, Muscodor strobelii
  misc_feature: SGI Peptide ID NO. 571853
  misc_feature (235)..(302): Pfam Id: PF02157 Pfam Desc: Cation-dependent mannose-6-phosphate receptor
  misc_feature (8)..(362): NCBI GI: 116208248 Blast Desc: CHGG_03417 [Chaetomium globosum CBS 148.51] gi|88184014|gb|EAQ91482.1| CHGG_03417 [Chaetomium globosum CBS 148.51]
  misc_feature (4)..(362): NCBI GI: 164425946 Blast Desc: NCU08761 [Neurospora crassa OR74A] gi|157071133|gb|EAA26874.2| conserved [Neurospora crassa OR74A]
  misc_feature (25)..(362): NCBI GI: 261354017 Blast Desc: conserved [Verticillium albo-atrum VaMs.102]
  misc_feature (15)..(362): NCBI GI: 171685510 Blast Desc: protein product [Podospora anserina] gi|170942716|emb|CAP68369.1| protein product [Podospora anserina]
  misc_feature (36)..(362): NCBI GI: 145605457 Blast Desc: MGG_09271 [Magnaporthe grisea 70-15] gi|145013278|gb|EDJ97919.1| MGG_09271 [Magnaporthe grisea 70-15]
  misc_feature (12)..(325): NCBI GI: 256726507 Blast Desc: NECHADRAFT_39582 [Nectria haematococca mpVI 77-13-4]
  misc_feature (11)..(310): NCBI GI: 46124459 Blast Desc: FG06607.1 [Gibberella zeae PH-1]
  misc_feature (14)..(362): NCBI GI: 156051872 Blast Desc: SS1G_07343 [Sclerotinia sclerotiorum 1980] gi|154705121|gb|EDO04860.1| SS1G_07343 [Sclerotinia sclerotiorum 1980]
  misc_feature (26)..(362): NCBI GI: 189195116 Blast Desc: conserved [Pyrenophora tritici-repentis Pt-1C-BFP] gi|187979775|gb|EDU46401.1| conserved [Pyrenophora tritici-repentis Pt-1C-BFP]
  misc_feature (15)..(362): NCBI GI: 212527876 Blast Desc: vacuolar sorting receptor (Mrl1), [Penicillium marneffei ATCC 18224] gi|210073493|gb|EEA27580.1| vacuolar sorting receptor (Mrl1), [Penicillium marneffei ATCC 18224]
MRWSPGSSPAYPALLAILSLASAADSSSSTKTVTSCTASSTSGAFFDLRPDAAVKPKPDGSRPSSSHNAPLTDYTARGHDYGFNFTLNICNAVVEPIEHAIGVPSDRWANISAHYHSGGEYYSLGTQSGELVARGKELVLQYFHGSPCGLKDPWAKRSLTGRDTVHEGASYGGYGSDEDSSDSGWQSTDVSSGPVSSSSWDDGEVKLEKSTTIFFSCDRDATSAIVSFVGVDPYECNYVFKAKSPHACGGAEPHKPGSVGPGSVFAIILAIAFLVYVLGGVFYNRTVENARGWRQLPNYSLWSGVWSFICDMFVILTSSCARFLPNRRGYHYLAGNGSARGGRNSRDDENRLIDQYDEEWED

SEQ ID NO: 34306 - DNA, 1905 bp, Muscodor strobelii
  misc_feature: SGI EST ID NO. CUFF.81386.0
  misc_feature: Variant of the nucleotide sequence at SEQ ID NO 34304
aatcaatcaaggcagtacgaaccgaatcaatcccacgtgtcgcatcctcacttcggtacttcattttttttaagacttgcaagttcgagcaaagctaccttgttgcaggaagcgtagattaccagtgctttcacgagtccacgaatgaatgcatgaattagactcagtttattatctcatacttcagcaagtttgaaccaggcctggtgctggacaggtgctggctgttgatctcgacccgaccccgtcgttgcctttgaccggcgcaggttgatctttcattcactcattcctcttcaacccttcacatcctccgcaccacatcccgcgcatcgcatcaaggccctcccgaccttgcccagcgcatccggccgcaccacactcattcgacatccttaccatgcgctggtctcccggctcgtctccggcatacccggcgctgctcgccatcctcagcctcgcatctgccgccgacagctcttcctccacaaagacggtcacgtcctgcaccgcatcctcgacgtccggcgcattcttcgacctcaggcccgacgccgccgtcaagccgaaacccgacggctcgcggccctccagcagccacaatgcgcctttgacggactacacggcccgcggccatgactacggcttcaacttcactctcaacatctgcaacgccgtcgtcgagcctatcgagcatgccatcggcgttccctccgacaggtgggccaacatcagcgcccactaccactccggcggcgaatattacagcctgggcacccagtccggcgaactcgtcgcccgcggcaaagagctggtactgcagtacttccacggctcgccttgtggcttgaaagacccatgggcgaagcgaagtctgacggggcgcgataccgtacacgagggagcgtcatacggcggctacggcagtgacgaggacagcagcgacagtggatggcagtccaccgacgtgagctctggccccgtgtccagctcgagctgggacgatggagaggtcaagctcgagaagtcgacaaccatcttcttcagctgcgaccgtgacgcgacgagcgccattgtctccttcgtcggggtcgacccctacgagtgcaactacgtcttcaaggccaagtcgccacacgcgtgcggcggcgccgaaccacacaagcccgggagcgtcggccctggctccgtcttcgccatcatcctggccatcgccttcctcgtctacgtgcttggcggcgtcttctacaatagaaccgtcgagaatgctcgaggttggagacaactacctaactactcattatggtcaggcgtctggagttttatctgtgacatgtttgtgattttgacatcgtcgtgtgcccgtttccttccaaaccgcaggggctaccactatcttgccggcaacggcagtgctcggggcgggcggaacagccgcgatgacgagaaccggctgatcgatcagtatgacgaagaatgggaagactgaggctacgactagactgttcttggatttgtttcgtgtgttattatagaactgcaatattgctcccaatcttgtccgagccgtctagaccgctcctccaagtgagagcatcgcatcagcccgaggaccttcacgaggtttgtatatggagggacaggtatgtgtaagctaatttcttgggtttggtcttgcaaaaagcatgacggtgcatacaggtatcataccacatcattagagcgttatttacaaataaacttatgcttcatatctgggcagcgccctatgtgggtaacggtaacacatctgtaccttcgtggtggtggtctcaataacatacaagctcatctatatttgccgacgtgacgcatcctcatgtcaagtctggggccactaacaggagcacatgttgtgagtagctt

SEQ ID NO: 34307 - DNA, 1473 bp, Muscodor strobelii
  misc_feature: SGI cDNA ID NO. 571854
  misc_feature: Encodes the peptide sequence at SEQ ID NO 34308
atgtatttttccattttccctattttatttctcgcatctaccgtcagggccaaggtccaattcctgggagtcgcaatagcaggaggcgatttcggctgtcaaatcgatggcacatgtccaacgggatcgacacagctagctttaaacgatggacctactcaaatcaatcattttgttcaagaggacgggatgaacttgatgagattaccaatatcatggcagtttcttgtgaataatcagccgggcggcgatctggatgacaccaattttgcaaaatacgatcaactgatgagggcgtgtttggacacgggtgcatattgcatgatagacattcacaactttgcgagatggaacggcgggatcattggacagggaggccccacggacgagcaattcgcgaccttgtggagtcaactggcaggcaaatatgcctccgacgacaaggttgtctttgaacttatgaatgagccgcacgatctcgatgtcgaagtatgggcacagacatgtcaaaaagcggtgacagctattcggcaggccggagcaacttcgcaaatggtcctgttacccggaacgaacttcgatagcgcagctacactagtatcgagtggaagtgcagatgcgctcatggcgattaccaatctcgatggtggcaacgagaatttgatcttggatatccacaagtatctcgatgtggacaattctggcacgcatacgacttgcacgagcgataatatcgatgctttcagggccgtcgcggactatctgcgaagtaaggggcgtctaggcctcatcagtgagactggcgcctcgagcgactcttcctgcatgagcgcattctgcagccaaaacacgttcataaatgagaattcagatgttttgctcggcattgtcgcttggggcgcaggaagcttcagcacatcatatgtattgagcatgacgccttcgaatcaagacggaaaactcaccgacaatacacttatggaacagtgcgttctagggacatggacggacactactagcagcgcaagtaccacctccacgagcacatctacttcgttatctgcggtattctcctctgtagcgccaacttcgactatactacccttgccctcaactcaaataccggttcaaaatacaaccgcgacaatatctacatcccagtcgaaggtcacgaacacgatgaaagtgaccacgtgggatacatcctactacctcgttctcaccactacagtgccggagagcgagttcagcacactggcaatagcaacggatacgccagtgccttcgggactaaacggtcttctcactgctgtcagctcttcagctacagcgacaatcgaggccactggtaatgcgttaccatcctcaccagctacaacaactcccgccgctgcggccgcaggtctgtcaaggaatggggaacacatgtggcttctgggggttgctgtaatattattagcaggattgagatga

SEQ ID NO: 34308 - protein, 490 aa, Muscodor strobelii
  misc_feature: SGI Peptide ID NO. 571854
  misc_feature (24)..(309): Pfam Id: PF00150 Pfam Desc: Cellulase (glycosyl hydrolase family 5)
  misc_feature (16)..(338): NCBI GI: 39975069 Blast Desc: MGG_00319 [Magnaporthe grisea 70-15] gi|145018797|gb|EDK03076.1| MGG_00319 [Magnaporthe grisea 70-15]
  misc_feature (9)..(332): NCBI GI: 256724905 Blast Desc: NECHADRAFT_105936 [Nectria haematococca mpVI 77-13-4]
  misc_feature (17)..(336): NCBI GI: 31747164 Blast Desc: Cel5b [Hypocrea jecorina] gi|187766738|gb|ACD36972.1| endoglucanase VIII [Trichoderma viride]
  misc_feature (19)..(331): NCBI GI: 121794 Blast Desc: GUN2_TRIRE RecName: Full=Endoglucanase EG-II; Short=EGLII; AltName: Full=Endo-1,4-beta-glucanase; AltName: Full=Cellulase; Flags: Precursor gi|170549|gb|AAA34213.1| III
  misc_feature (18)..(337): NCBI GI: 163644902 Blast Desc: endoglucanase II [Penicillium decumbens]
  misc_feature (19)..(331): NCBI GI: 77176916 Blast Desc: endoglucanase II [Hypocrea jecorina]
  misc_feature (17)..(331): NCBI GI: 154304809 Blast Desc: BC1G_08990 [Botryotinia fuckeliana B05.10] gi|150853852|gb|EDN29044.1| BC1G_08990 [Botryotinia fuckeliana B05.10]
  misc_feature (19)..(331): NCBI GI: 33521680 Blast Desc: endoglucanase III [Trichoderma viride]
  misc_feature (19)..(331): NCBI GI: 4062993 Blast Desc: endoglucanase II [Trichoderma viride]
  misc_feature (20)..(331): NCBI GI: 201066455 Blast Desc: endoglucanase III [Trichoderma sp. SSL]
  misc_feature (19)..(331): SWISSPROT Homolog: EC 3.2.1.4 Cellulase
MYFSIFPILFLASTVRAKVQFLGVAIAGGDFGCQIDGTCPTGSTQLALNDGPTQINHFVQEDGMNLMRLPISWQFLVNNQPGGDLDDTNFAKYDQLMRACLDTGAYCMIDIHNFARWNGGIIGQGGPTDEQFATLWSQLAGKYASDDKVVFELMNEPHDLDVEVWAQTCQKAVTAIRQAGATSQMVLLPGTNFDSAATLVSSGSADALMAITNLDGGNENLILDIHKYLDVDNSGTHTTCTSDNIDAFRAVADYLRSKGRLGLISETGASSDSSCMSAFCSQNTFINENSDVLLGIVAWGAGSFSTSYVLSMTPSNQDGKLTDNTLMEQCVLGTWTDTTSSASTTSTSTSTSLSAVFSSVAPTSTILPLPSTQIPVQNTTATISTSQSKVTNTMKVTTWDTSYYLVLTTTVPESEFSTLAIATDTPVPSGLNGLLTAVSSSATATIEATGNALPSSPATTTPAAAAAGLSRNGEHMWLLGVAVILLAGLR

SEQ ID NO: 34309 - DNA, 1874 bp, Muscodor strobelii
  misc_feature: SGI EST ID NO. CUFF.81346.0
  misc_feature: Variant of the nucleotide sequence at SEQ ID NO 34307
ccaccgatgttccgctccatcgcctactcgaatctgatgatgcgacccagtagccagggtccatgcagcccaccatccccaaagtatccagattctctgacacccttccaccttctttataaggcgggtgcaagcacacatcgtgtagtctggtattgagtttgccacgtcgagtttcgtcggccgtttgctcgaccgtgattttcctttctttttgttcttcatgatacccaaccaccctgtgagcttttcgttctttttgtggcacagatttgttactgtgctttttctacgttcatttttggtccttcggacattttcattccctgcgtgtagatcatgtatttttccattttccctattttatttctcgcatctaccgtcagggccaaggtccaattcctgggagtcgcaatagcaggaggcgatttcggctgtcaaatcgatggcacatgtccaacgggatcgacacagctagctttaaacgatggacctactcaaatcaatcattttgttcaagaggacgggatgaacttgatgagattaccaatatcatggcagtttcttgtgaataatcagccgggcggcgatctggatgacaccaattttgcaaaatacgatcaactgatgagggcgtgtttggacacgggtgcatattgcatgatagacattcacaactttgcgagatggaacggcgggatcattggacagggaggccccacggacgagcaattcgcgaccttgtggagtcaactggcaggcaaatatgcctccgacgacaaggttgtctttgaacttatgaatgagccgcacgatctcgatgtcgaagtatgggcacagacatgtcaaaaagcggtgacagctattcggcaggccggagcaacttcgcaaatggtcctgttacccggaacgaacttcgatagcgcagctacactagtatcgagtggaagtgcagatgcgctcatggcgattaccaatctcgatggtggcaacgagaatttgatcttggatatccacaagtatctcgatgtggacaattctggcacgcatacgacttgcacgagcgataatatcgatgctttcagggccgtcgcggactatctgcgaagtaaggggcgtctaggcctcatcagtgagactggcgcctcgagcgactcttcctgcatgagcgcattctgcagccaaaacacgttcataaatgagaattcagatgttttgctcggcattgtcgcttggggcgcaggaagcttcagcacatcatatgtattgagcatgacgccttcgaatcaagacggaaaactcaccgacaatacacttatggaacagtgcgttctagggacatggacggacactactagcagcgcaagtaccacctccacgagcacatctacttcgttatctgcggtattctcctctgtagcgccaacttcgactatactacccttgccctcaactcaaataccggttcaaaatacaaccgcgacaatatctacatcccagtcgaaggtcacgaacacgatgaaagtgaccacgtgggatacatcctactacctcgttctcaccactacagtgccggagagcgagttcagcacactggcaatagcaacggatacgccagtgccttcgggactaaacggtcttctcactgctgtcagctcttcagctacagcgacaatcgaggccactggtaatgcgttaccatcctcaccagctacaacaactcccgccgctgcggccgcaggtctgtcaaggaatggggaacacatgtggcttctgggggttgctgtaatattattagcaggattgagatgatgccacatattctactagtttatgagacatgacgccatgaattgatctcgacacaaactttt

SEQ ID NO: 34310 - DNA, 1881 bp, Muscodor strobelii
  misc_feature: SGI cDNA ID NO. 571855
  misc_feature: Encodes the peptide sequence at SEQ ID NO 34311
atgtccgtcccgacctcttctaccggacaagagcctgatggcaatagcccacccgatatcatcgctgcgatccaagcccgtgagatctacgaggaggacaagttcgcgtatctcactttactcgaccaatacctcaccactgctctcggccatggcccggatggaaaattagactctagggctctgccattattgaacacaacgctactccatgatgttgaaagggcgcaggatattggatgggatttggtccaggcactcattaacctcgatggttcagaagagtgcttggaaacaatcgctcgcgttggcaacccacgcgaagttgtcataaaagtgatggaggctttggacggactggctaggcaatgggacgaaaccgaggtgaaggaaggtgaaagcgacagtgatctcgagtccactatctccaagaagttcattacgctggttggcatgatctcgattctgcaaggcaggatcaagactaggcgaccatcgagcttccttggtccatcacttttgaaaatcttcgaggcgtatcaacccactccagaaatgacaacagcagttatcaacctggtgcaatctctttcgggtcgaaaacgacctccccttcctcaacgcacgtctagtatcaatgttgcaaatcctgacaaggatggtgacgcttctaagaatgcgccagatcccgaagcagaacaacagcaaccacaacaggatcccctcgaggtagatatgaaagagaagatgctacaatgtttcaccacatgtgtccttcagcgttatgttaatcataacgagatgcagtggtctgcacggctgctggagacgtactaccctaaaagaatcgttcctggcagacctacgattactaaggccttcagagagaacgaggatttgcaaaagaaggatgccatagtaggacaactagcggcactactacgagatctagacatcaaggatatttcgaacgaatcgatcaacaagctgttcgagagacagtccaatctaagccccatcgcagtattagaggactgtgactctcctaacgaaatcagtctgtcagaaggcgggatgctgtcgctcttgacgtattgggttttctcggccgacattttcggcgcccactattctcagcctggtatggatctcatacctgatcattgcaatctcatcgcaaggttcttaggggcgggcccggacgaggcacaagcacaaattgttcacaatccggggatgacggacgccatcttagccctcggcttagcgctcaaccaccggggcctaaaagcctccgggcagtacacgggaacagagctgttggcttaccatcaccatttgggtgtgatatctctcactcaccaagacatcaatgttcgcaatgcggcgaccgcatttgccggtactatcctacattccgatcccaacgactcttatcgcttcgatattcttgaagatcttttcgagaactgccaatttgcatctttcaaagcctgcggtgtgcagtggttgaaggaggagctcatcgccgcaaaggatagttcgtctgataatttgtttcagaactcggacattattgaacgcttccagtataccgttttccccgatatgctgccggtctctgaaatgaacgacacctcgtttatagaattctggggtgaaaactctgcctttatcctgcaagctgccaatttcgcatactacattttcaacgcacggaaggatctagtccctgagggtatggaatcggctatcaagggtcgctttgttgagcccctcattgctggcactgtgaagttcttgcacggcggttgcgaagctattgatggaggagaaaagatggagcttgacgtattgattgatcgtctgaacagtctttaa

SEQ ID NO: 34311 - protein, 626 aa, Muscodor strobelii
  misc_feature: SGI Peptide ID NO. 571855
  misc_feature (31)..(615): Pfam Id: PF08568 Pfam Desc: Fungal protein of function (DUF1760)
  misc_feature (33)..(626): NCBI GI: 145614494 Blast Desc: MGG_04671 [Magnaporthe grisea 70-15] gi|145021408|gb|EDK05537.1| MGG_04671 [Magnaporthe grisea 70-15]
  misc_feature (33)..(623): NCBI GI: 46122275 Blast Desc: FG05515.1 [Gibberella zeae PH-1]
  misc_feature (21)..(626): NCBI GI: 85086839 Blast Desc: NCU00295 [Neurospora crassa OR74A] gi|28918861|gb|EAA28530.1| [Neurospora crassa OR74A]
  misc_feature (17)..(626): NCBI GI: 171686052 Blast Desc: protein product [Podospora anserina] gi|170942987|emb|CAP68640.1| protein product [Podospora anserina]
  misc_feature (83)..(574): NCBI GI: 116207906 Blast Desc: CHGG_03246 [Chaetomium globosum CBS 148.51] gi|88183843|gb|EAQ91311.1| CHGG_03246 [Chaetomium globosum CBS 148.51]
  misc_feature (33)..(626): NCBI GI: 261358312 Blast Desc: conserved [Verticillium albo-atrum VaMs.102]
  misc_feature (19)..(624): NCBI GI: 156041210 Blast Desc: SS1G_11584 [Sclerotinia sclerotiorum 1980] gi|154695967|gb|EDN95705.1| SS1G_11584 [Sclerotinia sclerotiorum 1980]
  misc_feature (79)..(624): NCBI GI: 154299502 Blast Desc: BC1G_11013 [Botryotinia fuckeliana B05.10] gi|150857355|gb|EDN32547.1| BC1G_11013 [Botryotinia fuckeliana B05.10]
  misc_feature (33)..(615): NCBI GI: 169614604 Blast Desc: SNOG_10448 [Phaeosphaeria nodorum SN15] gi|111060722|gb|EAT81842.1| SNOG_10448 [Phaeosphaeria nodorum SN15]
  misc_feature (33)..(610): NCBI GI: 242817351 Blast Desc: conserved [Talaromyces stipitatus ATCC 10500] gi|218713403|gb|EED12827.1| conserved [Talaromyces stipitatus ATCC 10500]
MSVPTSSTGQEPDGNSPPDIIAAIQAREIYEEDKFAYLTLLDQYLTTALGHGPDGKLDSRALPLLNTTLLHDVERAQDIGWDLVQALINLDGSEECLETIARVGNPREVVIKVMEALDGLARQWDETEVKEGESDSDLESTISKKFITLVGMISILQGRIKTRRPSSFLGPSLLKIFEAYQPTPEMTTAVINLVQSLSGRKRPPLPQRTSSINVANPDKDGDASKNAPDPEAEQQQPQQDPLEVDMKEKMLQCFTTCVLQRYVNHNEMQWSARLLETYYPKRIVPGRPTITKAFRENEDLQKKDAIVGQLAALLRDLDIKDISNESINKLFERQSNLSPIAVLEDCDSPNEISLSEGGMLSLLTYWVFSADIFGAHYSQPGMDLIPDHCNLIARFLGAGPDEAQAQIVHNPGMTDAILALGLALNHRGLKASGQYTGTELLAYHHHLGVISLTHQDINVRNAATAFAGTILHSDPNDSYRFDILEDLFENCQFASFKACGVQWLKEELIAAKDSSSDNLFQNSDIIERFQYTVFPDMLPVSEMNDTSFIEFWGENSAFILQAANFAYYIFNARKDLVPEGMESAIKGRFVEPLIAGTVKFLHGGCEAIDGGEKMELDVLIDRLNSL

SEQ ID NO: 34312 - DNA, 3131 bp, Muscodor strobelii
  misc_feature: SGI EST ID NO. CUFF.81349.0
  misc_feature: Variant of the nucleotide sequence at SEQ ID NO 34310
atcaagaccatacagactcattgtctgagtttcttcaattctcatttcgggcgcagcatttataattcattcacacaagaatgtccgtcccgacctcttctaccggacaagagcctgatggcaatagcccacccgatatcatcgctgcgatccaagcccgtgagatctacgaggaggacaagttcgcgtatctcactttactcgaccaatacctcaccactgctctcggccatggcccggatggaaaattagactctagggctctgccattattgaacacaacgctactccatgatgttgaaagggcgcaggatattggatgggatttggtccaggcactcattaacctcgatggttcagaagagtgcttggaaacaatcgctcgcgttggcaacccacgcgaagttgtcataaaagtgatggaggctttggacggactggctaggcaatgggacgaaaccgaggtgaaggaaggtgaaagcgacagtgatctcgagtccactatctccaagaagttcattacgctggttggcatgatctcgattctgcaaggcaggatcaagactaggcgaccatcgagcttccttggtccatcacttttgaaaatcttcgaggcgtatcaacccactccagaaatgacaacagcagttatcaacctggtgcaatctctttcgggtcgaaaacgacctccccttcctcaacgcacgtctagtatcaatgttgcaaatcctgacaaggatggtgacgcttctaagaatgcgccagatcccgaagcagaacaacagcaaccacaacaggatcccctcgaggtagatatgaaagagaagatgctacaatgtttcaccacatgtgtccttcagcgttatgttaatcataacgagatgcagtggtctgcacggctgctggagacgtactaccctaaaagaatcgttcctggcagacctacgattactaaggccttcagagagaacgaggatttgcaaaagaaggatgccatagtaggacaactagcggcactactacgagatctagacatcaaggatatttcgaacgaatcgatcaacaagctgttcgagagacagtccaatctaagccccatcgcagtattagaggactgtgactctcctaacgaaatcagtctgtcagaaggcgggatgctgtcgctcttgacgtattgggttttctcggccgacattttcggcgcccactattctcagcctggtatggatctcatacctgatcattgcaatctcatcgcaaggttcttaggggcgggcccggacgaggcacaagcacaaattgttcacaatccggggatgacggacgccatcttagccctcggcttagcgctcaaccaccggggcctaaaagcctccgggcagtacacgggaacagagctgttggcttaccatcaccatttgggtgtgatatctctcactcaccaagacatcaatgttcgcaatgcggcgaccgcatttgccggtactatcctacattccgatcccaacgactcttatcgcttcgatattcttgaagatcttttcgagaactgccaatttgcatctttcaaagcctgcggtgtgcagtggttgaaggaggagctcatcgccgcaaaggatagttcgtctgataatttgtttcagaactcggacattattgaacgcttccagtataccgttttccccgatatgctgccggtctctgaaatgaacgacacctcgtttatagaattctggggtgaaaactctgcctttatcctgcaagctgccaatttcgcatactacattttcaacgcacggaaggatctagtccctgagggtatggaatcggctatcaagggtcgctttgttgagcccctcattgctggcactgtgaagttcttgcacggcggttgcgaagctattgatggaggagaaaagatggagcttgacgtattgattgatcgtctgaacagtctttaagtcaatctatgtgccttattcggctgtgacatgcacttgatacgtggcaattcttttcacaaatacgaactcagacgaaagtgtcccgaaatgctggccgtatcccaggcatcgctttgtcttacgcgcaccgttgtggtttggagtttgtagtatacgccagcccagtattcggacaaggcagttggcggtacagtgaataaataatcctgcaatttcgaaatttgagatgggtgggtgttaatgatactgttctatgacatatcatcaaagacgttggaatagtagtggaaaagtgtacctgttgttgttgctgaaaatactcttgcacccgtggtattttgttcaaagagacagcatgaccaatcaggttcgataatgaaatgacttgaatcgcgtaagattttgtgatccggttgagttacctagggcggcatagaatccgcgccggctatatgtgtgaacacgcgtctcgttccgaagcaaaggccaattacagccgaatatagaagccggatgctgcccgcgaaaaggaccaggacacaatatcctcggacacggatttttatcattctcttgaaacacaggacacaatgatgcttttggtagtatatgctgtcctcttggtctctaccttccggggaacattagcccaatcgcatggaagtatccctgaatatggcaccgagtgcaatgatgcatcactttctggcacaagcggtccgttttgttcgaatgtaggaacagttctaaacacgcggtttgatgagtatatcaatgaaggatccacttggccaatatcaaccccgtgcgctcgcaatggcacgaacacatactgtgtctactcgaacccgacatttgctaatggtcgcggattgacaattatgacgactccagcacgtgcaagcaaactctcggcggctgctgcgttctctaatacggagctcttcagttcgcttcagcgactgaatgcaccagataatcctaaatgggctgttgaaatcatcccgggtaaaggcatgggcgtggtggcaacgcagcgttttgaggttggggattgcatcatgagcgcgacgccatcaatcatgattgattacgggatatttgaatcgatcagcccagtagacgtcagccgtcttcagacttccggtatagatcatttgcctttca

SEQ ID NO: 34313 - DNA, 1116 bp, Muscodor strobelii
  misc_feature: SGI cDNA ID NO. 571856
  misc_feature: Encodes the peptide sequence at SEQ ID NO 34314
atgtttgcaattcggagcctaatcgccttgctggccggcatggccatgcttacgtttgcgatgaagcacactatgataattggcactttcagcactcatgctctctacaccgttgaatacgatgacgaagcccgctccctagctttggttgcgaacaactctgtgcatttcgcgagttcatggcttaccttaagtaagcacgatcacaaaacgctgtacggaacagacttcaagggaccagaccaattgttcgtcagctataatatcacggatccttacaatattatacacgaagtagctcttgtcgctggtaccgactgcgttggatcgtcaagcatctttgtcaacgcataccaggatccaccttacacagtgtatggaaatttctactatggtacagcttggtgcagttcagtgatggcggtggacgagaacggaatgttaagtcatgtcgttcaagaatatgtctacgaaactggttcagccgtacatgggaccgagatcacgcccaacgggaaatttataatgtctgccgacacaacgggcaaccttatatggacacacaagattgacccgcagactggtcagctgacttacgtcgacgtttacaattcatcgtcgctagaaaatggcccccgccatatcactattcatccttacggtacgactatatacgtggtctatgaagaatctagcaacgtaggtgtggggcatgtttacgaaaacggcacgatttctatcgaaaagctgtaccctctcttacctcagggattggatcctgcagactattgggcggacgaagtatcactggcagagggcgcgaccattctttgggcaacaaatagagcgcgggacaatgatcaaaaaggctacatcacagcatttcagctctacgacgacggtactgtgtcaaatcaactgttcctagtcgggacgagtacgagtggaggattcgccaacagtgttgcggccactaagttcgatgactcgttggcagcgctaacggataactcaacggggtttgtggagatcagggactcgacgggctcggtggttgctcaccttgatattgatgatggtcaaggctgctgtgcaaatgccgtttggcttaactaa

SEQ ID NO: 34314 - protein, 371 aa, Muscodor strobelii
  misc_feature: SGI Peptide ID NO. 571856
  misc_feature (5)..(369): NCBI GI: 121699978 Blast Desc: carboxy-cis,cis-muconate cyclase, [Aspergillus clavatus NRRL 1] gi|119396396|gb|EAW06828.1| carboxy-cis,cis-muconate cyclase, [Aspergillus clavatus NRRL 1]
  misc_feature (21)..(369): NCBI GI: 255943985 Blast Desc: Pc20g02010 [Penicillium chrysogenum Wisconsin 54-1255] gi|211587495|emb|CAP85530.1| Pc20g02010 [Penicillium chrysogenum Wisconsin 54-1255]
  misc_feature (21)..(369): NCBI GI: 119472089 Blast Desc: carboxy-cis,cis-muconate cyclase, [Neosartorya fischeri NRRL 181] gi|119406427|gb|EAW16378.1| carboxy-cis,cis-muconate cyclase, [Neosartorya fischeri NRRL 181]
  misc_feature (21)..(359): NCBI GI: 145230539 Blast Desc: An01g11680 [Aspergillus niger] gi|134055696|emb|CAK44070.1| protein product [Aspergillus niger]
  misc_feature (21)..(369): NCBI GI: 261194815 Blast Desc: carboxy-cis,cis-muconate cyclase [Ajellomyces dermatitidis SLH14081] gi|239588350|gb|EEQ70993.1| carboxy-cis,cis-muconate cyclase [Ajellomyces dermatitidis
  misc_feature (21)..(371): NCBI GI: 239613372 Blast Desc: carboxy-cis,cis-muconate cyclase [Ajellomyces dermatitidis ER-3]
  misc_feature (21)..(369): NCBI GI: 242822171 Blast Desc: carboxy-cis,cis-muconate cyclase, [Talaromyces stipitatus ATCC 10500] gi|218712751|gb|EED12176.1| carboxy-cis,cis-muconate cyclase, [Talaromyces stipitatus ATCC
  misc_feature (21)..(369): NCBI GI: 212546879 Blast Desc: carboxy-cis,cis-muconate cyclase, [Penicillium marneffei ATCC 18224] gi|210065113|gb|EEA19208.1| carboxy-cis,cis-muconate cyclase, [Penicillium marneffei ATCC
  misc_feature (21)..(369): NCBI GI: 70992385 Blast Desc: carboxy-cis,cis-muconate cyclase [Aspergillus fumigatus Af293] gi|66848674|gb|EAL89003.1| carboxy-cis,cis-muconate cyclase, [Aspergillus fumigatus Af293]
  misc_feature (21)..(369): NCBI GI: 225559668 Blast Desc: carboxy-cis,cis-muconate cyclase [Ajellomyces capsulatus G186AR]
  misc_feature (23)..(371): SWISSPROT Homolog: EC 5.5.1.5 Carboxy-cis,cis-muconate cyclase
MFAIRSLIALLAGMAMLTFAMKHTMIIGTFSTHALYTVEYDDEARSLALVANNSVHFASSWLTLSKHDHKTLYGTDFKGPDQLFVSYNITDPYNIIHEVALVAGTDCVGSSSIFVNAYQDPPYTVYGNFYYGTAWCSSVMAVDENGMLSHVVQEYVYETGSAVHGTEITPNGKFIMSADTTGNLIWTHKIDPQTGQLTYVDVYNSSSLENGPRHITIHPYGTTIYVVYEESSNVGVGHVYENGTISIEKLYPLLPQGLDPADYWADEVSLAEGATILWATNRARDNDQKGYITAFQLYDDGTVSNQLFLVGTSTSGGFANSVAATKFDDSLAALTDNSTGFVEIRDSTGSVVAHLDIDDGQGCCANAVWLN

SEQ ID NO: 34315 - DNA, 390 bp, Muscodor strobelii
  misc_feature: SGI EST ID NO. CUFF.81364.0
  misc_feature: Variant of the nucleotide sequence at SEQ ID NO 34313
gtaggtgtggggcatgtttacgaaaacggcacgatttctatcgaaaagctgtaccctctcttacctcagggattggatcctgcagactattgggcggacgaagtatcactggcagagggcgcgaccattctttgggcaacaaatagagcgcgggacaatgatcaaaaaggctacatcacagcatttcagctctacgacgacggtactgtgtcaaatcaactgttcctagtcgggacgagtacgagtggaggattcgccaacagtgttgcggccactaagttcgatgactcgttggcagcgctaacggataactcaacggggtttgtggagatcagggactcgacgggctcggtggttgctcaccttgatattgatgatggtcaaggctgc

SEQ ID NO: 34316 - DNA, 909 bp, Muscodor strobelii
  misc_feature: SGI cDNA ID NO. 571857
  misc_feature: Encodes the peptide sequence at SEQ ID NO 34317
atggttagcggatacgaaagcgaaggcgaaaagcctcttttaaaagatcgaaatgttgtgaaggcgaagctcagtggagtagaagaaaccatgatcctcacactttggtctcgagcaggagatgcagcgtcaccaacacccatactcggcgatatttacgctcagtcgattttggataaagtcgacgtcgatgccatttcaccaagtttatttcctaaagataaacggtaccatcgctgggtttccgttcgtgcacgtgagctcgacacatggtgccaaaggtttctcgacgaacatgcggctcagtccatcacggtccttcatcttgcctgcggcctagatttacgagcaatgagaatgcatccacctctgggcagtaacattcgctggttcgatgttgacaagcccgaagtcgtcaatctgagacgtcgattggtgccagatccggagaaacacggaacaatagcctgggactacagcctcatcggggcatctgttcttgatgaccaatggttagagaaaatcccctcggatcaacctctcctcgttattgccgaagggcttttcttctacctctcccagaaagatggcacatctcttttgcagagactggttaatcacagcccaactggccaaataatactcgatgtggccggaacaattatatatcggttccaatctcttatgccgcttctgaaaggcacatccgtcacaatgggctggggtgtggacgatggcgaggaggtggcggctgctcatccgcgtttgcatcttgcagaaacaaaactcttcaaagatctcattccaggctttctcgcctctccgccaacgctggggaaatggacgccaattctttccatgtttccatcttggaagaagtattcacaactgttgcgacttgtgttttag

SEQ ID NO: 34317 - protein, 302 aa, Muscodor strobelii
  misc_feature: SGI Peptide ID NO. 571857
  misc_feature (20)..(119): Pfam Id: PF02409 Pfam Desc: O-methyltransferase N-terminus
  misc_feature (21)..(302): NCBI GI: 256782382 Blast Desc: polyketide synthase protein [Streptomyces hygroscopicus ATCC 53653]
  misc_feature (13)..(302): NCBI GI: 169628060 Blast Desc: polyketide synthase protein [Mycobacterium abscessus ATCC 19977] gi|169240027|emb|CAM61055.1| polyketide synthase protein [Mycobacterium abscessus]
  misc_feature (23)..(302): NCBI GI: 730915 Blast Desc: polyketide synthase protein [Mycobacterium abscessus ATCC 19977] gi|169240027|emb|CAM61055.1| polyketide synthase protein [Mycobacterium abscessus]
  misc_feature (23)..(302): NCBI GI: 153491 Blast Desc: O-methyltransferase [Streptomyces glaucescens]
  misc_feature (28)..(264): NCBI GI: 147921434 Blast Desc: polyketide synthesis O-methyltransferase [uncultured methanogenic archaeon RC-I] gi|110620147|emb|CAJ35425.1| polyketide synthesis O-methyltransferase [uncultured methanogenic
  misc_feature (18)..(302): NCBI GI: 126435436 Blast Desc: O-methyltransferase domain-containing protein [Mycobacterium sp. JLS] gi|126235236|gb|ABN98636.1| O-methyltransferase domain protein [Mycobacterium sp. JLS]
  misc_feature (18)..(302): NCBI GI: 108799793 Blast Desc: O-methyltransferase-like protein [Mycobacterium sp. MCS] gi|119868903|ref|YP_938855.1| O-methyltransferase domain-containing protein [Mycobacterium sp. KMS] protein sp. sp.
  misc_feature (23)..(258): NCBI GI: 134103104 Blast Desc: O-methyltransferase-like protein [Saccharopolyspora erythraea NRRL 2338] gi|133915727|emb|CAM05840.1| O-methyltransferase-like protein [Saccharopolyspora erythraea
  misc_feature (15)..(271): NCBI GI: 145611224 Blast Desc: MGG_00573 [Magnaporthe grisea 70-15] gi|145018526|gb|EDK02805.1| MGG_00573 [Magnaporthe grisea 70-15]
  misc_feature (21)..(270): NCBI GI: 121594461 Blast Desc: O-methyltransferase domain-containing protein [Acidovorax sp. JS42] gi|120606541|gb|ABM42281.1| O-methyltransferase domain protein [Acidovorax sp. JS42]
  misc_feature: Useful for fungicidal and/or biocontrol applications
MVSGYESEGEKPLLKDRNVVKAKLSGVEETMILTLWSRAGDAASPTPILGDIYAQSILDKVDVDAISPSLFPKDKRYHRWVSVRARELDTWCQRFLDEHAAQSITVLHLACGLDLRAMRMHPPLGSNIRWFDVDKPEVVNLRRRLVPDPEKHGTIAWDYSLIGASVLDDQWLEKIPSDQPLLVIAEGLFFYLSQKDGTSLLQRLVNHSPTGQIILDVAGTIIYRFQSLMPLLKGTSVTMGWGVDDGEEVAAAHPRLHLAETKLFKDLIPGFLASPPTLGKWTPILSMFPSWKKYSQLLRLVF

SEQ ID NO: 34318 - DNA, 2067 bp, Muscodor strobelii
  misc_feature: SGI EST ID NO. CUFF.81367.0
  misc_feature: Variant of the nucleotide sequence at SEQ ID NO 34316
ccgaaacccgcaagctgcaatacgacgcgagttcttattcccccactaggtggtcccgaaatacaagtgattcaacccacaatgtctgacatggatcacgattaacgatcatatcataccacttcttatgacggagttaatgccgtggtcggctagtcgcacaacgagaggctcagcggtcactcgtgatgccctcagcggctaacgcgattgggcgtctggcgagggctggagacgcatgttcaaccaacatacattgacagaggctcagaaaaccaagatatgtaggtggagaagattaataagatcacttttgtggaacaatggggttactgagaccaagtctcaaatacatgatgttatcaacgttcaaagtgtcgatgaaatggccgggtcactatgatactacggcctgagtgtatgagcgctccaaatggaccccatcactccgttcattgctgttattcccacacacacagtgatttgttctgatatcgtcacctggcaggttgtctctgaccaccattacaaccaacgccaccaatgcaagttactcagcttaggtcatggtctgtccccatgctccggaacgatcaggcacagcagatttcagaaccaacaacagccacaaataatatcgatgtatcataaggacatcgagattgttttcgtacatattcagagcggcaaacatgtctgcatcatctgggcaatcgtatacattctcatttctaacgactgctacaaaactcaaaacaagaagtcactttcgctcagctcaaatccaacatggttagcggatacgaaagcgaaggcgaaaagcctcttttaaaagatcgaaatgttgtgaaggcgaagctcagtggagtagaagaaaccatgatcctcacactttggtctcgagcaggagatgcagcgtcaccaacacccatactcggcgatatttacgctcagtcgattttggataaagtcgacgtcgatgccatttcaccaagtttatttcctaaagataaacggtaccatcgctgggtttccgttcgtgcacgtgagctcgacacatggtgccaaaggtttctcgacgaacatgcggctcagtccatcacggtccttcatcttgcctgcggcctagatttacgagcaatgagaatgcatccacctctgggcagtaacattcgctggttcgatgttgacaagcccgaagtcgtcaatctgagacgtcgattggtgccagatccggagaaacacggaacaatagcctgggactacagcctcatcggggcatctgttcttgatgaccaatggttagagaaaatcccctcggatcaacctctcctcgttattgccgaagggcttttcttctacctctcccagaaagatggcacatctcttttgcagagactggttaatcacagcccaactggccaaataatactcgatgtggccggaacaattatatatcggttccaatctcttatgccgcttctgaaaggcacatccgtcacaatgggctggggtgtggacgatggcgaggaggtggcggctgctcatccgcgtttgcatcttgcagaaacaaaactcttcaaagatctcattccaggctttctcgcctctccgccaacgctggggaaatggacgccaattctttccatgtttccatcttggaagaagtattcacaactgttgcgacttgtgttttagtacattcaaagagccagggagggatgagtaaggagctatgaggagctctaattacacaattgcgctaaccagtatcagaggatcgcgctcgtatagatttaccactaatgataatcatattattcgctcgaggactgaatattacgtgtctaattacatgacgacgacttagcattcacatccgcggtcttcaagcaaatgacagccgagatggagaacacaaatattcaaatacgacatgattggattagtttatgagggcgcctgtacccataggtcctgagccaatttttgacagaggtggcagaggactaattgtgaagctttggggcgtgctgtagacactcctatagataaataaaattggtg

SEQ ID NO: 34319 - DNA, 1092 bp, Muscodor strobelii
  misc_feature: SGI cDNA ID NO. 571858
  misc_feature: Encodes the peptide sequence at SEQ ID NO 34320
atgtccacattccaacggcaaggtgtcgcccggaacgtctcgcctacgtggcaaaagttcaagagaatccggaccagctttcgtgttcgaacaagtagttttggcactggaaagcaatcactggcgccagaggttcatctgccacaagaaggcattgaggttggcacgtctgacgctcgcaagtcacagccgggactaatcgtcgtcaatgggccgcaaatcgtcagtccggaggacaaatttcgtgctgtcaaatctggacgagaaaagagtcggtggagttgtgactcaggcacgagcgagaaatccgacgcgtcgtcgaaggtcctcgggctacagaggagaacgtttcagatcacaattgcaatagcatttgttgtcatcgcggcactaattgtcggtgttgcgcttggtgtaaccaagccaaagactacgcaatcgaattcgttcctaatgtcaggcggggttcatgtaagcataaattctcttccaaagcccttcgtcgctaccgaaacggtgtccaatattctggaaggtggtttgtcaaccggtctcgtcacagcggggaactctgaattcaccgtctttccatccccatcacaccgactcaagagcacaagcggtgtaagggcgacagtgacagtcgtcaatacgcagggaggaggcaaagttggagcagatacagggatcgtttctactgtcttcatcgcgaccccggctcatacctctactgactcacttgcatcgcagcccaccgtgtcttctacatccaccagttcagctccagtagcgaccggtacatcgtcgcggatctgcatcggggacgacaacagcacttatacagacccagggacaggacagaattttcagcttgagtgcgcgacagcccaccagggcaaagacattgagaatcttgaagccacgtcgatgcaggactgcatcagcatttgcgccaagaatgaccagtgcatgggtgccatatggtataacgtcggcccacaaggaacggaccttaattattgctggctcaagagtgtaatggaagatgacttggacgagacgctggatgcccagtccgctatacggctgtga

SEQ ID NO: 34320 - protein, 363 aa, Muscodor strobelii
  misc_feature: SGI Peptide ID NO. 571858
  misc_feature (252)..(352): NCBI GI: 261361403 Blast Desc: conserved [Verticillium albo-atrum VaMs.102]
  misc_feature (263)..(347): NCBI GI: 116200454 Blast Desc: CHGG_10772 [Chaetomium globosum CBS 148.51] gi|88175486|gb|EAQ82954.1| CHGG_10772 [Chaetomium globosum CBS 148.51]
  misc_feature (258)..(361): NCBI GI: 39972605 Blast Desc: [Magnaporthe grisea 70-15] gi|145016808|gb|EDK01238.1| [Magnaporthe grisea 70-15]
  misc_feature (272)..(345): NCBI GI: 156045780 Blast Desc: SS1G_09166 [Sclerotinia sclerotiorum 1980] gi|154693562|gb|EDN93300.1| SS1G_09166 [Sclerotinia sclerotiorum 1980]
MSTFQRQGVARNVSPTWQKFKRIRTSFRVRTSSFGTGKQSLAPEVHLPQEGIEVGTSDARKSQPGLIVVNGPQIVSPEDKFRAVKSGREKSRWSCDSGTSEKSDASSKVLGLQRRTFQITIAIAFVVIAALIVGVALGVTKPKTTQSNSFLMSGGVHVSINSLPKPFVATETVSNILEGGLSTGLVTAGNSEFTVFPSPSHRLKSTSGVRATVTVVNTQGGGKVGADTGIVSTVFIATPAHTSTDSLASQPTVSSTSTSSAPVATGTSSRICIGDDNSTYTDPGTGQNFQLECATAHQGKDIENLEATSMQDCISICAKNDQCMGAIWYNVGPQGTDLNYCWLKSVMEDDLDETLDAQSAIRL

SEQ ID NO: 34321 - DNA, 2112 bp, Muscodor strobelii
  misc_feature: SGI cDNA ID NO. 571859
  misc_feature: Encodes the peptide sequence at SEQ ID NO 34322
atgtccatcatagattttcatcccgatgggcctgctcataggcttgaattgcgagctgtttttgatgaccttgtaacagacggaaataaagatggccaaaagtacaccatttacgttcatcgactcgccagagcgtgttggtacggcggtcggattatgctgcgccaatgttctccagaggccgagggcatctatgatttcattcttgagctacatagagcatgcgacgggctatggaacagataccttgaagccggtacgagtcctaaagatctacatgtatggctcgacttcgctgcctcgttcctatccagccttggcaactatttcggcgatggggatcacaaagtagttccagatatctctgaagaagccctgagcaacatagccaaatgctcacccaatgcgacgtccatcctagaacgaattattggtcctatgttagctgcacagccaagtagctttggataccctaaggaaacaagccaatcgaactactacctaggagacgggcatatcacatgggcagaaattgaagcggtttcaaattttatgaatgcgcataagatagcgccagagaatacccgtctgcagaagcgcacccaggactcaggcggcgatgtgttcgaagtcctacaagcatcagccgagactgatcccgagcccatactactgggtgagattgttttgagctccaatcatcacgctaaagtcttcctctgtcgtggcgaccatcgcgatgaaatggccaaaatgtgctttgaactttcagaagcacgtgatcattgcgcaactgatcttcaaaaaattaccttaacacatctgatccggagttttcaaacaggcgactacgaagcgtttcgcgaagcccacaaaacttgggtgacggacaaagctcctcgaattgagcattgcatggggtttttgttcggttaccgtgatcctcatggacttcgggcggagtggcaggctgcgacgggcatcgcacatgcacaagaaactagcaagatgcgtcagctcgttgaaagatctaccgaattcatttgcactcttccgtgggccgtacccggtgacaacgatggaaaaggtccatttgagcatgtcgagtttgacgctccagactttgcgatcattcacgtcctcgcttccgtttcaagcactgtttgggaggctacaaatatcactattgacgacgctggcaagagacaaggcgttaaaaatatggtgtatggcaaccggatgagtctcaatagcatcccgggccgaccttgtctctacgtagacccgtcagaagtcgaattgtacatgcgttgcgccaatgtagtccggttcattggtactgcaatacatgaactcatcggccatggtacgggaaagcttctcgctgaatcgagcccgggtaatttcaacttcgatacccttcacccgccagtcagccctgtcaccggcgagccgatacaaacatggtataagccgggcgaaacttggaacagcgtcttcggaaagctagcaacatccgtcgaggaatgccgggctttcctaactgcagactatctggctgacaacaaagacattctcggtctctttggctacaatgagacaagtaatccctctgctgaagatttggtgtataatgcatatatccacattggcgtacagggccttcttgcacttcgcagtttcaatcatcatgaccaagtctggggcggcgatcatgatcaggctcaattcgcaatattaaatcatatgctacaagacggcggtgaagtcatcaaaattgaatctgagagcgaagctaggagcctctttgtccgcgttgatcgttcgaagatagcatctcatggaaaggtctctcttggtcgtatgctttgcaagatcaatatatggcactccactgcggatatctcggcttgtaggccattctttgaagcgttgagttcagttaacgaggaacacgagctttggcgccgaattgttgtctcaaatccagaaccaaagtggaagtttgtgcagccgaacacgtttctgaaggacgacggaactgtggagctgaaggaatatgaagctactgatgttggcctcattcaatcgttctatgaaagaaatatttga

SEQ ID NO: 34322 - protein, 703 aa, Muscodor strobelii
  misc_feature: SGI Peptide ID NO. 571859
  misc_feature (137)..(703): Pfam Id: PF03571 Pfam Desc: Peptidase family M49
  misc_feature (449)..(703): Pfam Id: PF03571 Pfam Desc: Peptidase family M49
  misc_feature (181)..(381): Pfam Id: PF03571 Pfam Desc: Peptidase family M49
  misc_feature (14)..(703): NCBI GI: 119479921 Blast Desc: dipeptidyl peptidase III [Neosartorya fischeri NRRL 181] gi|119408143|gb|EAW18092.1| dipeptidyl peptidase III [Neosartorya fischeri NRRL 181]
  misc_feature (14)..(703): NCBI GI: 145256471 Blast Desc: An04g00410 [Aspergillus niger] gi|134058305|emb|CAK38496.1| protein product [Aspergillus niger]
  misc_feature (14)..(703): NCBI GI: 261197027 Blast Desc: dipeptidyl peptidase III [Ajellomyces dermatitidis SLH14081] gi|239595546|gb|EEQ78127.1| dipeptidyl peptidase III [Ajellomyces dermatitidis SLH14081] gi|239606547|gb|EEQ83534.1|
  misc_feature (14)..(703): NCBI GI: 121706490 Blast Desc: dipeptidyl peptidase III [Aspergillus clavatus NRRL 1] gi|119399655|gb|EAW10081.1| dipeptidyl peptidase III [Aspergillus clavatus NRRL 1]
  misc_feature (14)..(703): NCBI GI: 119501292 Blast Desc: dipeptidyl peptidase III [Neosartorya fischeri NRRL 181] gi|119415568|gb|EAW25506.1| dipeptidyl peptidase III [Neosartorya fischeri NRRL 181]
  misc_feature (14)..(703): NCBI GI: 259482874 Blast Desc: TPA: dipeptidyl peptidase, (AFU_orthologue; AFUA_4G06140) [Aspergillus nidulans FGSC A4]
  misc_feature (14)..(703): NCBI GI: 70994866 Blast Desc: dipeptidyl peptidase [Aspergillus fumigatus Af293] gi|66849844|gb|EAL90172.1| dipeptidyl peptidase, [Aspergillus fumigatus Af293] gi|159124877|gb|EDP49994.1| dipeptidyl fumigatus
  misc_feature (14)..(703): NCBI GI: 169774001 Blast Desc: [Aspergillus oryzae RIB40] gi|83769330|dbj|BAE59467.1| protein product [Aspergillus oryzae]
  misc_feature (14)..(700): NCBI GI: 242765819 Blast Desc: dipeptidyl peptidase, [Talaromyces stipitatus ATCC 10500] gi|218724247|gb|EED23664.1| dipeptidyl peptidase, [Talaromyces stipitatus ATCC 10500]
  misc_feature (14)..(703): NCBI GI: 226281483 Blast Desc: dipeptidyl-peptidase [Paracoccidioides brasiliensis Pb01]
  misc_feature (9)..(703): SWISSPROT Homolog: EC 3.4.14.4 Dipeptidyl-peptidase III
MSIIDFHPDGPAHRLELRAVFDDLVTDGNKDGQKYTIYVHRLARACWYGGRIMLRQCSPEAEGIYDFILELHRACDGLWNRYLEAGTSPKDLHVWLDFAASFLSSLGNYFGDGDHKVVPDISEEALSNIAKCSPNATSILERIIGPMLAAQPSSFGYPKETSQSNYYLGDGHITWAEIEAVSNFMNAHKIAPENTRLQKRTQDSGGDVFEVLQASAETDPEPILLGEIVLSSNHHAKVFLCRGDHRDEMAKMCFELSEARDHCATDLQKITLTHLIRSFQTGDYEAFREAHKTWVTDKAPRIEHCMGFLFGYRDPHGLRAEWQAATGIAHAQETSKMRQLVERSTEFICTLPWAVPGDNDGKGPFEHVEFDAPDFAIIHVLASVSSTVWEATNITIDDAGKRQGVKNMVYGNRMSLNSIPGRPCLYVDPSEVELYMRCANVVRFIGTAIHELIGHGTGKLLAESSPGNFNFDTLHPPVSPVTGEPIQTWYKPGETWNSVFGKLATSVEECRAFLTADYLADNKDILGLFGYNETSNPSAEDLVYNAYIHIGVQGLLALRSFNHHDQVWGGDHDQAQFAILNHMLQDGGEVIKIESESEARSLFVRVDRSKIASHGKVSLGRMLCKINIWHSTADISACRPFFEALSSVNEEHELWRRIVVSNPEPKWKFVQPNTFLKDDGTVELKEYEATDVGLIQSFYERNI

SEQ ID NO: 34323 - DNA, 1035 bp, Muscodor strobelii
  misc_feature: SGI cDNA ID NO. 571860
  misc_feature: Encodes the peptide sequence at SEQ ID NO 34324
atggcgcctgcaaacgtttcacatcgcacacttggcaaagatggcccttcgattgcgccgatgggcttagggctcatgagtctctgtggagtttatggtcagggcccaagcctcgaggatcagttcaagctcctggatcacgcggttgagattggagaaacattctgggatacttcagatgtctatctcgacaatctcgaagtcctagcacaatggttcaaacgaagtggcaagcgcgacaagatctttcttgcttccaagtttgggcttatcatgggagaggacttgcatatgaaaggtgttgatacctcggctgagtactgcaagaaagcatgtgaggagaatctgaagaggctcgggattgagtgcctcgatttgtactatgctcaccggcttaacgctgatacccctatcgaggaaaccatgcgtgcaatggcggaacttcaggctgaaagaaagatcaagcatatagggctgtgcggtgccagctctaacgcacttcgccgcgcgtgcaagattgcccacgtggctgcagtccaagtcgagtactcggcgttcgtcctcaacatcgagaatgaatcgggtactaacctcttgcaaacctgtcgggaactcggtgtttctctcgtatgctacgggccaattggccgcgggctactcacgggtacactgacagggagtcaatcagtgaatgaaggtacagatattcgaggcaaaatggtttcccgattcaaagaggtgaaccttgcgcagtctctcaaggtagttaatcatttcaagagtgttgcggagcagaagggatgtactccgtcgcagctggctattgcttggcttttgaaacaggggaacgacatcatcccgatccccggaacgaggaaggtcgagaatttggatcagaattgggattcgcttggtgtcgacctcagggatgaagaagaggttgagattcgtcgtattattggtgcggcgaagcttgatgggtttgaacctgggcctattgattttttggatacgagagaagtctcacggaggtaa

SEQ ID NO: 34324 - protein, 344 aa, Muscodor strobelii
  misc_feature: SGI Peptide ID NO. 571860
  misc_feature (12)..(321): Pfam Id: PF00248 Pfam Desc: Aldo/keto reductase family
  misc_feature (12)..(312): Pfam Id: PF00248 Pfam Desc: Aldo/keto reductase family
  misc_feature (1)..(328): NCBI GI: 242821974 Blast Desc: aldo/keto reductase, [Talaromyces stipitatus ATCC 10500] gi|218712711|gb|EED12136.1| aldo/keto reductase, [Talaromyces stipitatus ATCC 10500]
  misc_feature (1)..(317): NCBI GI: 119476590 Blast Desc: aldo/keto reductase [Neosartorya fischeri NRRL 181] gi|119407362|gb|EAW17311.1| aldo/keto reductase [Neosartorya fischeri NRRL 181]
  misc_feature (6)..(327): NCBI GI: 70996859 Blast Desc: aldo-keto reductase (AKR13) [Aspergillus fumigatus Af293] gi|66850820|gb|EAL91146.1| aldo-keto reductase (AKR13), [Aspergillus fumigatus Af293] gi|159127085|gb|EDP52201.1| A1163]
  misc_feature (1)..(320): NCBI GI: 242812857 Blast Desc: aldo/keto reductase, [Talaromyces stipitatus ATCC 10500] gi|218714384|gb|EED13807.1| aldo/keto reductase, [Talaromyces stipitatus ATCC 10500]
  misc_feature (1)..(320): NCBI GI: 212544578 Blast Desc: aldo/keto reductase, [Penicillium marneffei ATCC 18224] gi|210065412|gb|EEA19506.1| aldo/keto reductase, [Penicillium marneffei ATCC 18224]
  misc_feature (9)..(340): NCBI GI: 212533389 Blast Desc: aldo-keto reductase (AKR13), [Penicillium marneffei ATCC 18224] gi|210072215|gb|EEA26304.1| aldo-keto reductase (AKR13), [Penicillium marneffei ATCC 18224]
  misc_feature (11)..(340): NCBI GI: 256728942 Blast Desc: NECHADRAFT_40120 [Nectria haematococca mpVI 77-13-4]
  misc_feature (11)..(340): NCBI GI: 242798005 Blast Desc: aldo-keto reductase (AKR13), [Talaromyces stipitatus ATCC 10500] gi|218716424|gb|EED15845.1| aldo-keto reductase (AKR13), [Talaromyces stipitatus ATCC 10500]
  misc_feature (9)..(327): NCBI GI: 67522226 Blast Desc: AN1570.2 [Aspergillus nidulans FGSC A4] gi|40745121|gb|EAA64277.1| AN1570.2 [Aspergillus nidulans FGSC A4]
  misc_feature (5)..(327): NCBI GI: 119488506 Blast Desc: aldo-keto reductase (AKR13), puatative [Neosartorya fischeri NRRL 181] gi|119410861|gb|EAW20806.1| aldo-keto reductase (AKR13), puatative [Neosartorya fischeri NRRL 181]
  misc_feature (15)..(308): SWISSPROT Homolog: EC 1.1.1.65 Pyridoxine 4-dehydrogenase
MAPANVSHRTLGKDGPSIAPMGLGLMSLCGVYGQGPSLEDQFKLLDHAVEIGETFWDTSDVYLDNLEVLAQWFKRSGKRDKIFLASKFGLIMGEDLHMKGVDTSAEYCKKACEENLKRLGIECLDLYYAHRLNADTPIEETMRAMAELQAERKIKHIGLCGASSNALRRACKIAHVAAVQVEYSAFVLNIENESGTNLLQTCRELGVSLVCYGPIGRGLLTGTLTGSQSVNEGTDIRGKMVSRFKEVNLAQSLKVVNHFKSVAEQKGCTPSQLAIAWLLKQGNDIIPIPGTRKVENLDQNWDSLGVDLRDEEEVEIRRIIGAAKLDGFEPGPIDFLDTREVSRR

SEQ ID NO: 34325 - DNA, 3399 bp, Muscodor strobelii
  misc_feature: SGI cDNA ID NO. 571861
  misc_feature: Reduced expression when VOC is produced
  misc_feature: Encodes the peptide sequence at SEQ ID NO 34326
atgcctcccgtcgagctcggcaagccgccgacggctcccatagatgctgaaccttcagtggaggagaatgttgaaattcatgatgcagcagacaccgatggtagaggaggtgtgcttcgcgacagcaccggccacgtagcatatccggggtacgtgcctccagatgtgcactcccctacagctccggcacgagacgagcgagacgccgaggatccggctgctggcgggcctagcaagagccactcggctccatcgcagcaggccccacgcccaaaacagcacaagttcttgacagacgctcccgctacgacccaggccggtcggccgcatgcctcttccgcaccctctgcgcccgccatcaagcgcgccgctacgaatacctcagccctccatgccgccctttgcgacacatgggccgccaacgatgcaggcactggctccgattcatcatcatccagcgacgaggaagagcctcgctcccgaacgcaaggaaataggccacgagatgcaaagcacagaagaatacccagcggtgacaagctcggccggttcaaggttgctaatgacaactacaggacccatggcagagtgtcgaagaaggatggcaggcttaacattaccgtcaacgacacgagtgctacaggatatctcgccaagacactcgacgccgccatcaagaaggtcattccctcccaccctagctcggaagaccgcacggcgaggccaaagtcgtcgagacctccttctgatattactaaggcgtcggcatcgccccgacccccgaaactgaatattgtgatcatggttattgggtcgcgaggcgatgcccagccatttttgaagatcggcaaagtcctcaaagaagaatatggacaccgagtaaggattgctactcaccctgcttttcgagagtttgtggaaaaggactccggcctggagtttttctcagttgggggcgacccttcagaactgatggccttcatggtcaagaatccaggcatgatccctaaactcgagactgtgaaggaaggtgcgattagcaaaaggcgagccgccatggccgagatgtttgatggtttctggcgcgcgtgtatcaacgccaccgacaatgagaaggatgaacagaatctgaggatgatgggtgataaagaccccttcgtcgccgatgctatcatcgccaatccgcccagcttcgctcatgtccattgtgccgaggctctcggtgttccccttcacctaatgttcacttttccctacacccctacacaggcgtttcctcatccgttagcaaatatcaagaagtcaaacgttgatccaggatataccaacttcatttcgtatccactggtggagatgatggtgtggcaaggtctaggtgatcttgtcaacgacttccgaataaagacactcaacctcgagccggtgcatacactatgggcccccggctctacgtatcgcttacacgttcctttcacatacctttggagcccggctctagtgcctaagcccgaggactggggtccagagatcgatatttctggatttgtattcctcgatcttgcttcttcttttaagccgccacagagtctggtggacttcgtcgacgcaggcaagccgcctatttacattggctttggctctattgtagtagacgatgcagatcaattcactgagatgatcttcgaggcggtccgtcgtgctggagttcgcgctcttgtgtccaaaggctggggtggtcttggccaggacaacgtaccggaaaatatttacatgctagaaaacacgcctcacgactggctgtttcctagggtccaagcttgtgttatccacggcggtgctggtactactgcgattgctcttaaatgtggaaagccgacaatggtcgttccattcttcggagatcaaaacttctggggggctatgattgcacgcgccaaagctggcccggagccgattccttataagcagctcgatgttgagaatctcactgacggtataaaatactgcctgacggaggaggcgcgagaagccgtcaagaaactagcccagaatatagatagagagggcgacggcgcacaaaacgctgtacgggcttttcatcgccatcttaccttggaaggaaaagaatccatgcgatgtgctatcctgccggaccataccgcagtatggactataaggaagactagtctcaaactgagtgctttggcagcggatattgccgttggaaaggggctggtgtcagcgcgcatgcttcggcctcttcggcataaggaatggaatgatttcgagggcccaggtgagccggtcacaggtattgcaggctcattaataggatcagttggtgatttcatcgggggtgttgcgggcttaccttaccgctttgccaaaacttctaacgagcatgctcagcaacggaaaaggaagaacaacaaagcgaggagtaaggtcgccagcactagtggcgcaaagacccctagcacacccggtgtctcagagccagcccaaacagactattttgacgatctgcaagatggagtcgagaaatctggccgtgccctggcccgtgctcctctcgatctatcacttgccctcgcacaaggatttcacaatgctcctcgactatacggcgattctactgttcggccgctaagacgtgtaactggtatcaaatcagggttaagagcagcacgagatggcttcgtctacggcatatacgacgggtttaccggaattattatcttgcccgtgcacggagcgaaggaagatggcatcaagggtgctgtcattggggttggaatgggtctcttgggattcgtgctcaaggaccttgcggcattattcggacctatcgcctacacactactcggggtaacgaaagagatatcgggcggcaacaagcgtctggtcaaacatcttcgacgtgcacggcttgtccaggcccagcgagacctcgcggcactatccgccgacgaaaagaaggctgttgcggaacaagtagcaaaaggctgggctgtcatgcgcgagctcgccgatatcatcataagggaaaaggagaagactggcatcaagggatgccttccccataggaagacaggtgaaaagaaaaagactcaatcacttggtcagtggggcaagggacctgctttcgaaagcgtcgacacagctaagacagccattgatgcgatcaacagaggggagagctttgccagtgttctaggcacgggaagaaggagcacagataacagaccggtgagcaaggggaaggaaagggaacaactattgagtccagaggcggaaaagggacctgatcggaaagtgtctgaagtggacagcgagaggactcttctacctaatagtgcgccaagggagcatgatgaaaatagacaatccgaaaactag

SEQ ID NO: 34326 - protein, 1132 aa, Muscodor strobelii
  misc_feature: SGI Peptide ID NO. 571861
  misc_feature (265)..(426): Pfam Id: PF03033 Pfam Desc: Glycosyltransferase family 28 N-terminal domain
  misc_feature (265)..(337): Pfam Id: PF03033 Pfam Desc: Glycosyltransferase family 28 N-terminal domain
  misc_feature (38)..(1072): NCBI GI: 171686054 Blast Desc: protein product [Podospora anserina] gi|170942988|emb|CAP68641.1| protein product [Podospora anserina]
  misc_feature (38)..(821): NCBI GI: 85086782 Blast Desc: NCU00281 [Neurospora crassa OR74A] gi|28918847|gb|EAA28516.1| conserved [Neurospora crassa OR74A]
  misc_feature (11)..(799): NCBI GI: 39954415 Blast Desc: MGG_08919 [Magnaporthe grisea 70-15] gi|145021137|gb|EDK05266.1| MGG_08919 [Magnaporthe grisea 70-15]
  misc_feature (179)..(840): NCBI GI: 261358313 Blast Desc: CHIP6 [Verticillium albo-atrum VaMs.102]
  misc_feature (169)..(1013): NCBI GI: 169617207 Blast Desc: SNOG_11780 [Phaeosphaeria nodorum SN15] gi|111059704|gb|EAT80824.1| SNOG_11780 [Phaeosphaeria nodorum SN15]
  misc_feature (181)..(1042): NCBI GI: 189188206 Blast Desc: UDP-glucose,sterol transferase [Pyrenophora tritici-repentis Pt-1C-BFP] gi|187972048|gb|EDU39547.1| UDP-glucose,sterol transferase [Pyrenophora tritici-repentis
  misc_feature (80)..(820): NCBI GI: 154295508 Blast Desc: BC1G_13379 [Botryotinia fuckeliana B05.10] gi|150844005|gb|EDN19198.1| BC1G_13379 [Botryotinia fuckeliana B05.10]
  misc_feature (197)..(1004): NCBI GI: 189197241 Blast Desc: PTRG_04625 [Pyrenophora tritici-repentis Pt-1C-BFP] gi|187980906|gb|EDU47532.1| PTRG_04625 [Pyrenophora tritici-repentis Pt-1C-BFP]
  misc_feature (182)..(1072): NCBI GI: 242774069 Blast Desc: UDP-glucose,sterol transferase, [Talaromyces stipitatus ATCC 10500] gi|218721987|gb|EED21405.1| UDP-glucose,sterol transferase, [Talaromyces stipitatus ATCC
  misc_feature (180)..(961): NCBI GI: 119186039 Blast Desc: CIMG_03067 [Coccidioides immitis RS]
  misc_feature: Useful for introducing or modulating the production of volatile compounds
MPPVELGKPPTAPIDAEPSVEENVEIHDAADTDGRGGVLRDSTGHVAYPGYVPPDVHSPTAPARDERDAEDPAAGGPSKSHSAPSQQAPRPKQHKFLTDAPATTQAGRPHASSAPSAPAIKRAATNTSALHAALCDTWAANDAGTGSDSSSSSDEEEPRSRTQGNRPRDAKHRRIPSGDKLGRFKVANDNYRTHGRVSKKDGRLNITVNDTSATGYLAKTLDAAIKKVIPSHPSSEDRTARPKSSRPPSDITKASASPRPPKLNIVIMVIGSRGDAQPFLKIGKVLKEEYGHRVRIATHPAFREFVEKDSGLEFFSVGGDPSELMAFMVKNPGMIPKLETVKEGAISKRRAAMAEMFDGFWRACINATDNEKDEQNLRMMGDKDPFVADAIIANPPSFAHVHCAEALGVPLHLMFTFPYTPTQAFPHPLANIKKSNVDPGYTNFISYPLVEMMVWQGLGDLVNDFRIKTLNLEPVHTLWAPGSTYRLHVPFTYLWSPALVPKPEDWGPEIDISGFVFLDLASSFKPPQSLVDFVDAGKPPIYIGFGSIVVDDADQFTEMIFEAVRRAGVRALVSKGWGGLGQDNVPENIYMLENTPHDWLFPRVQACVIHGGAGTTAIALKCGKPTMVVPFFGDQNFWGAMIARAKAGPEPIPYKQLDVENLTDGIKYCLTEEAREAVKKLAQNIDREGDGAQNAVRAFHRHLTLEGKESMRCAILPDHTAVWTIRKTSLKLSALAADIAVGKGLVSARMLRPLRHKEWNDFEGPGEPVTGIAGSLIGSVGDFIGGVAGLPYRFAKTSNEHAQQRKRKNNKARSKVASTSGAKTPSTPGVSEPAQTDYFDDLQDGVEKSGRALARAPLDLSLALAQGFHNAPRLYGDSTVRPLRRVTGIKSGLRAARDGFVYGIYDGFTGIIILPVHGAKEDGIKGAVIGVGMGLLGFVLKDLAALFGPIAYTLLGVTKEISGGNKRLVKHLRRARLVQAQRDLAALSADEKKAVAEQVAKGWAVMRELADIIIREKEKTGIKGCLPHRKTGEKKKTQSLGQWGKGPAFESVDTAKTAIDAINRGESFASVLGTGRRSTDNRPVSKGKEREQLLSPEAEKGPDRKVSEVDSERTLLPNSAPREHDENRQSEN

SEQ ID NO: 34327 - DNA, 4289 bp, Muscodor strobelii
  misc_feature: SGI EST ID NO. CUFF.81407.0
  misc_feature: Variant of the nucleotide sequence at SEQ ID NO 34325
cggggggtagtctgttcctggcattctgatgtcatgttttgcgctaggccacgcgacgccagacaagcaaagcaagttctagcacgcatttcctgccagaccggggaaattgccatcttgtgatggatctcccgatgtgacacatgaaaccggtaacgtcgcccataatgcagtctactatcgctgcaatttcaagcacgtcgcgtttgctggcaagacagcggcaaccgggcaggggcaccttggcaatttggcgaagacgaggatgtgatgggcgataaactgtagtgatcgctcatccagcgccggcgtcatggtcagtagatcgcatccatcagttggatagcccactgattcgcacaagggttgacatgatcttgctcgtactcgaggccttcctcaccattcatagccgcaattcacttcgcgatgcgtcaccgtaatacttggcttttaggtttaaggcatcactaacgtgcagcgtggcgaaaccgcgctgcacaacctagaaaccttggttgtcgtaccaccgcatcgttgcgcgccaactgccgcccaacgggtcattcgacgcattccttgtttgctgctcccccatcttgacgggagatatccatcgatacgcccaagtaggagccctgcttagtcccagtgcgcggcctcatggtaatagaaacggctcttgagtatcactttcactggtcatctgcgacgccatcgtcactcaacaagacgtgcatcgatgcctcccgtcgagctcggcaagccgccgacggctcccatagatgctgaaccttcagtggaggagaatgttgaaattcatgatgcagcagacaccgatggtagaggaggtgtgcttcgcgacagcaccggccacgtagcatatccggggtacgtgcctccagatgtgcactcccctacagctccggcacgagacgagcgagacgccgaggatccggctgctggcgggcctagcaagagccactcggctccatcgcagcaggccccacgcccaaaacagcacaagttcttgacagacgctcccgctacgacccaggccggtcggccgcatgcctcttccgcaccctctgcgcccgccatcaagcgcgccgctacgaatacctcagccctccatgccgccctttgcgacacatgggccgccaacgatgcaggcactggctccgattcatcatcatccagcgacgaggaagagcctcgctcccgaacgcaaggaaataggccacgagatgcaaagcacagaagaatacccagcggtgacaagctcggccggttcaaggttgctaatgacaactacaggacccatggcagagtgtcgaagaaggatggcaggcttaacattaccgtcaacgacacgagtgctacaggatatctcgccaagacactcgacgccgccatcaagaaggtcattccctcccaccctagctcggaagaccgcacggcgaggccaaagtcgtcgagacctccttctgatattactaaggcgtcggcatcgccccgacccccgaaactgaatattgtgatcatggttattgggtcgcgaggcgatgcccagccatttttgaagatcggcaaagtcctcaaagaagaatatggacaccgagtaaggattgctactcaccctgcttttcgagagtttgtggaaaaggactccggcctggagtttttctcagttgggggcgacccttcagaactgatggccttcatggtcaagaatccaggcatgatccctaaactcgagactgtgaaggaaggtgcgattagcaaaaggcgagccgccatggccgagatgtttgatggtttctggcgcgcgtgtatcaacgccaccgacaatgagaaggatgaacagaatctgaggatgatgggtgataaagaccccttcgtcgccgatgctatcatcgccaatccgcccagcttcgctcatgtccattgtgccgaggctctcggtgttccccttcacctaatgttcacttttccctacacccctacacaggcgtttcctcatccgttagcaaatatcaagaagtcaaacgttgatccaggatataccaacttcatttcgtatccactggtggagatgatggtgtggcaaggtctaggtgatcttgtcaacgacttccgaataaagacactcaacctcgagccggtgcatacactatgggcccccggctctacgtatcgcttacacgttcctttcacatacctttggagcccggctctagtgcctaagcccgaggactggggtccagagatcgatatttctggatttgtattcctcgatcttgcttcttcttttaagccgccacagagtctggtggacttcgtcgacgcaggcaagccgcctatttacattggctttggctctattgtagtagacgatgcagatcaattcactgagatgatcttcgaggcggtccgtcgtgctggagttcgcgctcttgtgtccaaaggctggggtggtcttggccaggacaacgtaccggaaaatatttacatgctagaaaacacgcctcacgactggctgtttcctagggtccaagcttgtgttatccacggcggtgctggtactactgcgattgctcttaaatgtggaaagccgacaatggtcgttccattcttcggagatcaaaacttctggggggctatgattgcacgcgccaaagctggcccggagccgattccttataagcagctcgatgttgagaatctcactgacggtataaaatactgcctgacggaggaggcgcgagaagccgtcaagaaactagcccagaatatagatagagagggcgacggcgcacaaaacgctgtacgggcttttcatcgccatcttaccttggaaggaaaagaatccatgcgatgtgctatcctgccggaccataccgcagtatggactataaggaagactagtctcaaactgagtgctttggcagcggatattgccgttggaaaggggctggtgtcagcgcgcatgcttcggcctcttcggcataaggaatggaatgatttcgagggcccaggtgagccggtcacaggtattgcaggctcattaataggatcagttggtgatttcatcgggggtgttgcgggcttaccttaccgctttgccaaaacttctaacgagcatgctcagcaacggaaaaggaagaacaacaaagcgaggagtaaggtcgccagcactagtggcgcaaagacccctagcacacccggtgtctcagagccagcccaaacagactattttgacgatctgcaagatggagtcgagaaatctggccgtgccctggcccgtgctcctctcgatctatcacttgccctcgcacaaggatttcacaatgctcctcgactatacggcgattctactgttcggccgctaagacgtgtaactggtatcaaatcagggttaagagcagcacgagatggcttcgtctacggcatatacgacgggtttaccggaattattatcttgcccgtgcacggagcgaaggaagatggcatcaagggtgctgtcattggggttggaatgggtctcttgggattcgtgctcaaggaccttgcggcattattcggacctatcgcctacacactactcggggtaacgaaagagatatcgggcggcaacaagcgtctggtcaaacatcttcgacgtgcacggcttgtccaggcccagcgagacctcgcggcactatccgccgacgaaaagaaggctgttgcggaacaagtagcaaaaggctgggctgtcatgcgcgagctcgccgatatcatcataagggaaaaggagaagactggcatcaagggatgccttccccataggaagacaggtgaaaagaaaaagactcaatcacttggtcagtggggcaagggacctgctttcgaaagcgtcgacacagctaagacagccattgatgcgatcaacagaggggagagctttgccagtgttctaggcacgggaagaaggagcacagataacagaccggtgagcaaggggaaggaaagggaacaactattgagtccagaggcggaaaagggacctgatcggaaagtgtctgaagtggacagcgagaggactcttctacctaatagtgcgccaagggagcatgatgaaaatagacaatccgaaaactagaggatagagtcactgagttttgacgggttcttaactcatgatacttcgatacgtcattgccattgggcccgctgatcttgagcgtggcgtctggcttgcgaacgtcggctggctatatttgaattattataatactcatactcctttg

SEQ ID NO: 34328 - DNA, 477 bp, Muscodor strobelii
  misc_feature: SGI cDNA ID NO. 571862
  misc_feature: Encodes the peptide sequence at SEQ ID NO 34329
atgctatgccttcaatgccgacgtacggtggcttctgccgtcagacggagtatcacggcaacgacaacacatcccaagcgcgccaatgtgtcaacagcacaggtccttgcgagaggctttctatcaccaaaagccgcgcatgacgtccgaccgacttatccagtgcgatccttgaccgcttcatattccacaaccaatgccgccaacgcctcgtctgaaacccccctacccgagaaacccgattatctcaacgacgccgagtcctctatctgggacaagctagcttctgagttctcaccgacagagctcgttgtgcaggacatatcaggcggctgcggctccatgtacggcatcgagattgcctctgacaagttccgcggcaccaacatgctcaagcagcagcgcatggttaatgccgtgctcggtgaagagatgaagaactggcatggcgtccagctacgtactagggttccttga

SEQ ID NO: 34329 - protein, 158 aa, Muscodor strobelii
  misc_feature: SGI Peptide ID NO. 571862
  misc_feature (93)..(157): Pfam Id: PF01722 Pfam Desc: BolA-like protein
  misc_feature (98)..(155): Pfam Id: PF01722 Pfam Desc: BolA-like protein
  misc_feature (60)..(158): NCBI GI: 39956279 Blast Desc: MGG_09075 [Magnaporthe grisea 70-15] gi|145016465|gb|EDK00895.1| MGG_09075 [Magnaporthe grisea 70-15]
  misc_feature (74)..(158): NCBI GI: 116208726 Blast Desc: CHGG_03656 [Chaetomium globosum CBS 148.51] gi|88184253|gb|EAQ91721.1| CHGG_03656 [Chaetomium globosum CBS 148.51]
  misc_feature (1)..(158): NCBI GI: 85086711 Blast Desc: NCU00264 [Neurospora crassa OR74A] gi|28918830|gb|EAA28499.1| conserved [Neurospora crassa OR74A]
  misc_feature (78)..(158): NCBI GI: 156052445 Blast Desc: SS1G_06388 [Sclerotinia sclerotiorum 1980] gi|154704168|gb|EDO03907.1| SS1G_06388 [Sclerotinia sclerotiorum 1980]
  misc_feature (79)..(158): NCBI GI: 171685224 Blast Desc: protein product [Podospora anserina] gi|170942573|emb|CAP68225.1| protein product [Podospora anserina]
  misc_feature (78)..(158): NCBI GI: 154298721 Blast Desc: BC1G_11252 [Botryotinia fuckeliana B05.10] gi|150857648|gb|EDN32840.1| BC1G_11252 [Botryotinia fuckeliana B05.10]
  misc_feature (17)..(156): NCBI GI: 189209666 Blast Desc: conserved [Pyrenophora tritici-repentis Pt-1C-BFP] gi|187977258|gb|EDU43884.1| conserved [Pyrenophora tritici-repentis Pt-1C-BFP]
  misc_feature (78)..(151): NCBI GI: 261354231 Blast Desc: conserved [Verticillium albo-atrum VaMs.102]
  misc_feature (76)..(158): NCBI GI: 256726391 Blast Desc: NECHADRAFT_79560 [Nectria haematococca mpVI 77-13-4]
  misc_feature (77)..(156): NCBI GI: 169619237 Blast Desc: SNOG_12813 [Phaeosphaeria nodorum SN15] gi|160703775|gb|EAT79613.2| SNOG_12813 [Phaeosphaeria nodorum SN15]
MLCLQCRRTVASAVRRSITATTTHPKRANVSTAQVLARGFLSPKAAHDVRPTYPVRSLTASYSTTNAANASSETPLPEKPDYLNDAESSIWDKLASEFSPTELVVQDISGGCGSMYGIEIASDKFRGTNMLKQQRMVNAVLGEEMKNWHGVQLRTRVP

SEQ ID NO: 34330 - DNA, 2035 bp, Muscodor strobelii
  misc_feature: SGI EST ID NO. CUFF.81430.0
  misc_feature: Variant of the nucleotide sequence at SEQ ID NO 34328
ttcaaattcgcaatactcccgttttcattgtagaacacaccaggtattacattctgactgtcgtttccgacgtctagctggatatcagattccaagcgtacattcatatcgaagataccactaattaccaagatgctatgccttcaatgccgacgtacggtggcttctgccgtcagacggagtatcacggcaacgacaacacatcccaagcgcgccaatgtgtcaacagcacaggtccttgcgagaggctttctatcaccaaaagccgcgcatgacgtccgaccgacttatccagtgcgatccttgaccgcttcatattccacaaccaatgccgccaacgcctcgtctgaaacccccctacccgagaaacccgattatctcaacgacgccgagtcctctatctgggacaagctagcttctgagttctcaccgacagagctcgttgtgcaggacatatcaggcggctgcggctccatgtacggcatcgagattgcctctgacaagttccgcggcaccaacatgctcaagcagcagcgcatggttaatgccgtgctcggtgaagagatgaagaactggcatggcgtccagctacgtactagggttccttgatggggagcagctctacagctggcttcccctttctgagcacctgtgtaccagtctcatctccgcttgagctgggaaggagcggagcggaaagggaaggaaaggaaaggcctaatgcttgttgttcgccccagagagcgccattggttcccatcattaaagaaattcgaagctacatcatcgatttgcggcttgtcgatctctcggagcgaagtcggcgtgtataatctttccctgaaacaatgtacacctacattttgctgtacaatacacatatacccgtggggctatgccctatgtacaagactgctgtattatagccagggttccgagggtgtctatgtttcaataacgaacgcggagcctgcggaaggccaagaaatgtatcttgtcatacattacgtgtgatatcaatgacgcggctgcgttttgaaacggacaagaaaattctagataggttgagaagttgagcatctgagaccttgtacaatggatgcacaatgccacgagcgcctgtctgagatcgcaactatggtatgcgggcgactgaaatcagccatggagattttgacaagggagcctccgtataaagatgcgtgggagtagaagcgatcgttgtcttgaaatgaccaggaatttcgggggttgaagctggctgaatgggtgtaccgtaagtaaccggaaggattctgtagtcacaatgctcgcgaagcaactcgcactgaacagctctgacaccaagccggagcaacccccacgacatacctgtcggcgtgagatcatagatgtacgtctgtttcgaaagctcgatacggtgtgaagcggtggcgctggttttgtcccgcctcataatattccctcatcaaataccaggatatgggcactatgcatgggatccagacctcgtatgcgtcgtttcaatatcagtgctgcgtggtgtggctgtaggctggcgagttggtgccgacttccggtcctgtatcatgcgaattgacaggttcgaatttctgcgaacacgagggtgtatgattccggatccagggagactgttgatctacagttgggcgcccaacgtccaagcatcatgatttcctaattgtcaggtcggtgagatggaaattaggtacttgagattgcgctagcttgagccgccaaatgacccaaatggcgtcacgggcgtgtgccatggaccctgcattccacgaggcgactggtttcacggtcaaatctgacctcgccgtcatgcatgcgctggcgcgtccacgagggtggcttctttaccgcgactgcgcgggctttgcgcgggctgccggtagagtagcccggcaacccataaaatgagtcgacattgggtgcaaatgcgatctgatcttgttgacattggagatcgtgatcagcaaaggcgataccaagtgaagtaatcgttcac

SEQ ID NO: 34331 - DNA, 204 bp, Muscodor strobelii
  misc_feature: SGI cDNA ID NO. 571863
  misc_feature: Encodes the peptide sequence at SEQ ID NO 34332
atgcctgcttcggataattcagaattttacaaggttcttgattctatagctgagacagacgacgctgtcgctcagaataagaacatcaaggaagctcagttcgccgaggatagcgctgaacctaacgagcagcaaatcgaggcgattcggagagaacaacagaatcataacaagatgtccattcaagacaccaatactcattga

SEQ ID NO: 34332 - protein, 67 aa, Muscodor strobelii
  misc_feature: SGI Peptide ID NO. 571863
MPASDNSEFYKVLDSIAETDDAVAQNKNIKEAQFAEDSAEPNEQQIEAIRREQQNHNKMSIQDTNTH

SEQ ID NO: 34333 - DNA, 1599 bp, Muscodor strobelii
  misc_feature: SGI cDNA ID NO. 571864
  misc_feature: Encodes the peptide sequence at SEQ ID NO 34334
atgtcgcacgtacctcgcgacgatatgggtgatagcgacgcgcccttcgaggatggctgcgaattgcctttcgaaggagaacttaggaatataagcgagcttggagcaccaccaccgatagacgaccctgacgagaaacctgttgctcatcgcgagtacttggaagatgaagagcagcaaaatcagaatgcttcaggcagcgatggactgagacatggcataacgaatgggacccaatgcgaagtacagggtgacgacgagtacattgtctctccagcacttgccaacatctcggacgcgatccctacagacgttatcgagaacccgcgagatcatcgtcgtttctctcaccataatcttgaggaagatctggtgcatgatccaagttccggttcggcgagccaggaggagaagccgacagcaccaccggagtctgtcgtttcgaggcgtaggaagagtatcactcggatcaaaactcaagttttcattgtcgcccatctagtcttattctcaatgttagggacgctagcacgtctaggtctagccgctctgacaacatatcctacagcggccgttcattttgccggcagtctttggcccaatttcgctggatctttgattttagggttcttgtccgaaggttcggaattactgcaccatccgaagcctgggaggagcatcaccagagcggatttagagattgccaagtccacgcgtatggccccgggcaacaaaaggaatgcaagaagtaggactagaaacatggcggaagaagaggtagagaggtccagcatcagatcccacgctagcaagactctcgctcctattcccctccacattggattatcgtcgggcttttgtggctccttcacaacgttttctacattcatgttggacagtttcaaggcgctctccgggattgcaagtacggatactcacatgtccactccatcgcccggcagagacttcatggccgtagcaggagttctcctcatcacgattggcctgagtgtagcaggtctcaaagctggcgcccatatcgctgtgtacttgaatagtttcgagaggcgtcttccgaggcgacttatacactggtttgattatgtatccttagcccttggctccagcgcatgggctatcgtcatcgttcttgccatcctggcccctggcataggcgccgcaggatggctagatgtactcttagcgctctcatttgcaccactggggtgtcttctacgttttgctttggctttgcgtatgaactcgctggtggtgggattcccgcttggtacgttcgctgccaatgcattcgggtcccttgttttggccattgtctgggaccttcagcgactaccggaagctagtagactcgatggcggcgttatctcatgccagattctacagggcgttgaagatggcttctgtggctgtgctacgacagtcagcacttggatactggaacttgccgctcttaggcggcgacatgcttaccggtatggtctcacaaccttggccgtagggttgggtattttcgtggctgtctccggatcactcaagtggagtactggtctgacagagcctacttgcaatacaacctga

SEQ ID NO: 34334 - protein, 532 aa, Muscodor strobelii
  misc_feature: SGI Peptide ID NO. 571864
  misc_feature (399)..(513): Pfam Id: PF02537 Pfam Desc: CrcB-like protein
  misc_feature (399)..(487): Pfam Id: PF02537 Pfam Desc: CrcB-like protein
  misc_feature (282)..(302): Pfam Id: PF02537 Pfam Desc: CrcB-like protein
  misc_feature (87)..(530): NCBI GI: 171686136 Blast Desc: protein product [Podospora anserina] gi|170943029|emb|CAP68682.1| protein product [Podospora anserina]
  misc_feature (91)..(523): NCBI GI: 46116628 Blast Desc: FG04156.1 [Gibberella zeae PH-1]
  misc_feature (104)..(526): NCBI GI: 256725755 Blast Desc: NECHADRAFT_43287 [Nectria haematococca mpVI 77-13-4]
  misc_feature (85)..(530): NCBI GI: 154303096 Blast Desc: BC1G_09568 [Botryotinia fuckeliana B05.10] gi|150855031|gb|EDN30223.1| BC1G_09568 [Botryotinia fuckeliana B05.10]
  misc_feature (41)..(529): NCBI GI: 85109333 Blast Desc: NCU06262 [Neurospora crassa OR74A] gi|28924506|gb|EAA33630.1| [Neurospora crassa OR74A]
  misc_feature (134)..(530): NCBI GI: 121716770 Blast Desc: chromosome condensation protein, [Aspergillus clavatus NRRL 1] gi|119404062|gb|EAW14479.1| chromosome condensation protein, [Aspergillus clavatus NRRL 1]
  misc_feature (134)..(530): NCBI GI: 159130013 Blast Desc: chromosome condensation protein (CrcB), [Aspergillus fumigatus A1163]
  misc_feature (134)..(530): NCBI GI: 71002552 Blast Desc: chromosome condensation protein (CrcB) [Aspergillus fumigatus Af293] gi|66853595|gb|EAL93919.1| chromosome condensation protein (CrcB), [Aspergillus fumigatus Af293]
  misc_feature (134)..(530): NCBI GI: 119482113 Blast Desc: CrcB-like protein [Neosartorya fischeri NRRL 181] gi|119409239|gb|EAW19188.1| CrcB-like protein [Neosartorya fischeri NRRL 181]
  misc_feature (134)..(529): NCBI GI: 238502663 Blast Desc: chromosome condensation protein (CrcB), [Aspergillus flavus NRRL3357] gi|220691375|gb|EED47723.1| chromosome condensation protein (CrcB), [Aspergillus flavus NRRL3357]
MSHVPRDDMGDSDAPFEDGCELPFEGELRNISELGAPPPIDDPDEKPVAHREYLEDEEQQNQNASGSDGLRHGITNGTQCEVQGDDEYIVSPALANISDAIPTDVIENPRDHRRFSHHNLEEDLVHDPSSGSASQEEKPTAPPESVVSRRRKSITRIKTQVFIVAHLVLFSMLGTLARLGLAALTTYPTAAVHFAGSLWPNFAGSLILGFLSEGSELLHHPKPGRSITRADLEIAKSTRMAPGNKRNARSRTRNMAEEEVERSSIRSHASKTLAPIPLHIGLSSGFCGSFTTFSTFMLDSFKALSGIASTDTHMSTPSPGRDFMAVAGVLLITIGLSVAGLKAGAHIAVYLNSFERRLPRRLIHWFDYVSLALGSSAWAIVIVLAILAPGIGAAGWLDVLLALSFAPLGCLLRFALALRMNSLVVGFPLGTFAANAFGSLVLAIVWDLQRLPEASRLDGGVISCQILQGVEDGFCGCATTVSTWILELAALRRRHAYRYGLTTLAVGLGIFVAVSGSLKWSTGLTEPTCNTT

SEQ ID NO: 34335 - DNA, 573 bp, Muscodor strobelii
  misc_feature: SGI cDNA ID NO. 571865
  misc_feature: Encodes the peptide sequence at SEQ ID NO 34336
atggcggagcgttctgtcgctcaggtctcggctttgcttgcacagagcttctatcttcttgccacgtcaaaaattgaaagatgctggaggcaggtgggattcgcgattcgtcttgcgcagagtatcggactgcacgcgaacctcgaagatacgagacatgaggtcacctaccataaatcattagatatccgagatgcggacacggtatctagagtatggtactcgctctacgtgctcgacagattgcttgcacttcagcttggacgcccacctgctatagccgaccaagactgccacatctctgttccagacccaattcaggagctggcggaacagatacacgatggggacgacgacatgcagagacagaattccgagatgagccggcacaacgagatgctcttcacctggagaaacaagctgccgcgccatctgaggtttgatctcggccacgctttcgaaaaatctgaagttctcaaacgccagaccttacctatgctatccgcatttcctgaggaaaagtccgaatcacgatcagcagcagcagtcgtcaataacccaggatcaacatga

SEQ ID NO: 34336 - protein, 190 aa, Muscodor strobelii
  misc_feature: SGI Peptide ID NO. 571865
  misc_feature (5)..(109): Pfam Id: PF04082 Pfam Desc: Fungal specific transcription factor domain
  misc_feature (5)..(105): Pfam Id: PF04082 Pfam Desc: Fungal specific transcription factor domain
  misc_feature (5)..(162): NCBI GI: 256728006 Blast Desc: NECHADRAFT_101171 [Nectria haematococca mpVI 77-13-4]
  misc_feature (8)..(108): NCBI GI: 255941962 Blast Desc: Pc16g14530 [Penicillium chrysogenum Wisconsin 54-1255] gi|211586373|emb|CAP94123.1| Pc16g14530 [Penicillium chrysogenum Wisconsin 54-1255]
  misc_feature (16)..(108): NCBI GI: 212531771 Blast Desc: C6 transcription factor, [Penicillium marneffei ATCC 18224] gi|210071406|gb|EEA25495.1| C6 transcription factor, [Penicillium marneffei ATCC 18224]
  misc_feature (8)..(108): NCBI GI: 115492575 Blast Desc: conserved [Aspergillus terreus NIH2624] gi|114197775|gb|EAU39475.1| conserved [Aspergillus terreus NIH2624]
  misc_feature (16)..(108): NCBI GI: 242773897 Blast Desc: C6 transcription factor, [Talaromyces stipitatus ATCC 10500] gi|218721952|gb|EED21370.1| C6 transcription factor, [Talaromyces stipitatus ATCC 10500]
  misc_feature (6)..(108): NCBI GI: 189200114 Blast Desc: fungal specific transcription factor domain containing protein [Pyrenophora tritici-repentis Pt-1C-BFP] gi|187983493|gb|EDU48981.1| fungal specific transcription factor
  misc_feature (5)..(141): NCBI GI: 256735579 Blast Desc: NECHADRAFT_75561 [Nectria haematococca mpVI 77-13-4]
  misc_feature (7)..(108): NCBI GI: 255948340 Blast Desc: Pc22g09250 [Penicillium chrysogenum Wisconsin 54-1255] gi|211591954|emb|CAP98213.1| Pc22g09250 [Penicillium chrysogenum Wisconsin 54-1255]
  misc_feature (8)..(115): NCBI GI: 239607313 Blast Desc: fungal specific transcription factor domain-containing protein [Ajellomyces dermatitidis ER-3]
  misc_feature (8)..(115): NCBI GI: 261200685 Blast Desc: C6 transcription factor [Ajellomyces dermatitidis SLH14081] gi|239593815|gb|EEQ76396.1| C6 transcription factor [Ajellomyces dermatitidis SLH14081]
MAERSVAQVSALLAQSFYLLATSKIERCWRQVGFAIRLAQSIGLHANLEDTRHEVTYHKSLDIRDADTVSRVWYSLYVLDRLLALQLGRPPAIADQDCHISVPDPIQELAEQIHDGDDDMQRQNSEMSRHNEMLFTWRNKLPRHLRFDLGHAFEKSEVLKRQTLPMLSAFPEEKSESRSAAAVVNNPGST

SEQ ID NO: 34337 - DNA, 2541 bp, Muscodor strobelii
  misc_feature: SGI EST ID NO. CUFF.81464.0
  misc_feature: Variant of the nucleotide sequence at SEQ ID NO 34335
aaattgcatcgttgcgtgcgcatgtgaggcgatgtaggtgcggcgccgcaaggcctggggtgacggaccggaacgatcggttgccgcggatgcctcggaaacaaagtcatacataagtatcaccatcaacacgggtatcacggggacgacggcacggccttcagaacgggattgtaccccttgaaatctcccgatccgtgttgcgaatactcgcgttgtgacattccccttgttcatctggcggctcgacactcaattgttcgggtgcattctaagttgggagtgcaggcagtcgcaaccgacccggaccagtgtcgtctaccccatgttaaaacgcaagcgcatcacagtggcctgcaactcttgcagagcaaaaaaggtcaagtgcgatggttgccggcctatttgcggccgctgtgccggatactcataccactgctcatggccagctgtgtcccggggacatgacagcggcctctctccacaatccccctcggcggttgtgtcgatcccaggcaccgcaggctctggcgtgaagacgacacatgaagacgcgttcatcaagtatcagaattgtgtgtattctgcctgtacgcatctacctgacgataccctgagtcaaatcgaggctagtctcaccttcatccggtcccatgtctccacgcagactgtagacacggcggtcgttaatgataactcggttgaacaacaccctcagagccgaggctatcttggcgagacgagcgacgtgcggttcgttaacctggtcaagaaagttgtctctacggaagacaacacccacgacgatggtggcgaaggttctaatgcagttgcaagtggcggccgaaacaattgcgattttcgtgattcgccaaccgataatccagaaaactatgatttcgaacaacttagttcccgctgtaaattgagcaatcccctttgctgcatgccatcgagattcattgttagcgctgggggcatactatcgttcctttcgtgggcaaaaggctgaagtggaccaagtatctcacacgtctctctttcaacagtctgttatgttgtcggagttcaacatggcggagcgttctgtcgctcaggtctcggctttgcttgcacagagcttctatcttcttgccacgtcaaaaattgaaagatgctggaggcaggtgggattcgcgattcgtcttgcgcagagtatcggactgcacgcgaacctcgaagatacgagacatgaggtcacctaccataaatcattagatatccgagatgcggacacggtatctagagtatggtactcgctctacgtgctcgacagattgcttgcacttcagcttggacgcccacctgctatagccgaccaagactgccacatctctgttccagacccaattcaggagctggcggaacagatacacgatggggacgacgacatgcagagacagaattccgagagtaagtgttcttgtgccggccaatatttcatacgtatgatagaattttcttccatgattggtcaaattctccgcgaatctcatcgtccacgacgcgaccttattgcaaggctggatacagtgagccggcacaacgagatgctcttcacctggagaaacaagctgccgcgccatctgaggtttgatctcggccacgctttcgaaaaatctgaagttctcaaacgccagagaaacatgctagccatgaagttccaccatctccagacgctaatccacagaccttacctatgctatccgcatttcctgaggaaaagtccgaatcacgatcagcagcagcagtcgtcaataacccaggatcaacatgaacagattaagcagtacgggaacacatgtgtggaagaagccacatctatcattcgcttgctccagaacgttggcgacgcagaggaaattgttatgaattacccctggtggcaaatgatttcatgcctcgtttgtgcgagttctgttctcgttgccgccttagtttgtgcgaagcaaaagcaaaacagtaacggtcataacgttattcatgacgcggaacacagggctggtgataccaccgagtggagaggggctagagtggaagatcatgtcgttgatctatcggaaaacgtcgatacttgcctacatatactgagccgactcagtccgtactcgtatggggcccgccgggcccggacaatgatcaagagtatcagagaacgaagctcatgcctgcgtcgccctgccgggtcactccttcattcgacttctggtccacaggacgattgtatgacactaagcgcaagccctattaccgaacaaatactgggagacagtggcgacgatttcatgagctttcagcagatttttggagacgacatcgaattaagcttttacatggaaccatcatccgcgctacagacggaatggtctgataacgaaatttggattgacaattacgagctcagcaggggcgattgttgaaatttagcagtcatcatctttgctgatgaatcgaagtcaaatattagcatcgttattaaaagatatacaacgtacgttgttg

SEQ ID NO: 34338 - DNA, 1461 bp, Muscodor strobelii
  misc_feature: SGI cDNA ID NO. 571866
  misc_feature: Elevated expression when VOC is produced
  misc_feature: Encodes the peptide sequence at SEQ ID NO 34339
atggcgtttttcaaacaagtcgctgacaaaagcgtcgttcctttgtggatcaacggcgaggaccagcccgttgctaacgatgcaacgcttgaagtaattcaggcagtgaacaataaaaccgtacactatgccagctccgccagcatcgaagacgccaagttggcaattgacgcagcgactaaagctttcccagcttggagcaccaccccgctaccagcccgtcgagagattctcttgaaggcggctgacatactcaagacgcgcgccaaagaactggatgagatgcaaattcttgaggcatcctcggctcgaggattcggcgagagttgggcaattggtggtgccggttcaattacagaactcgcagcccagattacgaccgcctttgaaggatcggccccttacacacagagtgacactcatcaattgctcatgatgcgacaacctatgggcccgatacttttcatttcaccttggaacagtccaacatttctcgcaacacgcggtattgcgaccgcacttgctgctggatgcacaattgttctcaaggcttcggaactatgcccagcaactcatcgactgctctgtcaggtctttgctgatgcaggagtacctgcgggtgtaatcaatcagattaccgttcgtcgtgaagatgctgaggttgtgactgaggccatcatttctgaccagcgtattcgcaaggtggagttcatcggcagcgcggctgttggcagaatccttgggcagatgtgtggcaagcacctcaaacccattctcatggagcttggaggcaaatgtcccctgatcgtgtgtgaagacgcaaacctggaaaaggcagcgaagactgccacgtttagcgcttgtttccaccatggccagatttgtatttcaacagaaagaatcattgtggcgaagcaagttgcgaaagagtttgagcaacacctcataaaagcatttcaagagttcgcaggaaatgctggatcagctgcggccaagcgattcgcagataaagcacatgagcttattgcggaggctctcgatgaaggcgcggagattgtcgttggtgacaactcgtataacggagagcataatagcagcctgacgcccaccattgtgaaaggcgtaggttctaagtccaggttgttcgacgcagagagcttcagtccttcggcgacactcatcgtcgtcgacgatgaagacgaagcaatggcggtcgccaatagctctgcatacggtcttgccggagcaatctggaccaacgatgttgtcagaggaatcgctctgagcaagcgcctggaatgtggtctgataagtatcaatggcgggactctcactgatatcccaccgaccgtctctgcgagcggaatgaaaggcagcggctggggcgttgtgaacggtgctgctggtattcgcgagttcctgacaacgaagggtgtgtttgtcaggtcccctacagagtaa

SEQ ID NO: 34339 - protein, 486 aa, Muscodor strobelii
  misc_feature: SGI Peptide ID NO. 571866
  misc_feature (16)..(479): Pfam Id: PF00171 Pfam Desc: Aldehyde dehydrogenase family
  misc_feature (11)..(479): NCBI GI: 169597281 Blast Desc: SNOG_01423 [Phaeosphaeria nodorum SN15] gi|160707485|gb|EAT91072.2| SNOG_01423 [Phaeosphaeria nodorum SN15]
  misc_feature (11)..(479): NCBI GI: 189193193 Blast Desc: salicylaldehyde dehydrogenase [Pyrenophora tritici-repentis Pt-1C-BFP] gi|187978499|gb|EDU45125.1| salicylaldehyde dehydrogenase [Pyrenophora tritici-repentis
  misc_feature (8)..(479): NCBI GI: 255942679 Blast Desc: Pc18g02670 [Penicillium chrysogenum Wisconsin 54-1255] gi|211586841|emb|CAP94491.1| Pc18g02670 [Penicillium chrysogenum Wisconsin 54-1255]
  misc_feature (10)..(479): NCBI GI: 169771249 Blast Desc: [Aspergillus oryzae RIB40] gi|238486208|ref|XP_002374342.1| vanillin dehydrogenase, [Aspergillus flavus NRRL3357] gi|83767953|dbj|BAE58092.1| protein
  misc_feature (12)..(479): NCBI GI: 115391041 Blast Desc: conserved [Aspergillus terreus NIH2624] gi|114193949|gb|EAU35649.1| conserved [Aspergillus terreus NIH2624]
  misc_feature (9)..(479): NCBI GI: 67527337 Blast Desc: AN4050.2 [Aspergillus nidulans FGSC A4] gi|40740331|gb|EAA59521.1| AN4050.2 [Aspergillus nidulans FGSC A4] gi|259481362|tpe|CBF74807.1| TPA: cytoplasmic aldehyde FGSC
  misc_feature (9)..(479): NCBI GI: 145255113 Blast Desc: An18g04080 [Aspergillus niger] gi|134084455|emb|CAK43210.1| protein product [Aspergillus niger]
  misc_feature (11)..(479): NCBI GI: 70983654 Blast Desc: aldehyde dehydrogenase family protein [Aspergillus fumigatus Af293] gi|66844980|gb|EAL85316.1| aldehyde dehydrogenase family protein [Aspergillus fumigatus Af293] family
  misc_feature (13)..(483): NCBI GI: 46107670 Blast Desc: FG00718.1 [Gibberella zeae PH-1]
  misc_feature (11)..(479): NCBI GI: 169766334 Blast Desc: [Aspergillus oryzae RIB40] gi|83765493|dbj|BAE55636.1| protein product [Aspergillus oryzae]
  misc_feature (16)..(477): SWISSPROT Homolog: EC 1.2.1.65 Salicylaldehyde dehydrogenase
  misc_feature: Useful for introducing or modulating the production of volatile compounds
  misc_feature: Useful for fungicidal and/or biocontrol applications
MAFFKQVADKSVVPLWINGEDQPVANDATLEVIQAVNNKTVHYASSASIEDAKLAIDAATKAFPAWSTTPLPARREILLKAADILKTRAKELDEMQILEASSARGFGESWAIGGAGSITELAAQITTAFEGSAPYTQSDTHQLLMMRQPMGPILFISPWNSPTFLATRGIATALAAGCTIVLKASELCPATHRLLCQVFADAGVPAGVINQITVRREDAEVVTEAIISDQRIRKVEFIGSAAVGRILGQMCGKHLKPILMELGGKCPLIVCEDANLEKAAKTATFSACFHHGQICISTERIIVAKQVAKEFEQHLIKAFQEFAGNAGSAAAKRFADKAHELIAEALDEGAEIVVGDNSYNGEHNSSLTPTIVKGVGSKSRLFDAESFSPSATLIVVDDEDEAMAVANSSAYGLAGAIWTNDVVRGIALSKRLECGLISINGGTLTDIPPTVSASGMKGSGWGVVNGAAGIREFLTTKGVFVRSPTE

SEQ ID NO: 34340 - DNA, 1706 bp, Muscodor strobelii
  misc_feature: SGI EST ID NO. CUFF.81454.0
  misc_feature: Variant of the nucleotide sequence at SEQ ID NO 34338
ttcgactatcacagcaatcaaaatggcgtttttcaaacaagtcgctgacaaaagcgtcgttcctttgtggatcaacggcgaggaccagcccgttgctaacgatgcaacgcttgaagtaattcaggcagtgaacaataaaaccgtacactatgccagctccgccagcatcgaagacgccaagttggcaattgacgcagcgactaaagctttcccagcttggagcaccaccccgctaccagcccgtcgagagattctcttgaaggcggctgacatactcaagacgcgcgccaaagaactggatgagatgcaaattcttgaggcatcctcggctcgaggattcggcgagagttgggcaattggtggtgccggttcaattacagaactcgcagcccagattacgaccgcctttgaaggatcggccccttacacacagagtgacactcatcaattgctcatgatgcgacaacctatgggcccgatacttttcatttcaccttggaacagtccaacatttctcgcaacacgcggtattgcgaccgcacttgctgctggatgcacaattgttctcaaggcttcggaactatgcccagcaactcatcgactgctctgtcaggtctttgctgatgcaggagtacctgcgggtgtaatcaatcagattaccgttcgtcgtgaagatgctgaggttgtgactgaggccatcatttctgaccagcgtattcgcaaggtggagttcatcggcagcgcggctgttggcagaatccttgggcagatgtgtggcaagcacctcaaacccattctcatggagcttggaggcaaatgtcccctgatcgtgtgtgaagacgcaaacctggaaaaggcagcgaagactgccacgtttagcgcttgtttccaccatggccagatttgtatttcaacagaaagaatcattgtggcgaagcaagttgcgaaagagtttgagcaacacctcataaaagcatttcaagagttcgcaggaaatgctggatcagctgcggccaagcgattcgcagataaagcacatgagcttattgcggaggctctcgatgaaggcgcggagattgtcgttggtgacaactcgtataacggagagcataatagcagcctgacgcccaccattgtgaaaggcgtaggttctaagtccaggttgttcgacgcagagagcttcagtccttcggcgacactcatcgtcgtcgacgatgaagacgaagcaatggcggtcgccaatagctctgcatacggtcttgccggagcaatctggaccaacgatgttgtcagaggaatcgctctgagcaagcgcctggaatgtggtctgataagtatcaatggcgggactctcactgatatcccaccgaccgtctctgcgagcggaatgaaaggcagcggctggggcgttgtgaacggtgctgctggtattcgcgagttcctgacaacgaagggtgtgtttgtcaggtcccctacagagtaataacaataaagcctatagtatatgttcccgcattcgatgacacaacccctgatttgcctcgacaaacagtcgttctcgaatgtttatatatgtacctaggccaatagcagtcagagataactaccaagcagtcggattgcatctctaacatacagcatgagagttgagagcgatatccgaaacatttatatgcaaagtagttaaatataattaatgaatagtg

SEQ ID NO: 34341 - DNA, 1500 bp, Muscodor strobelii
  misc_feature: SGI cDNA ID NO. 571867
  misc_feature: Encodes the peptide sequence at SEQ ID NO 34342
atggtatcgtcaagcctttgccgtccgctggtcgagggggcattcgcgaggaacgccgatcgccgactcggtaaccttgagcgcctccctatagagttgaagctcgaggtagctgcgaaccttccagatatacgatctgctgcgtgtctcgcgctttcagggccggtcttctacacaatcattgcgaaatacgaggctgaaatatcagcgcgaatcgtgttcaaccgcataccccgaatcttcctcccactcgcgaccctcaattgtcaactccgagacgtggtgagaggtgctctagcagacgatacccgttcagatccaaagttgcctttgattatcataatcctgatcagaaaatggctgagaaatccgaaatacgactggaggacctacatccacatcggtacctttcacgctgcagatgagcatctccgtctccacagtattatagaagtctatgccggtgcattcagccatgagatactgtggtttgctccgacagcagttctccaacaaccagtggcacatatcgacgacttggggctgtctataagcgagttgagaagtgtgcagcgagcattttacatctacgaaatagtgtccagtggttttcatctatgtcgcctccctgcacgtttccaggaccggaacgacaagtacgggttagcctggacagagttgtggtctcactttgctccctggcatatgcaacaagtccggtttctgcagacacaaatggcgcttgccttccaagatgttgtcagcgcaacgcgacctaggatacccattccagaggaatacaacgaggaaatcgatggacacgacgaaaacgacgaaaacgacgaaaacgacgaaaacgacgaaaacgacgaaaacgacgaaaacgacgaaaacgacgaaaacgacgaaaacgacgaaaacgacgaaaacgaactatgggagatgaaagcacttgccatgcaaacaggacttagatgctggcttgcttcggactcaaggcttgcgtacttaatttccactctagaaagactctcaaaaccggaagatggtgaaagccttcggttcgacgccacgcatgatctagaagacgagctgtggctagaccatccaaacccaaaagaagagccctctgccttcagcttagacgccagcaaagtatttgatcgtttcctgccaggcgaagacgacgacggtccggcaacttcgtggtatcaaacacttctttatcatcccgatcttcccgagacggttgaaagtattaaaatcgctagtatttttactgataattgcgacttctgcgttgagggatggggttggatgtttgttgatctatggcgattaagtcaaggatgttcgcgacgagtggcccggatcgatgagctgaagcagtttggctcacaccttcaaaggagtatggatgatacggaatatagtttcctacgtggtgatttcccagatgagtgttggtgttcacattcgcctgctatgatcgaagggtag

SEQ ID NO: 34342 - protein, 499 aa, Muscodor strobelii
  misc_feature: SGI Peptide ID NO. 571867
  misc_feature (268)..(310): NCBI GI: 258597770 Blast Desc: dynein-related AAA-type ATPase [Plasmodium falciparum 3D7] gi|255528838|gb|AAN36939.2| dynein-related AAA-type ATPase [Plasmodium falciparum 3D7]
  misc_feature (268)..(310): NCBI GI: 82538841 Blast Desc: [Plasmodium yoelii yoelii str. 17XNL] gi|23478292|gb|EAA15419.1| [Plasmodium yoelii yoelii]
  misc_feature (269)..(309): NCBI GI: 82538841 Blast Desc: [Plasmodium yoelii yoelii str. 17XNL] gi|23478292|gb|EAA15419.1| [Plasmodium yoelii yoelii]
  misc_feature (272)..(311): NCBI GI: 258597770 Blast Desc: dynein-related AAA-type ATPase [Plasmodium falciparum 3D7] gi|255528838|gb|AAN36939.2| dynein-related AAA-type ATPase [Plasmodium falciparum 3D7]
  misc_feature (263)..(309): NCBI GI: 82540806 Blast Desc: [Plasmodium yoelii yoelii str. 17XNL] gi|23479424|gb|EAA16258.1| [Plasmodium yoelii yoelii]
  misc_feature (272)..(311): NCBI GI: 82540806 Blast Desc: [Plasmodium yoelii yoelii str. 17XNL] gi|23479424|gb|EAA16258.1| [Plasmodium yoelii yoelii]
  misc_feature (268)..(311): NCBI GI: 258597770 Blast Desc: dynein-related AAA-type ATPase [Plasmodium falciparum 3D7] gi|255528838|gb|AAN36939.2| dynein-related AAA-type ATPase [Plasmodium falciparum 3D7]
MVSSSLCRPLVEGAFARNADRRLGNLERLPIELKLEVAANLPDIRSAACLALSGPVFYTIIAKYEAEISARIVFNRIPRIFLPLATLNCQLRDVVRGALADDTRSDPKLPLIIIILIRKWLRNPKYDWRTYIHIGTFHAADEHLRLHSIIEVYAGAFSHEILWFAPTAVLQQPVAHIDDLGLSISELRSVQRAFYIYEIVSSGFHLCRLPARFQDRNDKYGLAWTELWSHFAPWHMQQVRFLQTQMALAFQDVVSATRPRIPIPEEYNEEIDGHDENDENDENDENDENDENDENDENDENDENDENDENELWEMKALAMQTGLRCWLASDSRLAYLISTLERLSKPEDGESLRFDATHDLEDELWLDHPNPKEEPSAFSLDASKVFDRFLPGEDDDGPATSWYQTLLYHPDLPETVESIKIASIFTDNCDFCVEGWGWMFVDLWRLSQGCSRRVARIDELKQFGSHLQRSMDDTEYSFLRGDFPDECWCSHSPAMIEG

SEQ ID NO: 34343 - DNA, 531 bp, Muscodor strobelii
  misc_feature: SGI cDNA ID NO. 571868
  misc_feature: Reduced expression when VOC is produced
  misc_feature: Encodes the peptide sequence at SEQ ID NO 34344
atgcgaagcagcgtttgggcggacctggcgagcctggacacaccagcagaccactttgctgcatccactctggctcttccttgtccccacctgccaccctccatgacacagcagcccagctcggcccagcagcgcagcagacagcgccatcccagcaccaacgcacgaaacaagcagcagtgcaatgcaccgcagcccgtccggatccaggaacaggacagcagcagccatcatcctgccaccctaggtcatccatcggccatcgcccaagcccagccaagccaaccttgttcattcatcctgctcagattctcgacaacccttcagatcgcactatcgcaaaagacttctctcacctttccgctctccgtcgactccctctttgatgacggcctcgatcttcacgttcgttctttgatccctccaccggcgccaacaaccgacgacctcctcgaccctcgaccctcgacccgccaaccaaccgcgaatactaggcaaccggcctctctcaccctctttgtatctatctag

SEQ ID NO: 34344 - protein, 176 aa, Muscodor strobelii
  misc_feature: SGI Peptide ID NO. 571868
  misc_feature: Useful for introducing or modulating the production of volatile compounds
MRSSVWADLASLDTPADHFAASTLALPCPHLPPSMTQQPSSAQQRSRQRHPSTNARNKQQCNAPQPVRIQEQDSSSHHPATLGHPSAIAQAQPSQPCSFILLRFSTTLQIALSQKTSLTFPLSVDSLFDDGLDLHVRSLIPPPAPTTDDLLDPRPSTRQPTANTRQPASLTLFVSI

SEQ ID NO: 34345 - DNA, 3582 bp, Muscodor strobelii
  misc_feature: SGI EST ID NO. CUFF.81693.1
  misc_feature: Variant of the nucleotide sequence at SEQ ID NO 34343
gcccagctcggcccagcagcgcagcagacagcgccatcccagcaccaacgcacgaaacaagcagcagtgcaatgcaccgcagcccgtccggatccaggaacaggacagcagcagccatcatcctgccaccctaggtcatccatcggccatcgcccaagcccagccaagccaaccttgttcattcatcctgctcagattctcgacaacccttcagatcgcactatcgcaaaagacttctctcacctttccgctctccgtcgactccctctttgatgacggcctcgatcttcacgttcgttctttgatccctccaccggcgccaacaaccgacgacctcctcgaccctcgaccctcgacccgccaaccaaccgcgaatactaggcaaccggcctctctcaccctctttgtatctatctagcatccggtgcaatcctcgagccctcgagtcctcgagtcctcgagtcaccgcgtgcctgggtcccgtcgccgcacctcgcttgaagccatcgtggcatttcgtcgcggaagcgcacaccccgattcgggcattgtcaccgtcgttctcgcccggcgcgagctgtcgtctgcaatctaagagccactccttccgtcatcttgctggggttgcccatcatgtctttcaatatgatgttggacgagaaatatatcggattggcactagccatcacgggtagcttgggtatcggcacaagttttgtcataacgaaaaagggtttgatacaatcagaagaaaagcacggcttccagggcgatggctttgtctacctcaagaaccccatatggtgggccggcatcatcacaatggtcttgggcgagatcggcaacttcgctgcctatgcctttgctcccgccatcctcgtgacgcccttgggcgctttgtccgtcctgataggtgcggttctgggctcatatttcctccatgaggaactgggggtcttgggacggctgggatgcgccatctgcctcctcggcgccgtcatcatcgtacttcacgcccctccagacgaggagatcaacaccatcgatgagatcctcaaccttgccatccagccgggttttctgctttactgccttgtcgtagccgtctttgccgtcgtcatgatctaccgcatcgcacccatccatggaaaatccaaccctttgatctatctctccatctgctccaccgttggctccgtctcggtcatgtccatcaaggcctttggcattgcgctgaagctcactttcagcggaaacaaccagttcacccatgcatcgacctacgtcttcatgattctcaccgcaggctgcattctcacccagatgaattacttcaacaaggctctcagccagttcagtacccaaatgtaggaacgccggtcggattccccttgaactggacgaagaatgctaatgccaatccagcgtcaaccctctctactacgtcaccttcactacggctactctctgcgcctcctttatcctattctcaggtttcaataccacagacgtcgtcaacactctctcgttgctctcgggcttcctcatcaccttcaccggagtctatcttctgaacctctcccgacgcgatcctaacggcaccaagacgctggccggtcaaggcaccgatgccaccggcaccgacatgatctcgggcttccagacccgtctcagcatgcagtcccggagaagtcaagaccctcgccccagctatgatcacaaccatggtctcatgcgcgcatatgacgaggagcaggcggcaggtgaattcagcctggccgatgacagcgacgaggagccgtcgagaatccgaaacggcatgaacggccgcgcatcgaaatcctacgagaacatcgagatggagaaccgcaaatagtcgcagccgtgggcggccatgggaatcattaatgactcaaggcgactcgtttataaatcctagaactcacacctaccatcgcattgtatattttcttcatcctccttcgactcgagcgatcccgcgttcccagcattgatgagctggaagacctgaagaccgatgcatggttaatatatcggtgttattacgttttgcgcagtagagagcgctcacccttgcatatgggatgacgtatgccactcttgccggacggttatgtcacgcccggatgtaagagtatagagaaagagagaccatcgacaaatgggattcttccagtctcgacgaaggaaatgggtcgatatgggaacgacggatgtcacgaatgccgggtgggcatcgacatcggcggacataaataggcgttttggagtgattggcatgactggctcctctgtttttggtatgatttttgggttgatggttttgggacgatatgggtgaacgaatacgagggaacaagaaagaggaaaagagctaggcagggcctaggatacagcctagggtgatgtatattttacagcaagagatggggaaagaccaaggtgggaagacgagagcagataggacgttgaaatcaaaagaaatgctcaaccccgggtttttcttatgtgtgagacaaaagagtcacacatgtgtacccaagggaatatacggctaataatgtcagagtggttcagtcattctatgagcttgacgtctagatgaacgcgattttctatcacggctaatgggctaagggatgactgtgagtggcagaaccagatctatcaatcttgtttaatagtcaatcgacatctccgaaaatccgcagtggttctttccaatccatcatggccgatggaaaatcatacgtaaggctatgtgggatacatactatttctctatcctcgaaaagatcctcaacaaaaatgggccgtgtcggattcgggaaaagcattttagttgttgcctttggcctcattctgtacagctttacaagttgcgaaaccacgtatcttgtttctagacgtacggaagcgttctgatcccagaataccaagccatcgacgacaatatacagaaatacatttctcggtagcaccatcacgagttcctctatcgccttgtagatactcgtgatatccccggagtcttcgggtgggttaagatgccgagggatgattttactcgttattccacgtacctggtcggataattggagaaatagatgcaagagcagccctgccggcgtggcatatctgtctcgccgatgatctcggtgctctccgcaaagaaatatcaatgggagaatgatactatcttctcttcttatttccttactactttgactgtaagttatgagactatgtgcaagcctggcactgaatacggaagtttcgttgtctggtcgttcgtgtgtttgtccgtcgacgagtaggagagagcgctcttcgagagatagccagacttgcactctgtagttagactccaaggcagccattcgacacaagtctatatcggcactgatattggtgatatcgatgagcctagtgagcgaggaggaatcgcgtgagaccaggtcttggtcgtatttgaacgtagtcagcatagcgccaatgtcaatgcgcgaaagccgtttagtttttgcttgtcgagtctccagtaaagcctgtttgacctcg

SEQ ID NO: 34346 - DNA, 1173 bp, Muscodor strobelii
  misc_feature: SGI cDNA ID NO. 571869
  misc_feature: Reduced expression when VOC is produced
  misc_feature: Encodes the peptide sequence at SEQ ID NO 34347
atgatgttggacgagaaatatatcggattggcactagccatcacgggtagcttgggtatcggcacaagttttgtcataacgaaaaagggtttgatacaatcagaagaaaagcacggcttccagggcgatggctttgtctacctcaagaaccccatatggtgggccggcatcatcacaatggtcttgggcgagatcggcaacttcgctgcctatgcctttgctcccgccatcctcgtgacgcccttgggcgctttgtccgtcctgataggtgcggttctgggctcatatttcctccatgaggaactgggggtcttgggacggctgggatgcgccatctgcctcctcggcgccgtcatcatcgtacttcacgcccctccagacgaggagatcaacaccatcgatgagatcctcaaccttgccatccagccgggttttctgctttactgccttgtcgtagccgtctttgccgtcgtcatgatctaccgcatcgcacccatccatggaaaatccaaccctttgatctatctctccatctgctccaccgttggctccgtctcggtcatgtccatcaaggcctttggcattgcgctgaagctcactttcagcggaaacaaccagttcacccatgcatcgacctacgtcttcatgattctcaccgcaggctgcattctcacccagatgaattacttcaacaaggctctcagccagttcagtacccaaatcgtcaaccctctctactacgtcaccttcactacggctactctctgcgcctcctttatcctattctcaggtttcaataccacagacgtcgtcaacactctctcgttgctctcgggcttcctcatcaccttcaccggagtctatcttctgaacctctcccgacgcgatcctaacggcaccaagacgctggccggtcaaggcaccgatgccaccggcaccgacatgatctcgggcttccagacccgtctcagcatgcagtcccggagaagtcaagaccctcgccccagctatgatcacaaccatggtctcatgcgcgcatatgacgaggagcaggcggcaggtgaattcagcctggccgatgacagcgacgaggagccgtcgagaatccgaaacggcatgaacggccgcgcatcgaaatcctacgagaacatcgagatggagaaccgcaaatag

SEQ ID NO: 34347 - protein, 390 aa, Muscodor strobelii
  misc_feature: SGI Peptide ID NO. 571869
  misc_feature (2)..(300): Pfam Id: PF05653 Pfam Desc: Domain of function (DUF803)
  misc_feature (2)..(389): NCBI GI: 46122113 Blast Desc: FG05434.1 [Gibberella zeae PH-1]
  misc_feature (1)..(387): NCBI GI: 261360178 Blast Desc: conserved [Verticillium albo-atrum VaMs.102]
  misc_feature (4)..(367): NCBI GI: 116207714 Blast Desc: CHGG_03150 [Chaetomium globosum CBS 148.51] gi|88183747|gb|EAQ91215.1| CHGG_03150 [Chaetomium globosum CBS 148.51]
  misc_feature (2)..(390): NCBI GI: 256729744 Blast Desc: [Nectria haematococca mpVI 77-13-4]
  misc_feature (2)..(389): NCBI GI: 242773911 Blast Desc: DUF803 domain membrane protein [Talaromyces stipitatus ATCC 10500] gi|218721955|gb|EED21373.1| DUF803 domain membrane protein [Talaromyces stipitatus ATCC 10500]
  misc_feature (2)..(388): NCBI GI: 240108714 Blast Desc: CPC735_010670 [Coccidioides posadasii C735 delta SOWgp]
  misc_feature (2)..(388): NCBI GI: 119186043 Blast Desc: CIMG_03069 [Coccidioides immitis RS]
  misc_feature (14)..(390): NCBI GI: 164429156 Blast Desc: NCU00490 [Neurospora crassa OR74A] gi|157072431|gb|EAA26939.2| NCU00490 [Neurospora crassa OR74A]
  misc_feature (2)..(354): NCBI GI: 171686176 Blast Desc: protein product [Podospora anserina] gi|170943049|emb|CAP68702.1| protein product [Podospora anserina]
  misc_feature (2)..(366): NCBI GI: 212531779 Blast Desc: DUF803 domain membrane protein [Penicillium marneffei ATCC 18224] gi|210071410|gb|EEA25499.1| DUF803 domain membrane protein [Penicillium marneffei ATCC 18224]
  misc_feature: Useful for introducing or modulating the production of volatile compounds
MMLDEKYIGLALAITGSLGIGTSFVITKKGLIQSEEKHGFQGDGFVYLKNPIWWAGIITMVLGEIGNFAAYAFAPAILVTPLGALSVLIGAVLGSYFLHEELGVLGRLGCAICLLGAVIIVLHAPPDEEINTIDEILNLAIQPGFLLYCLVVAVFAVVMIYRIAPIHGKSNPLIYLSICSTVGSVSVMSIKAFGIALKLTFSGNNQFTHASTYVFMILTAGCILTQMNYFNKALSQFSTQIVNPLYYVTFTTATLCASFILFSGFNTTDVVNTLSLLSGFLITFTGVYLLNLSRRDPNGTKTLAGQGTDATGTDMISGFQTRLSMQSRRSQDPRPSYDHNHGLMRAYDEEQAAGEFSLADDSDEEPSRIRNGMNGRASKSYENIEMENRK

SEQ ID NO: 34348 - DNA, 3582 bp, Muscodor strobelii; identical to SEQ ID NO: 34345
  misc_feature: SGI EST ID NO. CUFF.81693.1
  misc_feature: Variant of the nucleotide sequence at SEQ ID NO 34346

SEQ ID NO: 34349 - DNA, 3171 bp, Muscodor strobelii
  misc_feature: SGI cDNA ID NO. 571870
  misc_feature: Encodes the peptide sequence at SEQ ID NO 34350
atggccattgactcgcttgatatgaacaatggaaacggcgagaccaatgttgtgctgctatcagaaactattgaagatgatcctaggccgctagaactagataacccggaaagcgaagagatttcaccaggggactccgatgtctctcatacgcagctttccgacaatccgaaagacgaaaattcgaaactagacacgatggctcggtctcatcctgagttggcccggacgctgccggaatttctgaagaagcttgcaccatggaagggaatcatgcccaggtccttgctcttggacatggaggatatggaacattgtgccaaggagttcgaaactgcagtagacaaaatcaaggaggaagaagtaaaaaagaagccattattcagttgcacagtcgccaaactcacaatggaagatgcaaaatatggaggggaccacagagctaacggacagattcctattatcgtggccttttacgggtcctcacactcttctactttcgctcaaatgaccacctccagtgcctcatcaccagaacagagtggaaacagatcaggcttctctaatgaacgtggatcattacaaaggattcagattaactccccacttctttacggagagttggaatccatcacagggacaactttaccgggacatccgttaataattccgcccccgtacaaaatgctgctccattatcttcccaacatgacccagcgccttgaaaatttgcaggaagagctggctggtattgatgccaagcctacaactaacaacaaatctcaagcagcaaacccgtgtcacgatgatactgtcaaagatgtcaccgctgagtcctctagccaggaagcgcaggcgaacgacatcattgcggcagagccatcgaatactacacagatatcgaggctatcggataaagtttcccaccttcaatgtttatgtgattttgtccatgaagagttggaaaacttagtcgaaatgcagagagcaatcaacaaacaaaccctcgataagatcgattttgggaatctatggcatctgtacaagcctggcgatctaatattctcaaaggaagaagagcatgagcagctctaccaaatctatgctgtaaccggtgcttccatacagtccagagttcgaacaatagatgagatcagggagattgagctcaagctcagtagcatgcctttacatctctaccacgccatggttgaggaaggagaggatgaaatggagaaaatgttacgacaagaggtttttggcattggcagtttaacgccgctaaagattgactgcttggccatgagatttgatggccagcacctaggtccaacccaaacaaccaagaaaattaagccttacgttggcgatagactggtcacggatctccccgtctatccaataggattttacagcgattcggcggaacttttggggaagttagagaaccgtggtcgaaagtttgtttcggccggtggtcacaagagttaccatgggcggacacttaacaccaagaaatcaactagaaggggggtatcgaccgcaccatatgggccaccgccaccgccgccttactcaggcttccaatattcccaggtcttcagtcccagcccacgtgaagaaattcatgatgaggtttacgttgacttccacgagttctttgggttgtttccggggtggctgccgggcttatgccaactcaaaagaagcactccagatcccaccgaagccagcgaaattatgatccttcgacatggtccgccactacgcagagcgctgagcggaaacgagatcgacatcaagctctcgtctgattttctagcagataaccgcgatcggcttgagcgcaccacactcgaaaaggcactagatgatattacatgtcttcgccttttgccctacgagattttcggatatgtatttagactacaacaatggcgcaccttagacatttcttgcctgcgagatattgatgtgtcgcccgagactcgagatagaagtttcgaagacctcgtaatagctgattcactacgtcagctgctggccagtttagtgtcgactcatgtttctgtattggagcgccaacccaaaaggtctgaaagtgccgtggctcccgttgccaatacacaaatcgatattgtccgaggaaagggacaaggattagtcattcttttacacgggccacctggttcaggcaagaccagcacagcagagactattgcaacatacacacaacgtccactctactctatcacatgtggtgatcttgggacccgtcccgaggacgtggaacgtcgccttagagaacatctgaaaagagctgagaaatggggatgtgtgctcctccttgatgaagctgacgtattcttgatgcagagaactcatcagcacatggaaagaaatgcacttgtttcgattttccttagagagctagagtactactccggtatattgttcttaacaaccaatcgtccaggtgtcttggatgaagcgtttctgtcccggatccacctatcgctgcgttatccaatcgttgatttagaatccacgaaggcaatatggtccaacatcatgaaccgaatcgagcgagacaacgaaaaagcgagcgtcaaagtgattatcaagcgggaagagttactagaatacgcagtgagtcattttcgccgtggccaacacgacggtcgcaagacatggaatggaagacagattcggaatgcattccaaacagcgttgagcctagggcattctgagcgacttgccaagttgaaaaaggaaaatctcaccccggagcaagctgctgccagcggcaaaaagaaactgatgcaggtcaaattgagcaagaaaaacatgaagaaaatcgtcaaggctacgcgaaacttcgaggagtatatgcataatctccgcggaaacgacagcgaccgtgtgcgtcgcgaaaatgcacgagacgatcactttgaccccgatgagccatcgagggacatagagtactcgcagatgggccgacacaaacgaagtgaagtgaccgggttcatgaggcctgatctcgccagcgacctaccgaaaagggggaaacaaaagagggttgcgattacaagaagtgacgatgaagatgacttcagcagtagtagctcggatgacgctgcaatgagtgacgagtctgaaagcgagtga

SEQ ID NO: 34350 - protein, 1056 aa, Muscodor strobelii
  misc_feature: SGI Peptide ID NO. 571870
  misc_feature (722)..(912): Pfam Id: PF00004 Pfam Desc: ATPase family associated with various cellular activities (AAA)
  misc_feature (722)..(844): Pfam Id: PF07728 Pfam Desc: ATPase family associated with various cellular activities (AAA)
  misc_feature (722)..(878): Pfam Id: PF00004 Pfam Desc: ATPase family associated with various cellular activities (AAA)
  misc_feature (304)..(1026): NCBI GI: 169614862 Blast Desc: SNOG_10581 [Phaeosphaeria nodorum SN15] gi|160702838|gb|EAT81975.2| SNOG_10581 [Phaeosphaeria nodorum SN15]
  misc_feature (195)..(983): NCBI GI: 46117366 Blast Desc: FG04525.1 [Gibberella zeae PH-1]
  misc_feature (196)..(987): NCBI GI: 226282273 Blast Desc: conserved [Paracoccidioides brasiliensis Pb01]
  misc_feature (196)..(1046): NCBI GI: 226292566 Blast Desc: conserved [Paracoccidioides brasiliensis Pb18]
  misc_feature (196)..(1046): NCBI GI: 225680865 Blast Desc: conserved [Paracoccidioides brasiliensis Pb03]
  misc_feature (300)..(969): NCBI GI: 256724746 Blast Desc: NECHADRAFT_84360 [Nectria haematococca mpVI 77-13-4]
  misc_feature (196)..(969): NCBI GI: 171690692 Blast Desc: protein product [Podospora anserina] gi|170945294|emb|CAP71406.1| protein product [Podospora anserina]
  misc_feature (196)..(1005): NCBI GI: 154279082 Blast Desc: [Ajellomyces capsulatus NAm1] gi|150412297|gb|EDN07684.1| [Ajellomyces capsulatus NAm1]
  misc_feature (307)..(985): NCBI GI: 255950188 Blast Desc: Pc22g19580 [Penicillium chrysogenum Wisconsin 54-1255] gi|211592878|emb|CAP99246.1| Pc22g19580 [Penicillium chrysogenum Wisconsin 54-1255]
  misc_feature (196)..(1005): NCBI GI: 225562337 Blast Desc: conserved [Ajellomyces capsulatus G186AR]
MAIDSLDMNNGNGETNVVLLSETIEDDPRPLELDNPESEEISPGDSDVSHTQLSDNPKDENSKLDTMARSHPELARTLPEFLKKLAPWKGIMPRSLLLDMEDMEHCAKEFETAVDKIKEEEVKKKPLFSCTVAKLTMEDAKYGGDHRANGQIPIIVAFYGSSHSSTFAQMTTSSASSPEQSGNRSGFSNERGSLQRIQINSPLLYGELESITGTTLPGHPLIIPPPYKMLLHYLPNMTQRLENLQEELAGIDAKPTTNNKSQAANPCHDDTVKDVTAESSSQEAQANDIIAAEPSNTTQISRLSDKVSHLQCLCDFVHEELENLVEMQRAINKQTLDKIDFGNLWHLYKPGDLIFSKEEEHEQLYQIYAVTGASIQSRVRTIDEIREIELKLSSMPLHLYHAMVEEGEDEMEKMLRQEVFGIGSLTPLKIDCLAMRFDGQHLGPTQTTKKIKPYVGDRLVTDLPVYPIGFYSDSAELLGKLENRGRKFVSAGGHKSYHGRTLNTKKSTRRGVSTAPYGPPPPPPYSGFQYSQVFSPSPREEIHDEVYVDFHEFFGLFPGWLPGLCQLKRSTPDPTEASEIMILRHGPPLRRALSGNEIDIKLSSDFLADNRDRLERTTLEKALDDITCLRLLPYEIFGYVFRLQQWRTLDISCLRDIDVSPETRDRSFEDLVIADSLRQLLASLVSTHVSVLERQPKRSESAVAPVANTQIDIVRGKGQGLVILLHGPPGSGKTSTAETIATYTQRPLYSITCGDLGTRPEDVERRLREHLKRAEKWGCVLLLDEADVFLMQRTHQHMERNALVSIFLRELEYYSGILFLTTNRPGVLDEAFLSRIHLSLRYPIVDLESTKAIWSNIMNRIERDNEKASVKVIIKREELLEYAVSHFRRGQHDGRKTWNGRQIRNAFQTALSLGHSERLAKLKKENLTPEQAAASGKKKLMQVKLSKKNMKKIVKATRNFEEYMHNLRGNDSDRVRRENARDDHFDPDEPSRDIEYSQMGRHKRSEVTGFMRPDLASDLPKRGKQKRVAITRSDDEDDFSSSSSDDAAMSDESESE

SEQ ID NO: 34351 - DNA, 1357 bp, Muscodor strobelii
  misc_feature: SGI EST ID NO. CUFF.81476.0
  misc_feature: Variant of the nucleotide sequence at SEQ ID NO 34349
ggcaccttagacatttcttgcctgcgagatattgatgtgtcgcccgagactcgagatagaagtttcgaagacctcgtaatagctgattcactacgtcagctgctggccagtttagtgtcgactcatgtttctgtattggagcgccaacccaaaaggtctgaaagtgccgtggctcccgttgccaatacacaaatcgatattgtccgaggaaagggacaaggattagtcattcttttacacgggccacctggttcaggcaagaccagcacagcagagactattgcaacatacacacaacgtccactctactctatcacatgtggtgatcttgggacccgtcccgaggacgtggaacgtcgccttagagaacatctgaaaagagctgagaaatggggatgtgtgctcctccttgatgaagctgacgtattcttgatgcagagaactcatcagcacatggaaagaaatgcacttgtttcgattttccttagagagctagagtactactccggtatattgttcttaacaaccaatcgtccaggtgtcttggatgaagcgtttctgtcccggatccacctatcgctgcgttatccaatcgttgatttagaatccacgaaggcaatatggtccaacatcatgaaccgaatcgagcgagacaacgaaaaagcgagcgtcaaagtgattatcaagcgggaagagttactagaatacgcagtgagtcattttcgccgtggccaacacgacggtcgcaagacatggaatggaagacagattcggaatgcattccaaacagcgttgagcctagggcattctgagcgacttgccaagttgaaaaaggaaaatctcaccccggagcaagctgctgccagcggcaaaaagaaactgatgcaggtcaaattgagcaagaaaaacatgaagaaaatcgtcaaggctacgcgaaacttcgaggagtatatgcataatctccgcggaaacgacagcgaccgtgtgcgtcgcgaaaatgcacgagacgatcactttgaccccgatgagccatcgagggacatagagtactcgcagatgggccgacacaaacgaagtgaagtgaccgggttcatgaggcctgatctcgccagcgacctaccgaaaagggggaaacaaaagagggttgcgattacaagaagtgacgatgaagatgacttcagcagtagtagctcggatgacgctgcaatgagtgacgagtctgaaagcgagtgacgtaaaggggaatagaaaatgagagaaatatctagggaagacggaagcaagtttttgaagtacagacgaaaagagaataaaaataagaagtactaaaaagtaagcatgatgttgtgtatagtct

SEQ ID NO: 34352 - DNA, 780 bp, Muscodor strobelii
  misc_feature: SGI cDNA ID NO. 571871
  misc_feature: Reduced expression when VOC is produced
  misc_feature: Encodes the peptide sequence at SEQ ID NO 34353
atggccacccccggagctaccatttccaagcgcagaaaattcgtcgccgacggtgtcttctatgccgagctgaacgagttcttccagcgcgagctggccgaggagggctactcgggcgtcgaggtccgcgtcacccccaccgtcaccgacatcatcatccgcgccacccacacccaggaggtcctcggcgagcagggtcgccgcatccgcgagctcacctccctcatccagaagcgcttcaagttccccgagaacagcgtctccctctacgccgccaaggtccagaaccgcggtctctccgccgtcgcccagtgcgagtccctccgctacaagctgctcaacggtctcgccgtccgccgtgcctgctacggtgtcctgcgcttcatcatggagtccggcgccaagggttgcgaggtcgtcgtctccggcaagctccgtgctgcccgtgccaagtccatgaagttcaccgacggcttcatgatccactccggccagcccgcccgcgacttcatcgactccgccacccgccacgtcctcctccgccagggtgtcctcggcatcaaggtcaagatcatgcgcggctccgaccccgagggcaaggccggcccctccaagtctctccctgacgccgtcaccatcatcgagcccaaggaggatgcccccgtcgtccagcccatgtcccaggactacggtgccaaggccgcccaggtccaggcccaggctgaggctgcccgcgccgccgaggaaggtggcgaggaggccgctcccgccgaggaatag

SEQ ID NO: 34353 - protein, 259 aa, Muscodor strobelii
  misc_feature: SGI Peptide ID NO. 571871
  misc_feature (48)..(105): Pfam Id: PF07650 Pfam Desc: KH domain
  misc_feature (107)..(191): Pfam Id: PF00189 Pfam Desc: Ribosomal protein S3, C-terminal domain
  misc_feature (2)..(257): NCBI GI: 154301908 Blast Desc: 40S ribosomal protein S3 [Botryotinia fuckeliana B05.10] gi|150855583|gb|EDN30775.1| 40S ribosomal protein S3 [Botryotinia fuckeliana B05.10]
  misc_feature (3)..(257): NCBI GI: 156051430 Blast Desc: ribosomal protein S3 [Sclerotinia sclerotiorum 1980] gi|154704900|gb|EDO04639.1| ribosomal protein S3 [Sclerotinia sclerotiorum 1980]
  misc_feature (1)..(259): NCBI GI: 116207712 Blast Desc: 40S ribosomal protein S3 [Chaetomium globosum CBS 148.51] gi|88183746|gb|EAQ91214.1| 40S ribosomal protein S3 [Chaetomium globosum CBS 148.51]
  misc_feature (1)..(259): NCBI GI: 258576671 Blast Desc: 40S ribosomal protein S3 [Uncinocarpus reesii 1704] gi|237902783|gb|EEP77184.1| 40S ribosomal protein S3 [Uncinocarpus reesii 1704]
  misc_feature (1)..(257): NCBI GI: 119187711 Blast Desc: 40S ribosomal protein S3 [Coccidioides immitis RS] gi|240108096|gb|EER26270.1| 40S ribosomal protein S3, [Coccidioides posadasii C735 delta SOWgp]
  misc_feature (1)..(231): NCBI GI: 171686174 Blast Desc: protein product [Podospora anserina] gi|170943048|emb|CAP68701.1| protein product [Podospora anserina]
  misc_feature (1)..(258): NCBI GI: 242785057 Blast Desc: 40S ribosomal protein S3, [Talaromyces stipitatus ATCC 10500] gi|218720661|gb|EED20080.1| 40S ribosomal protein S3, [Talaromyces stipitatus ATCC 10500]
  misc_feature (1)..(257): NCBI GI: 189188112 Blast Desc: 40S ribosomal protein S3-2 [Pyrenophora tritici-repentis Pt-1C-BFP] gi|187972001|gb|EDU39500.1| 40S ribosomal protein S3-2 [Pyrenophora tritici-repentis Pt-1C-BFP]
  misc_feature (1)..(231): NCBI GI: 164429154 Blast Desc: cytoplasmic ribosomal protein subunit S3 [Neurospora crassa OR74A] gi|157072430|gb|EAA26938.2| cytoplasmic ribosomal protein subunit S3 [Neurospora crassa OR74A]
  misc_feature (1)..(255): NCBI GI: 261197469 Blast Desc: 40S ribosomal protein S3 [Ajellomyces dermatitidis SLH14081] gi|239595767|gb|EEQ78348.1| 40S ribosomal protein S3 [Ajellomyces dermatitidis SLH14081] gi|239606762|gb|EEQ83749.1|
  misc_feature: Useful for introducing or modulating the production of volatile compounds
MATPGATISKRRKFVADGVFYAELNEFFQRELAEEGYSGVEVRVTPTVTDIIIRATHTQEVLGEQGRRIRELTSLIQKRFKFPENSVSLYAAKVQNRGLSAVAQCESLRYKLLNGLAVRRACYGVLRFIMESGAKGCEVVVSGKLRAARAKSMKFTDGFMIHSGQPARDFIDSATRHVLLRQGVLGIKVKIMRGSDPEGKAGPSKSLPDAVTIIEPKEDAPVVQPMSQDYGAKAAQVQAQAEAARAAEEGGEEAAPAEE

SEQ ID NO: 34354 - DNA, 1417 bp, Muscodor strobelii
  misc_feature: SGI EST ID NO. CUFF.81486.0
  misc_feature: Variant of the nucleotide sequence at SEQ ID NO 34352
cgaaattcagtacagtgccagcatacactgtcgcctgctactccaccaaaattgaacccgtccctctattttctatgtgcctttgagagagtgtgtgatactcccaatccatcgtctcgaccgcccaactcttcaacctccgacgacctcactctacccgactcccaacagtcaatcgagaggaacatcagtcaagatggccacccccggagctaccatttccaagcgcagaaaattcgtcgccgacggtgtcttctatgccgagctgaacgagttcttccagcgcgagctggccgaggagggctactcgggcgtcgaggtccgcgtcacccccaccgtcaccgacatcatcatccgcgccacccacacccaggaggtcctcggcgagcagggtcgccgcatccgcgagctcacctccctcatccagaagcgcttcaagttccccgagaacagcgtctccctctacgccgccaaggtccagaaccgcggtctctccgccgtcgcccagtgcgagtccctccgctacaagctgctcaacggtctcgccgtccgccgtgcctgctacggtgtcctgcgcttcatcatggagtccggcgccaagggttgcgaggtcgtcgtctccggcaagctccgtgctgcccgtgccaagtccatgaagttcaccgacggcttcatgatccactccggccagcccgcccgcgacttcatcgactccgccacccgccacgtcctcctccgccagggtgtcctcggcatcaaggtcaagatcatgcgcggctccgaccccgagggcaaggccggcccctccaagtctctccctgacgccgtcaccatcatcgagcccaaggaggatgcccccgtcgtccagcccatgtcccaggactacggtgccaaggccgcccaggtccaggcccaggctgaggctgcccgcgccgccgaggaaggtggcgaggaggccgctcccgccgaggaataggattgagtcgtcggtgctggactcctcaaaccacagaatctttgacgaaacgagagaagagggtgggagaagaacgcatgagcgagggatgaactggatgggactgcgaatcaatttcggcgtcttgatgatcatttgcattgggcacggaaagtgatactcacgaagaaaataaaatgaccccaaattcacgaagctcaatggatcaattgcgtttcgggctgtaatgtgatggtctccgccgcttgtcgcggcggagatatcgtagaccatgaaataacaatgaatcaacatgagtgaacgcagttatggcaagcttccccagcttaggaccgtgagctctgatcatcaaatcggagagccctagcagctctgaagttatgattacatcaagactaggatggcctcttgttaaggcaatctatgacatatgaatgggag

SEQ ID NO: 34355 - DNA, 2448 bp, Muscodor strobelii
  misc_feature: SGI cDNA ID NO. 571872
  misc_feature: Encodes the peptide sequence at SEQ ID NO 34356
atggcgcacctcatgctgaccgaccgcaagatcccctccgtcgacgccatccgcggcggcgacaaggtctcgggcgagctccgactgaccgaccaccacatcatctttgtccacaaggtcaaacccaaggagggcgaatccctgcctctcaacgcccccaagtaccgcgagtccttcttcgcctatcccataatatcccactgcacctttcgcccgtgccccaccgtctccggccgcccctcctccatacgcctgcgcggccgagacttcagctttgtcaacttccttttcgccgacgaggcccgcgcccgcgaggccttcgacttcatccgcgctcgtacctgtcgcctcggctctatagagaagctgtacgcctttagctaccagcccctgaaggccgagaagccgctcaacggctgggacatctacgatccccgggccgagttccgccgtcagggcatcagcaccaaggccgtcgacaggggctggagagtctcccagatcaacaaagactatggattctcgcccacctatcccgccttgattgtcgttccctccaccatatccgatagcaccatcaaatatgccggcccctaccgctcccgagcacgcatacccgccctcagctatcttcactccctcaacaactgctccatcacccgcagctctcagcctttgttgggaatcaggggggcgaggagcgtccaggacgaagccctcgtcagtgcctgcttctcggcctccgccaccatcgagtttaatgggcctgatgtcgtgcaactggaccccaccgagccaagtccggcgtcgagccaaatagacatccgcggctctcagctgtccgagacatcagacacgacgcgtctggaagatgatatgatcgccggcaatcctaccgtagaccccaagaccggcaagcggcttatatacggcgctcaacaacagaatctcattgttgacgcccgccctaccatcaacgcactcgccatgcaggtcgctggtaagggttccgaaaacatggaatactacccctttgccaagaaggcatatctcaatatcgccaacattcatgttatgaggaaaagtctgaacgtcgtcatcgacgccatcaaggacggcgatatcactaaactgccgcccaaccgggagctgctgcagaagagtggctggcttgatcacatccggggcgtcctcgatggctccgccctgatagcccggcaagtgggaatcaaccactctcacgtattaatacactgctcggatgggtgggatcgcacaagccagctgtcggcattgtcgcagcttatgctcgatccttattatcgtactattgatgggtttattgtcctggtggaaaaagactggctatcgttcggccacatgtttcaacagcggtctgggcccctcggtcatgagtcttggtttgttacggagcgagatgccatggctggctctgctataccccctggcgagtccgatggaagagccaacgaggcttttgagaacgccatcgccggcgctagacgctttttcaaccgagctcggaactcggagaacagcggagatggagaagatggtctgaactcgccgcccgatgagaactcgcaagcgaagaagtcatcagattctttggcgcccagtggggctacaaagcctaccgaaatatcacccgtcttccaccagttcctcgacgccacttggcaaattctacgccaacaccccaacagattcgagttcaatgagcgtttcctccgccggctgctttaccatctatattcggggcaatacggtacattcttgtacaataatgagaagcaacgccgcgacgcccacgcgcgcgaaaagacgaggtctgtgtgggactacttcctgtcgcgaaaagccgactttctaaatccttcctacgatgccacgattgacgatcggcaaagtggccgagagagactcctattccccaagattggcgacagcgacgtgcggtggtgggcacaatgctttggcagatccgacccagagatgaacgagtatctcgaccagatagctgcgcgtgaggagagaatcggcacctacactgctacggagtctagtttgtccgagggaacgctatccaagaacggcggtgcctcgtcacatggccccccgagcccgaacccgccgagcgccccgacttctaatccgagcgtattggcgggaatcgagtcagcgcacgaaactctcacgcccgccgcttcgccggcgaagaatccggctacgctgagacaggcaagtagcgccgatagtcctggtgcgtttgctatgaaccttgcgaaactgagggaaggggttcaaggcttagacatagggagaggtttattcggctcgtcgccaagtaatgggacgcccaagagtcaagatagagagatgagtgacatggagacgacaaacgctgagtttgagggccagagttag

SEQ ID NO: 34356 - protein, 815 aa, Muscodor strobelii
  misc_feature: SGI Peptide ID NO. 571872
  misc_feature (172)..(351): Pfam Id: PF06602 Pfam Desc: Myotubularin-related
  misc_feature (13)..(807): NCBI GI: 171686172 Blast Desc: protein product [Podospora anserina] gi|170943047|emb|CAP68700.1| protein product [Podospora anserina]
  misc_feature (13)..(785): NCBI GI: 164429152 Blast Desc: NCU11185 [Neurospora crassa OR74A] gi|157072429|gb|EDO65423.1| NCU11185 [Neurospora crassa OR74A]
  misc_feature (10)..(805): NCBI GI: 154301906 Blast Desc: BC1G_10190 [Botryotinia fuckeliana B05.10] gi|150855582|gb|EDN30774.1| BC1G_10190 [Botryotinia fuckeliana B05.10]
  misc_feature (10)..(794): NCBI GI: 156051428 Blast Desc: SS1G_07121 [Sclerotinia sclerotiorum 1980] gi|154704899|gb|EDO04638.1| SS1G_07121 [Sclerotinia sclerotiorum 1980]
  misc_feature (5)..(804): NCBI GI: 46122109 Blast Desc: FG05432.1 [Gibberella zeae PH-1]
  misc_feature (5)..(804): NCBI GI: 256729745 Blast Desc: [Nectria haematococca mpVI 77-13-4]
  misc_feature (5)..(784): NCBI GI: 261360180 Blast Desc: myotubularin [Verticillium albo-atrum VaMs.102]
  misc_feature (134)..(797): NCBI GI: 116207710 Blast Desc: CHGG_03148 [Chaetomium globosum CBS 148.51] gi|88183745|gb|EAQ91213.1| CHGG_03148 [Chaetomium globosum CBS 148.51]
  misc_feature (22)..(752): NCBI GI: 115389472 Blast Desc: conserved [Aspergillus terreus NIH2624] gi|114194637|gb|EAU36337.1| conserved [Aspergillus terreus NIH2624]
  misc_feature (10)..(731): NCBI GI: 261197471 Blast Desc: protein phosphatase [Ajellomyces dermatitidis SLH14081] gi|239595768|gb|EEQ78349.1| protein phosphatase [Ajellomyces dermatitidis SLH14081]
  misc_feature (22)..(467): SWISSPROT Homolog: EC 3.1.3.48 Protein-tyrosine-phosphatase
MAHLMLTDRKIPSVDAIRGGDKVSGELRLTDHHIIFVHKVKPKEGESLPLNAPKYRESFFAYPIISHCTFRPCPTVSGRPSSIRLRGRDFSFVNFLFADEARAREAFDFIRARTCRLGSIEKLYAFSYQPLKAEKPLNGWDIYDPRAEFRRQGISTKAVDRGWRVSQINKDYGFSPTYPALIVVPSTISDSTIKYAGPYRSRARIPALSYLHSLNNCSITRSSQPLLGIRGARSVQDEALVSACFSASATIEFNGPDVVQLDPTEPSPASSQIDIRGSQLSETSDTTRLEDDMIAGNPTVDPKTGKRLIYGAQQQNLIVDARPTINALAMQVAGKGSENMEYYPFAKKAYLNIANIHVMRKSLNVVIDAIKDGDITKLPPNRELLQKSGWLDHIRGVLDGSALIARQVGINHSHVLIHCSDGWDRTSQLSALSQLMLDPYYRTIDGFIVLVEKDWLSFGHMFQQRSGPLGHESWFVTERDAMAGSAIPPGESDGRANEAFENAIAGARRFFNRARNSENSGDGEDGLNSPPDENSQAKKSSDSLAPSGATKPTEISPVFHQFLDATWQILRQHPNRFEFNERFLRRLLYHLYSGQYGTFLYNNEKQRRDAHAREKTRSVWDYFLSRKADFLNPSYDATIDDRQSGRERLLFPKIGDSDVRWWAQCFGRSDPEMNEYLDQIAAREERIGTYTATESSLSEGTLSKNGGASSHGPPSPNPPSAPTSNPSVLAGIESAHETLTPAASPAKNPATLRQASSADSPGAFAMNLAKLREGVQGLDIGRGLFGSSPSNGTPKSQDREMSDMETTNAEFEGQS

SEQ ID NO: 34357 - DNA, 3618 bp, Muscodor strobelii
  misc_feature: SGI EST ID NO. CUFF.81570.1
  misc_feature: Variant of the nucleotide sequence at SEQ ID NO 34355
aaaacatgggattgtttgccgtgatgagctggggtacaacaactccggtgaattgttatctgcagatagctagctttcccgaggacacatagctcataccttactcataatgacaatctgatacataggggaacattgccatactgggcttgttcaagtggcactcgacacatgcaggccgttgacaagacaattgatacactcatttaggtacatacatgagatattcgtaacaacagccaacaagtggtttcgcagaacacacaatgtttaattgaattgtatctgagatcttattcggaaattcgctaagggataaattcaaatggttattcgaaccattatcggaaaatagcacgctgcgggattcgatgtcttaagcattgtattattcggtacgacaggtcaagcggaagtgacgtcggatgatgccacagctggtcatttgctcccccggtgcttcagccttgctggctggctggctggctggctcgtgataaaggataagctaccacgtaagccccgcgctacccgtctggagcgcagtgacatacattgttcaggaaaagctattgtcgaacacataggtattcagtacacgtaacgaaatcacagtcattactcagagatcctccttcaatacacaatcaaacatgtggacaagatgcaggtgaaaacggtaagttgtccctccaaataccatctgccagggagaaagcctgtatgctctagcgctgccagatctctgcctcttaactcgagtgctagaaatagcacatttccttgtatttcagggcaaccatagccatggcgcacctcatgctgaccgaccgcaagatcccctccgtcgacgccatccgcggcggcgacaaggtctcgggcgagctccgactgaccgaccaccacatcatctttgtccacaaggtcaaacccaaggagggcgaatccctgcctctcaacgcccccaagtaccgcgagtccttcttcgcctatcccataatatcccactgcacctttcgcccgtgccccaccgtctccggccgcccctcctccatacgcctgcgcggccgagacttcagctttgtcaacttccttttcgccgacgaggcccgcgcccgcgaggccttcgacttcatccgcgctcgtacctgtcgcctcggctctatagagaagctgtacgcctttagctaccagcccctgaaggccgagaagccgctcaacggctgggacatctacgatccccgggccgagttccgccgtcagggcatcagcaccaaggccgtcgacaggggctggagagtctcccagatcaacaaagactatggattctcgcccacctatcccgccttgattgtcgttccctccaccatatccgatagcaccatcaaatatgccggcccctaccgctcccgagcacgcatacccgccctcagctatcttcactccctcaacaactgctccatcacccgcagctctcagcctttgttgggaatcaggggggcgaggagcgtccaggacgaagccctcgtcagtgcctgcttctcggcctccgccaccatcgagtttaatgggcctgatgtcgtgcaactggaccccaccgagccaagtccggcgtcgagccaaatagacatccgcggctctcagctgtccgagacatcagacacgacgcgtctggaagatgatatgatcgccggcaatcctaccgtagaccccaagaccggcaagcggcttatatacggcgctcaacaacagaatctcattgttgacgcccgccctaccatcaacgcactcgccatgcaggtcgctggtaagggttccgaaaacatggaatactacccctttgccaagaaggcatatctcaatatcgccaacattcatgttatgaggaaaagtctgaacgtcgtcatcgacgccatcaaggacggcgatatcactaaactgccgcccaaccgggagctgctgcagaagagtggctggcttgatcacatccggggcgtcctcgatggctccgccctgatagcccggcaagtgggaatcaaccactctcacgtattaatacactgctcggatgggtgggatcgcacaagccagctgtcggcattgtcgcagcttatgctcgatccttattatcgtactattgatgggtttattgtcctggtggaaaaagactggctatcgttcggccacatgtttcaacagcggtctgggcccctcggtcatgagtcttggtttgttacggagcgagatgccatggctggctctgctataccccctggcgagtccgatggaagagccaacgaggcttttgagaacgccatcgccggcgctagacgctttttcaaccgagctcggaactcggagaacagcggagatggagaagatggtctgaactcgccgcccgatgagaactcgcaagcgaagaagtcatcagattctttggcgcccagtggggctacaaagcctaccgaaatatcacccgtcttccaccagttcctcgacgccacttggcaaattctacgccaacaccccaacagattcgagttcaatgagcgtttcctccgccggctgctttaccatctatattcggggcaatacggtacattcttgtacaataatgagaagcaacgccgcgacgcccacgcgcgcgaaaagacgaggtctgtgtgggactacttcctgtcgcgaaaagccgactttctaaatccttcctacgatgccacgattgacgatcggcaaagtggccgagagagactcctattccccaagattggcgacagcgacgtgcggtggtgggcacaatgctttggcagatccgacccagagatgaacgagtatctcgaccagatagctgcgcgtgaggagagaatcggcacctacactgctacggagtctagtttgtccgagggaacgctatccaagaacggcggtgcctcgtcacatggccccccgagcccgaacccgccgagcgccccgacttctaatccgagcgtattggcgggaatcgagtcagcgcacgaaactctcacgcccgccgcttcgccggcgaagaatccggctacgctgagacaggcaagtagcgccgatagtcctggtgcgtttgctatgaaccttgcgaaactgagggaaggggttcaaggcttagacatagggagaggtttattcggctcgtcgccaagtaatgggacgcccaagagtcaagatagagagatgagtgacatggagacgacaaacgctgagtttgagggccagagttagtggttccgctgggtgcatcgtctgtttatggggcaaggtgtgtgagtatggggataggtgtgtgtgtgtctgcatgctgcattgatagaattgagcgtctggtgttttggtgtttgatggagtcagagacattgatatcggtatgtaattttttgaagaggggagagaggaccaaagcgaattagtttaggtacctagcgaggtgaagtagctgagtatgagaagagaggagttgagttgattctcgttggcattccgtttatcatggaggtaagagtgatgatcgcggaagtactgtagacgctcatgtgtaaacattaataatgggatgactgtttaaactaagtctcgaatagactgacg

SEQ ID NO: 34358 - DNA, 999 bp, Muscodor strobelii
  misc_feature: SGI cDNA ID NO. 571873
  misc_feature: Elevated expression when VOC is produced
  misc_feature: Encodes the peptide sequence at SEQ ID NO 34359
atggcagaagccctgagcgtggccgccagcggcattgctgttgcgcaggtggctgcacaggtcggtagctctataatcaaactgaagaagctgtgggatgagctgcgagatgtgccaacgactatcactgatctcatggagcaaattgactgcttagcgccaattttatcccaagcagagcattcgctcaatcatgtagatctaccaccgatgttgtgggatagagccatggcgaatactagtactacatattgccacaaggctctagccgctctctctgaactcaccgaagacctatctgctcaactaaatcgtagcgggaaacttcgaaccaagatagtttctgcaaagattcttctgaagaaggatcaaattcagagattggagagaaaactcgatggcgccgtaaggctcctttcgttagctctgcaatcttataatgtgactttgacaaccttacagcctcatattatcatgcagaaattcacggcgctatcaacaacactcccaatgcagtcatgtgtggctacccttccaccttcggaaaccgaagcatctcgacatgtaatcgatacttgggagaccggttgcgaagtcgcagaagctgctgacacagacaatactggatctgagatcgtagtgcgccgacggatccaaagaaaacgagcaattactcgcaagttctttgttaatatcccgctctggacaacaacttacacatgggagctacaatacgcgaaatcgtgtggaggctgggacttcaggatcaagcaatataacatccgccccgacgatagcgaagtgttcgaagtggctagatacggaaccccggagcagctacaacagctatgtgcaaaaggcaaagcttcattgtcagacaaaaccgagttctatgatagcttacttcatgtagccgcgcaatctactaacccatccatgatagaatatttgttgagcatgggtctagatccgaccgaaagaaatgaattccaacagtaa

SEQ ID NO: 34359 - protein, 332 aa, Muscodor strobelii
  misc_feature: SGI Peptide ID NO. 571873
  misc_feature (1)..(322): NCBI GI: 256724871 Blast Desc: NECHADRAFT_77012 [Nectria haematococca mpVI 77-13-4]
  misc_feature (1)..(322): NCBI GI: 261359203 Blast Desc: [Verticillium albo-atrum VaMs.102]
  misc_feature (1)..(326): NCBI GI: 154318556 Blast Desc: [Botryotinia fuckeliana B05.10] gi|150857797|gb|EDN32989.1| [Botryotinia fuckeliana B05.10]
  misc_feature (1)..(165): NCBI GI: 261356508 Blast Desc: [Verticillium albo-atrum VaMs.102]
  misc_feature (1)..(323): NCBI GI: 154317802 Blast Desc: [Botryotinia fuckeliana B05.10] gi|150843542|gb|EDN18735.1| [Botryotinia fuckeliana B05.10]
  misc_feature (4)..(261): NCBI GI: 261358664 Blast Desc: [Verticillium albo-atrum VaMs.102]
  misc_feature (1)..(328): NCBI GI: 156050379 Blast Desc: [Sclerotinia sclerotiorum 1980] gi|154692177|gb|EDN91915.1| [Sclerotinia sclerotiorum 1980]
  misc_feature (5)..(153): NCBI GI: 256734679 Blast Desc: NECHADRAFT_75185 [Nectria haematococca mpVI 77-13-4]
  misc_feature (1)..(146): NCBI GI: 154295105 Blast Desc: [Botryotinia fuckeliana B05.10] gi|150844457|gb|EDN19650.1| [Botryotinia fuckeliana B05.10]
  misc_feature (1)..(162): NCBI GI: 255947028 Blast Desc: Pc22g02370 [Penicillium chrysogenum Wisconsin 54-1255] gi|211591298|emb|CAP97525.1| Pc22g02370 [Penicillium chrysogenum Wisconsin 54-1255]
  misc_feature: Useful for introducing or modulating the production of volatile compounds
MAEALSVAASGIAVAQVAAQVGSSIIKLKKLWDELRDVPTTITDLMEQIDCLAPILSQAEHSLNHVDLPPMLWDRAMANTSTTYCHKALAALSELTEDLSAQLNRSGKLRTKIVSAKILLKKDQIQRLERKLDGAVRLLSLALQSYNVTLTTLQPHIIMQKFTALSTTLPMQSCVATLPPSETEASRHVIDTWETGCEVAEAADTDNTGSEIVVRRRIQRKRAITRKFFVNIPLWTTTYTWELQYAKSCGGWDFRIKQYNIRPDDSEVFEVARYGTPEQLQQLCAKGKASLSDKTEFYDSLLHVAAQSTNPSMIEYLLSMGLDPTERNEFQQ

SEQ ID NO: 34360 - DNA, 2196 bp, Muscodor strobelii
  misc_feature: SGI EST ID NO. CUFF.81488.1
  misc_feature: Variant of the nucleotide sequence at SEQ ID NO 34358
gaagccctgagcgtggccgccagcggcattgctgttgcgcaggtggctgcacaggtcggtagctctataatcaaactgaagaagctgtgggatgagctgcgagatgtgccaacgactatcactgatctcatggagcaaattgactgcttagcgccaattttatcccaagcagagcattcgctcaatcatgtagatctaccaccgatgttgtgggatagagccatggcgaatactagtactacatattgccacaaggctctagccgctctctctgaactcaccgaagacctatctgctcaactaaatcgtagcgggaaacttcgaaccaagatagtttctgcaaagattcttctgaagaaggatcaaattcagagattggagagaaaactcgatggcgccgtaaggctcctttcgttagctctgcaatcttataatgtgactttgacaaccttacagcctcatattatcatgcagaaattcacggcgctatcaacaacactcccaatgcagtcatgtgtggctacccttccaccttcggaaaccgaagcatctcgacatgtaatcgatacttgggagaccggttgcgaagtcgcagaagctgctgacacagacaatactggatctgagatcgtagtgcgccgacggatccaaagaaaacgagcaattactcgcaagttctttgttaatatcccgctctggacaacaacttacacatgggagctacaatacgcgaaatcgtgtggaggctgggacttcaggatcaagcaatataacatccgccccgacgatagcgaagtgttcgaagtggctagatacggaaccccggagcagctacaacagctatgtgcaaaaggcaaagcttcattgtcagacaaaaccgagttctatgatagcttacttcatgtagccgcgcaatctactaacccatccatgatagaatatttgttgagcatgggtctagatccgaccgaaagaaatgaattccaacattataaagcttgcgcgcaatttgggatttaacagatgcattgatactctctcagtgactagcggtattatcaacgccatgtttgatgggcccgaagacttctatgaatatcgttgggtcaatgtgttctacgaccccctggagataaagacacccgtttgttattgctcttcgagcctaacgttaatagaccctcatcgctcattcgccgccgccgagtgtcctttgcataaagcaacttcactgaattcccgacttcgagctctacgacatgcgtcgtttcttcatatttacatggtcacagaagcagtatatgacatgttacagccattttgggagatcgattttgagaaactctgtaatgcctcgacactatccttctcgttaatacacacgttcacatatgtcctcgcgcactattacgctataccaagcgctatcatgtcaatgagggctgaatgcacagcactgtggctgagtttggtcacacgcgtgatggcaaatacaaatgacatacactgcattgaatccaagacacgtgtcggaacaaattacatggtgggactcgatcagaacggcctggctgtttcgacaccacttacaactgcgattctagcaatgcggcgcgacagtcaaaacgggagaaatgtagacaatttcctcagattatggttgtccatgatcaaatccttagggcacgacctgtcagcatatggtcgacgcgaaaatgagctattgaagacccaccggttgaaattcatacgtagatttattaatcaggatatcgacggtggatggatgtcaagttatctcaaaggctatttgtatggacccaatccagaggattggagaattctgtggacattttcaggaaatggctattgtgctgacttctggaaactcatcgaaaacccacccgacctcattcctggagcttgggtcgatgacgatagcgagcggcatcatcctgaaatcgatattgattcatggtacaagcaatgttttaatcgactagttccatgggcggagattactgttcatccatatcagggcaggacggtgacctaaacaacgcttgaatatcggatataattagtatgtttataagtattgataaaaccagtgtgggcaaagctcggaacgagttcgaggtcgcaactctagagtcagagctgtcaactagtcagagcatgaatacatctacgcat

SEQ ID NO: 34361 - DNA, 1356 bp, Muscodor strobelii
  misc_feature: SGI cDNA ID NO. 571874
  misc_feature: Encodes the peptide sequence at SEQ ID NO 34362
atgttattcatcccaacaaggctttccgggaaatatccgtgggctactgagcaagtcttgcgcaagtatggagatgttgtccgcattgctcccaacgaactgcttttcttcactcccgaagcatttgcagatatatattcaccacatgtgaagaatcacgaaacatgggtcaaaacagacatcaatgatcgaggagacaagcatggtggcatcttgttcgagcgggaccctgtacggcatagacaggttgccaagcaacttgcccccgctttcagttcgaaatctactcgcgccaaagagcccaggatacacgaacacattgactatttcatctcacaaatgaggatacacggtaaagagggcattgatttttccaaatggtgtaattggctagtcatggatatctcggccgatatggcttataaccgcaagatgtgtcaaatgagagacatgaagagctcgacttttttgaacgttctattgggagtcaatgcattctcaacaatcgagcaagtctcaaagcgcttccctttcattggcaaattgaagtatctttttctccccttgtccaagatagcatcgatcatggaaatgaatcacaccaataggaatgagcttgagtggcgaataagaaataagggaaagacggaagacttggatctctttgaacagctagtacccgcgggaggtacaattccagaagaccctagcaattttcgacatctcgaaaaaattgcaggggaactgctattcgccgggttcgatcccgtttccctctggatatttgttaccttgttgcagctggtccaatattcttcttgtctggaagccttgaacaaagagatcagagatgccttcgcttgctacacagacatttcgtctgctaggctcgcgaaactggagtatctgaatgcttgcctcgaagagtcgatgcgtctcctccccagcaataacactggactacctcgggagagtccaggtgggactgttgacggcacgtatgttccacaagatactaccgtacagactagtatctttgccgcttcacgaagccctcgaaactttcacgacccactcagtttcgaaccacgccgttggctacgagcagaacatccgatgcatgaccgcaagtttttgagtgacaggggcaaggaattgtttcccttcagtttaggcccgcgacaatgcccaggcaaggaaatggcgtggacgcaggctcgactgttcattgggaaagtgctttggacatttgacctcgaacagtgttcaaaacgcatccccgacattgagaaggactttattcattacgggttctgggtcaagccggaattccaactcagcttccgatccaggtag

SEQ ID NO: 34362 - protein, 451 aa, Muscodor strobelii
  misc_feature: SGI Peptide ID NO. 571874
  misc_feature (1)..(448): Pfam Id: PF00067 Pfam Desc: Cytochrome P450
  misc_feature (238)..(448): Pfam Id: PF00067 Pfam Desc: Cytochrome P450
  misc_feature (50)..(443): NCBI GI: 145606883 Blast Desc: MGG_03819 [Magnaporthe grisea 70-15] gi|145014505|gb|EDJ99073.1| MGG_03819 [Magnaporthe grisea 70-15]
  misc_feature (24)..(253): NCBI GI: 156056787 Blast Desc: SS1G_04124 [Sclerotinia sclerotiorum 1980] gi|154701910|gb|EDO01649.1| SS1G_04124 [Sclerotinia sclerotiorum 1980]
  misc_feature (6)..(450): NCBI GI: 156054726 Blast Desc: SS1G_06211 [Sclerotinia sclerotiorum 1980] gi|154703991|gb|EDO03730.1| SS1G_06211 [Sclerotinia sclerotiorum 1980]
  misc_feature (9)..(448): NCBI GI: 154296440 Blast Desc: BC1G_13046 [Botryotinia fuckeliana B05.10] gi|150843407|gb|EDN18600.1| BC1G_13046 [Botryotinia fuckeliana B05.10]
  misc_feature (17)..(449): NCBI GI: 67522561 Blast Desc: AN1737.2 [Aspergillus nidulans FGSC A4] gi|40744867|gb|EAA64023.1| AN1737.2 [Aspergillus nidulans FGSC A4] gi|259487082|tpe|CBF85469.1| TPA: cytochrome P450, (Eurofung)
  misc_feature (8)..(450): NCBI GI: 154289577 Blast Desc: BC1G_16084 [Botryotinia fuckeliana B05.10] gi|150849019|gb|EDN24212.1| BC1G_16084 [Botryotinia fuckeliana B05.10] gi|169635728|emb|CAP58782.1| cytochrome P40 monooxygenase
  misc_feature (9)..(420): NCBI GI: 46138361 Blast Desc: FG10695.1 [Gibberella zeae PH-1]
  misc_feature (1)..(446): NCBI GI: 255931851 Blast Desc: Pc12g06400 [Penicillium chrysogenum Wisconsin 54-1255] gi|211582101|emb|CAP80267.1| Pc12g06400 [Penicillium chrysogenum Wisconsin 54-1255]
  misc_feature (8)..(451): NCBI GI: 121712467 Blast Desc: benzoate 4-monooxygenase cytochrome P450 [Aspergillus clavatus NRRL 1] gi|119401997|gb|EAW12419.1| benzoate 4-monooxygenase cytochrome P450 [Aspergillus clavatus NRRL 1]
  misc_feature (8)..(449): NCBI GI: 259485752 Blast Desc: TPA: cytochrome P450, (Eurofung) [Aspergillus nidulans FGSC A4]
  misc_feature (2)..(420): SWISSPROT Homolog: EC 1.14.13.12 Benzoate 4-monooxygenase
MLFIPTRLSGKYPWATEQVLRKYGDVVRIAPNELLFFTPEAFADIYSPHVKNHETWVKTDINDRGDKHGGILFERDPVRHRQVAKQLAPAFSSKSTRAKEPRIHEHIDYFISQMRIHGKEGIDFSKWCNWLVMDISADMAYNRKMCQMRDMKSSTFLNVLLGVNAFSTIEQVSKRFPFIGKLKYLFLPLSKIASIMEMNHTNRNELEWRIRNKGKTEDLDLFEQLVPAGGTIPEDPSNFRHLEKIAGELLFAGFDPVSLWIFVTLLQLVQYSSCLEALNKEIRDAFACYTDISSARLAKLEYLNACLEESMRLLPSNNTGLPRESPGGTVDGTYVPQDTTVQTSIFAASRSPRNFHDPLSFEPRRWLRAEHPMHDRKFLSDRGKELFPFSLGPRQCPGKEMAWTQARLFIGKVLWTFDLEQCSKRIPDIEKDFIHYGFWVKPEFQLSFRSR

SEQ ID NO: 34363 - DNA, 1087 bp, Muscodor strobelii
  misc_feature: SGI EST ID NO. CUFF.81501.0
  misc_feature: Variant of the nucleotide sequence at SEQ ID NO 34361
cgaactcggaaaacgccttactcggaaagctgtctgacatttcagaattttggacgctgtcttcatttacctgcccttcgcaatgcatgtaaaaagggctatggcacaatgaacgaatcatcgacgtgacctgagcttgaagcttttggcggcttgtcacgctgtaaattggagataaaccactactgtacgatacgggagtgtcgaaaccgagcacgaaaattttgtcctttagagatataatcttgcagtctggcctcgctcgtccatgactgcgacagacagacgatcgagcgatgaccccgtccgactgtgaggaccaattatcccttgcagcaattgattttaccggagaatgcattacagcaaggggtgttattcgatgcgatggaaatagcccctcgtcataacctactatgaagggtcaagttctacatcttacctcccttgacagctctgttgtgcgtctcaaattccattgaccatttgttcttgtcgtcctgccattgtaaaggcttgcgacataaataagttcatgttcgctttggcctcatcactgagattggttgtggtcttactctcatcggctgtgagttaacccgtcactaggcccggacatcgtcaataatgtttcactcagatacttatatatgtaacatgccgcgccatatatcttttatatctccacccgcttgccaacttcccaggcccgaaaattgcagctatctcaaatgtgtggtatgcgtatcattggctttccgggaaatatccgtgggctactgagcaagtcttgcgcaagtatggagatgttgtccgcattgctcccaacgaactgcttttcttcactcccgaagcatttgcagatatatattcaccacatgtgaagaatcacgaaacatgggtcaaaacagacatcaatgatcgaggagacaagcatggtggcatcttgttcgagcgggaccctgtacggcatagacaggttgccaagcaacttgcccccgctttcagttcgaaatctactcgcgccaaagagcccaggatacacgaacacattgactatttcatctcacaaatgaggatacacggt

SEQ ID NO: 34364 - DNA, 1266 bp, Muscodor strobelii
  misc_feature: SGI cDNA ID NO. 571875
  misc_feature: Encodes the peptide sequence at SEQ ID NO 34365
atgcctgttaggggtggcgcgcccgcaattgtgggttcggctgacatccgctgggccgatggtgacgggatgacgaagctggagatttcgttcgcctcagtgcgcactggcaatctagcgcatgcgagttcccaatgcgaaaagggcatggtgggtacgggctcgacaggcaaagaaaaatgggctctcgaagagcacatacaaaaagtcgacatctgccgccacagaagcgaaatatgcaagtggttgtcagacgacggctcatcgattaaacaggctagctaccaatttgctgctccgcaaaggactgagaagtcagtcttgcgagtcacccccgcgtctcctcaacaaaagttgctccctcaaacacatgacattttcaccattatcctatcctgggtaatagaaaaaacatgggagccgtcacgtttgccggtcgtcaaacccttcaagacccgagattcggagctcttcgacctaacacgccactacccttcacctcagaggctcgattatctcttaccaggcctgtatgctacacagtctgtgtatagtatgcatcagcacgcgctgcggaaacatgagcttcttcctgtagcatatagtgagaatatcgtcgcgtcccgagcttacagaggaatcgaacatgagatcacgaaggataattggctctcgatcttactgtttaccgtcagtcacatcatgtttcagttcgcaagcgctgctttcacagcagatgatgcatttgactatctcgagatattcagacacgtccttagaggtctccgtggtgtcgaaaggcaaatcgtcaatttcatggagaagacgaattatccccgagggaataatcgaccgtatctccctaccaacatattacccgacgacacaagcaaggaatctcttgacaacctagcgaaagcctgtgagtctcatgtcgcgtcgaaaggaaccagaaaggcatgcgatgatgccctgaaggagttgcgtgtgtgggtagctggcgttgagggtcgtcctaggttttggggccacttcttctactggccctgtgcagtgtcggataatttcgtgtcggcgcttgtcgagagacaaccaatcgccacaatcatcttcattcactggtgcggagtcatgcatcgcgcacccgacgcgtggttcctgcgcggctgggctcgcaagaccgctttagctgccattgctgagctaccacctgtcgatgccgcattgttgagatggccgagggaggtgttcgatctcgatgaataa

SEQ ID NO: 34365 - protein, 421 aa, Muscodor strobelii
  misc_feature: SGI Peptide ID NO. 571875
  misc_feature (201)..(421): NCBI GI: 242811957 Blast Desc: conserved [Talaromyces stipitatus ATCC 10500] gi|218714199|gb|EED13622.1| conserved [Talaromyces stipitatus ATCC 10500]
  misc_feature (200)..(417): NCBI GI: 212544272 Blast Desc: conserved [Penicillium marneffei ATCC 18224] gi|210065259|gb|EEA19353.1| conserved [Penicillium marneffei ATCC 18224]
  misc_feature (168)..(419): NCBI GI: 238838747 Blast Desc: C6 zinc finger domain-containing protein [Microsporum canis CBS 113480]
  misc_feature (168)..(412): NCBI GI: 261196075 Blast Desc: C6 zinc finger domain-containing protein [Ajellomyces dermatitidis SLH14081] gi|239587574|gb|EEQ70217.1| C6 zinc finger domain-containing protein [Ajellomyces dermatitidis SLH14081]
  misc_feature (172)..(421): NCBI GI: 240107047 Blast Desc: Fungal Zn binuclear cluster domain containing protein [Coccidioides posadasii C735 delta SOWgp]
  misc_feature (211)..(419): NCBI GI: 119190923 Blast Desc: CIMG_05509 [Coccidioides immitis RS]
  misc_feature (172)..(419): NCBI GI: 225555951 Blast Desc: C6 zinc finger domain-containing protein [Ajellomyces capsulatus G186AR]
  misc_feature (185)..(412): NCBI GI: 239614525 Blast Desc: C6 transcription factor [Ajellomyces dermatitidis ER-3]
  misc_feature (159)..(419): NCBI GI: 240107360 Blast Desc: Fungal Zn binuclear cluster domain containing protein [Coccidioides posadasii C735 delta SOWgp]
  misc_feature (206)..(416): NCBI GI: 154276104 Blast Desc: [Ajellomyces capsulatus NAm1] gi|150413970|gb|EDN09335.1| [Ajellomyces capsulatus NAm1]
MPVRGGAPAIVGSADIRWADGDGMTKLEISFASVRTGNLAHASSQCEKGMVGTGSTGKEKWALEEHIQKVDICRHRSEICKWLSDDGSSIKQASYQFAAPQRTEKSVLRVTPASPQQKLLPQTHDIFTIILSWVIEKTWEPSRLPVVKPFKTRDSELFDLTRHYPSPQRLDYLLPGLYATQSVYSMHQHALRKHELLPVAYSENIVASRAYRGIEHEITKDNWLSILLFTVSHIMFQFASAAFTADDAFDYLEIFRHVLRGLRGVERQIVNFMEKTNYPRGNNRPYLPTNILPDDTSKESLDNLAKACESHVASKGTRKACDDALKELRVWVAGVEGRPRFWGHFFYWPCAVSDNFVSALVERQPIATIIFIHWCGVMHRAPDAWFLRGWARKTALAAIAELPPVDAALLRWPREVFDLDE

SEQ ID NO: 34366 - DNA, 4731 bp, Muscodor strobelii
  misc_feature: SGI EST ID NO. CUFF.81513.1
  misc_feature: Variant of the nucleotide sequence at SEQ ID NO 34364
cgcagagaagacagaggaagataagtggaaagagacgtttgtagtcttattccccgatgatgccgaagatcaaattccttctccttactacgacacgcacgatagtacgtgggagcaacgcagagaagacgagcttgatcaatttgaaagacatctccgacgcgagcttccacgagttgttaggcgacgtcttgaggagcaggtcttcggcctcctgactccgatcgagagtcaactgagagcacagctcgtcgagattgtccgagacgctcagtcggaaatattccagtcatacagaccacctcgcgacacacaacctatcactggctttgagtcaatgctcagggataatattgacacttcgtctgctggccaagatcttgcgttcccgccaccgctagatgtttccgcattctccgcgccacctattatgaatgcggactttgcgttctcgcatgacatcaacgaacttaccaacgagaatcttgatggatacacgtacacggtatcggattccggctatatatcaaatgccgcgaactttggcgatgttgcatcttttcctgggccatcttctcaattgatgccatatacggcggtctaccccggcgctgctgattttggcgacgatctgttgtggctcgggggaagcaagggggcaacatcaccccatccgatagcagaacaaggaggaacgaaactgagatcaatgaaggaataggcgttgtaaggcttactagcgatgttgaaacctcggtttggactggacagttattccggattgctttgatatggtccttacaagtatgattaattcggtcggccgtttctctagtgcccgcgttggtgctcttagctcttatcggaatcgtcggagacagaactggctagcttgcagataccagtttcgatgaacgggccattcatcgtacactatgcctgttaggggtggcgcgcccgcaattgtgggttcggctgacatccgctgggccgatggtgacgggatgacgaagctggagatttcgttcgcctcagtgcgcactggcaatctagcgcatgcgagttcccaatgcgaaaagggcatggtgggtacgggctcgacaggcaaagaaaaatgggctctcgaagagcacatacaaaaagtcgacatggtagggtccttcacgttgaaagttctcacttgtatcgtaacggcgattaacatcgaccatctcaggttgccaggcatgtaaacgacgtaaagtgcgatgtgaccttcaaagaccaatatgttccagctgccgccacagaagcgaaatatgcaagtggttgtcagacgacggctcatcgattaaacaggctagctaccaatttgctgctccgcaaaggactgagaagtcagtcttgcgagtcacccccgcgtctcctcaacaaaagttgctccctcaaacacatgacattttcaccattatcctatcctgggtaatagaaaaaacatgggagccgtcacgtttgccggtcgtcaaacccttcaagacccgagattcggagctcttcgacctaacacgccactacccttcacctcagaggctcgattatctcttaccaggcctgtatgctacacagtctgtgtatagtatgcatcagcacgcgctgcggaaacatgagcttcttcctgtagcatatagtgagaatatcgtcgcgtcccgagcttacagaggaatcgaacatgagatcacgaaggataattggctctcgatcttactgtttaccgtcagtcacatcatgtttcagttcgcaagcgctgctttcacagcagatgatgcatttgactatctcgagatattcagacacgtccttagaggtctccgtggtgtcgaaaggcaaatcgtcaatttcatggagaagacgaattatccccgagggaataatcgaccgtatctccctaccaacatattacccgacgacacaagcaaggaatctcttgacaacctagcgaaagcctgtgagtctcatgtcgcgtcgaaaggaaccagaaaggcatgcgatgatgccctgaaggagttgcgtgtgtgggtagctggcgttgagggtcgtcctaggttttggggccacttcttctactggccctgtgcagtgtcggataatttcgtgtcggcgcttgtcgagagacaaccaatcgccacaatcatcttcattcactggtgcggagtcatgcatcgcgcacccgacgcgtggttcctgcgcggctgggctcgcaagaccgctttagctgccattgctgagctaccacctgtcgatgccgcattgttgagatggccgagggaggtgttcgatctcgatgaataatgatgatagcaatcggaagaccattgatccggtttagagaattattgacgacgatgtttaaatcactctgatcgaagttcttgatacgccgcgcagcagtgcctctggtagatctttcaaacaaagcccaattctccgaaacgttcgctcttggcttggcacactttcaagtatcaaggatctccttcccaaatacgcgcacgtaatctctttcgacatcaagtcgtcattgtccagatatacagggctgatatgaggtttcatattgtcccactgtattaggacataaggagtgttataagttgctgtcgttcgttcaaacggattgacttgcattacccatccgcggaccaatgcaacatatagctggatgaacccagatgatacttgaccgaaagcattgtgttcgtcaacgactacacaagcgtcttcgaccagacaatcgtactcgggagagtttcgttcggcgtatgacataccaaaaaaatgcgatctttgataagggggcatatatctgactcttgagtcttgagatgcccaagaccaagaaggggcctgatagtccaacaatttcttgcccggtccatctcgaatccatgcaagtcccgtgaatagagactctcgccaaagcccagcgagatattcatcgggtcgatactgacttagtgctttggcgagcgcactgatggccgggagtttatcgcgcccatacgtcagctggcgctgagtgtatttcgggacaagtacgccataccacaaatgttctatctcgtccttcgacataggccaacgatagtctaaggggaactcatcctccagcgggtttttgtcggttcgatatgtcagcggccaaggacgctctttcacgcgagcgggaccaaccaagaatctcttctccagcctatcctcgttttcgtgacagtgtgtgcactgccataggagttgcgagtgggtataatataggattcgtggggatagaaggcgttcctgaagacaccacgcacgcgttgagagtggtccagcatctatgtgccgtattcgagggctgctagttgcacctgtgtttttgaaatagagtgagctttttctgtcgtcatcatattgcgagtcgatgcgaatgacatcccgataatcctctagatgggaggtcgaacgttcgttgaaggccccttgcattgacgagtcactggatgataccacaattgttaatgttgcgcctcgataaatacctcccatacgcgatccttccaatgaccaatcgtcattactatcttgtatgacacaaagagcatcgatccagatgtatctgaatcctaactttcccgtgatcgtcactgcatccctaagcgtggccggtagctcggaccggttgaagccatttaggcgttggacaaaatttactttagtcgtgatccaggcaggatcgaagatctttccccagcaatagcttaatgcaagataactatacgacctattcttggtctcgatcaaagcgagattaggaccaaggcctccttcactagtgtcgactagtcttgaaggcagttctctagcgacctgtcgagcttgttccggctccggcggagggttaccagagtcagtagaccggaatgagctgacatgcctgccttgcccaccaacacaatcggcgagccatgactttgcaacgtcgaaggaattgtcagatcgagtgcttgtaaggtagcgtcgccaagggatcccagacgcaatcgcaggatcttcttcgtttgtgaagtaatctagtggcctatttggatggtgtcaattaataattttcggcagtccaatgtcagccggactcaccatcgtgcaatagcacattttgttttcgtatcgatcacatccgcatccatgccttttattgtaagccgaaaccggttagaaaaggggtatctaaagctactgaaatgccctcgctttatgaatgagcaaaaaccacaagaatctgcagatcgcgctaaatcttcgagtccaagatgttcgtaccctgccgccagtctgtctgcacggatcccacggcaggcggcacaaagaatctgttcgctggtgatatcattaatcgatgtccctagtgtatagtctgtcgtgccttgcgtactggctttctcaatgtcatttcgtgatgatggactcttagctttccctgacgacgacggtaacacaggatgtgagtttctgcgctttatttgcttgactcccgaaatcgattcgccggagtagtcaggtgttgttgtggcatcttttgatgcctcgaaggaacttcttccttcccttcggctttcacgatggtcatgtctctttggccagctcgtctcccacgatatcacatttggctggagcttagacaaggacgtatcttgagcttgtgctttattatattcc

SEQ ID NO: 34367 - DNA, 2394 bp, Muscodor strobelii
  misc_feature: SGI cDNA ID NO. 571876
  misc_feature: Encodes the peptide sequence at SEQ ID NO 34368
atggcgaccttcaggccccaatctccagagcctgcactctcgagcccagcatccgcaggcgtcaagattacaatgccggatcagacgaatccaccaacgccgaggccgccatacctccccattgatccgagcctaggatacttagattggttcccggagccagtatggcctcctctcagcttcccgccacggagcccaaaagtagctgaaggccccatgcgtcggtgtcgtagtggagagacaactgtttcgactgattcgggatatgagtcttgttatccatgcccaaccggcccactgacgagcgaagatctcctgaatcattttcaagggggcgggggccgtacacggaaccagggtgccggtagtttgttggacttcaacgcctcgactacggctaaggtactgtatgatttcgttggccagaacgacaacgaactgtctatcaaagcgggcgacatcattgagattgtgacgaaaaagaagcatggatggtggctagcaaagataggtgcaaaacaagcgtgggtgccggagtcttacgtgcaagctataggccacggcgaaacgcattatgatctcgtcaaccatattccaaattattttcaaactgtgccttcaccagaatatcaatttgacaccgggcgtgtccaagaggcccgtaagcttctgagagctcggagaaaagatcagattacgccgttccaagaatcaacatactcgagcaaacaggccaattccagcaagatgaatgaccctaaggatcacgatagagagaatccacttgatgcgatgctggcaaacggcatgccttataccgattgctcgacaacacaaacatctggtgtctctgatcctctgggactatcagtatcagccttgaatttatctgatacctctatttcgggacgctttactgaaagaaaggagttacatcgatcatcctcaaatctcatagagacttatgtgaaagctaaggaatcctcaccaagcgcaatcagaaatgattccacggagaattccgagtcttctggatccgagtactctggatctgggtctgactcaagtgcgccagacagcaatttcgattggtatgctcatcatcttgatagtaagaaacaagagctcatcgagagcctgatgggagaattcaaggctttgttagatcgcggcttgtctggcataaggagtcatacttctagcgaagcatctcccagtagctcttcaccgtgccacggggtatcctccccagatagcgggaaaatccagcaaagcggggctgaaagaaagaggacagaggaagatgaagatgtcaacgacggaggaggagatgaatcgcatcgtaaaaggataaagctctgcgggatgaataatacagtgttcaggggcctagcttgtccgtattaccgccgggatcctgacagacatcaaaagcacaggtcctgtgccggaccggggtggaaaactgttcatcgcgtgaaggagcatgtctaccgacaacatgccatgccgctttattgccctcgatgtggagagacattcaaggaagatcaccagctcacagctcatcagcggctagctgaaagctgcgagatgaaaaatatcacactgcctgatggggtttctaaggcgcaggagaaaattctacgccggcggtcgaagaagactgcaggcgcagagaagacagaggaagataagtggaaagagacgtttgtagtcttattccccgatgatgccgaagatcaaattccttctccttactacgacacgcacgatagtacgtgggagcaacgcagagaagacgagcttgatcaatttgaaagacatctccgacgcgagcttccacgagttgttaggcgacgtcttgaggagcaggtcttcggcctcctgactccgatcgagagtcaactgagagcacagctcgtcgagattgtccgagacgctcagtcggaaatattccagtcatacagaccacctcgcgacacacaacctatcactggctttgagtcaatgctcagggataatattgacacttcgtctgctggccaagatcttgcgttcccgccaccgctagatgtttccgcattctccgcgccacctattatgaatgcggactttgcgttctcgcatgacatcaacgaacttaccaacgagaatcttgatggatacacgtacacggtatcggattccggctatatatcaaatgccgcgaactttggcgatgttgcatcttttcctgggccatcttctcaattgatgccatatacggcggtctaccccggcgctgctgattttggcgacgatctgttgtggctcgggggaagcaagggggcaacatcaccccatccgatagcagaacaaggaggaacgaaactgagatcaatgaaggaatag

SEQ ID NO: 34368 - protein, 797 aa, Muscodor strobelii
  misc_feature: SGI Peptide ID NO. 571876
  misc_feature (131)..(185): Pfam Id: PF00018 Pfam Desc: SH3 domain
  misc_feature (132)..(185): Pfam Id: PF07653 Pfam Desc: Variant SH3 domain
  misc_feature (439)..(657): NCBI GI: 116194256 Blast Desc: CHGG_03726 [Chaetomium globosum CBS 148.51] gi|88179639|gb|EAQ87107.1| CHGG_03726 [Chaetomium globosum CBS 148.51]
  misc_feature (356)..(657): NCBI GI: 116205235 Blast Desc: CHGG_10501 [Chaetomium globosum CBS 148.51] gi|88176629|gb|EAQ84097.1| CHGG_10501 [Chaetomium globosum CBS 148.51]
  misc_feature (464)..(657): NCBI GI: 171683689 Blast Desc: protein product [Podospora anserina] gi|170941804|emb|CAP67458.1| protein product [Podospora anserina]
  misc_feature (413)..(656): NCBI GI: 145614532 Blast Desc: MGG_04644 [Magnaporthe grisea 70-15] gi|145021440|gb|EDK05569.1| MGG_04644 [Magnaporthe grisea 70-15]
  misc_feature (462)..(667): NCBI GI: 16416005 Blast Desc: conserved [Neurospora crassa]
  misc_feature (462)..(667): NCBI GI: 164424800 Blast Desc: NCU05381 [Neurospora crassa OR74A] gi|157070667|gb|EAA33958.2| [Neurospora crassa OR74A]
  misc_feature (462)..(656): NCBI GI: 171689708 Blast Desc: protein product [Podospora anserina] gi|170944816|emb|CAP70928.1| protein product [Podospora anserina]
  misc_feature (464)..(649): NCBI GI: 46109250 Blast Desc: FG01507.1 [Gibberella zeae PH-1]
  misc_feature (423)..(653): NCBI GI: 169605515 Blast Desc: SNOG_05782 [Phaeosphaeria nodorum SN15] gi|111065726|gb|EAT86846.1| SNOG_05782 [Phaeosphaeria nodorum SN15]
  misc_feature (423)..(586): NCBI GI: 85088369 Blast Desc: NCU10070 [Neurospora crassa OR74A] gi|28919067|gb|EAA28616.1| NCU10070 [Neurospora crassa OR74A]
MATFRPQSPEPALSSPASAGVKITMPDQTNPPTPRPPYLPIDPSLGYLDWFPEPVWPPLSFPPRSPKVAEGPMRRCRSGETTVSTDSGYESCYPCPTGPLTSEDLLNHFQGGGGRTRNQGAGSLLDFNASTTAKVLYDFVGQNDNELSIKAGDIIEIVTKKKHGWWLAKIGAKQAWVPESYVQAIGHGETHYDLVNHIPNYFQTVPSPEYQFDTGRVQEARKLLRARRKDQITPFQESTYSSKQANSSKMNDPKDHDRENPLDAMLANGMPYTDCSTTQTSGVSDPLGLSVSALNLSDTSISGRFTERKELHRSSSNLIETYVKAKESSPSAIRNDSTENSESSGSEYSGSGSDSSAPDSNFDWYAHHLDSKKQELIESLMGEFKALLDRGLSGIRSHTSSEASPSSSSPCHGVSSPDSGKIQQSGAERKRTEEDEDVNDGGGDESHRKRIKLCGMNNTVFRGLACPYYRRDPDRHQKHRSCAGPGWKTVHRVKEHVYRQHAMPLYCPRCGETFKEDHQLTAHQRLAESCEMKNITLPDGVSKAQEKILRRRSKKTAGAEKTEEDKWKETFVVLFPDDAEDQIPSPYYDTHDSTWEQRREDELDQFERHLRRELPRVVRRRLEEQVFGLLTPIESQLRAQLVEIVRDAQSEIFQSYRPPRDTQPITGFESMLRDNIDTSSAGQDLAFPPPLDVSAFSAPPIMNADFAFSHDINELTNENLDGYTYTVSDSGYISNAANFGDVASFPGPSSQLMPYTAVYPGAADFGDDLLWLGGSKGATSPHPIAEQGGTKLRSMKE

SEQ ID NO: 34369 - DNA, 1686 bp, Muscodor strobelii
  misc_feature: SGI EST ID NO. CUFF.81513.3
  misc_feature: Variant of the nucleotide sequence at SEQ ID NO 34367
gcggggtattgcagcaggtttgctaccacaatatacacgactgcgattgaacaatggcgaccttcaggccccaatctccagagcctgcactctcgagcccagcatccgcaggcgtcaagattacaatgccggatcagacgaatccaccaacgccgaggccgccatacctccccattgatccgagcctaggatacttagattggttcccggagccagtatggcctcctctcagcttcccgccacggagcccaaaagtagctgaaggccccatgcgtcggtgtcgtagtggagagacaactgtttcgactgattcgggatatgagtcttgttatccatgcccaaccggcccactgacgagcgaagatctcctgaatcattttcaagggggcgggggccgtacacggaaccagggtgccggtagtttgttggacttcaacgcctcgactacggctaaggtactgtatgatttcgttggccagaacgacaacgaactgtctatcaaagcgggcgacatcattgagattgtgacgaaaaagaagcatggatggtggctagcaaagataggtgcaaaacaagcgtgggtgccggagtcttacgtgcaagctataggccacggcgaaacgcattatgatctcgtcaaccatattccaaattattttcaaactgtgccttcaccagaatatcaatttgacaccgggcgtgtccaagaggcccgtaagcttctgagagctcggagaaaagatcagattacgccgttccaagaatcaacatactcgagcaaacaggccaattccagcaagatgaatgaccctaaggatcacgatagagagaatccacttgatgcgatgctggcaaacggcatgccttataccgattgctcgacaacacaaacatctggtgtctctgatcctctgggactatcagtatcagccttgaatttatctgatacctctatttcgggacgctttactgaaagaaaggagttacatcgatcatcctcaaatctcatagagacttatgtgaaagctaaggaatcctcaccaagcgcaatcagaaatgattccacggagaattccgagtcttctggatccgagtactctggatctgggtctgactcaagtgcgccagacagcaatttcgattggtatgctcatcatcttgatagtaagaaacaagagctcatcgagagcctgatgggagaattcaaggctttgttagatcgcggcttgtctggcataaggagtcatacttctagcgaagcatctcccagtagctcttcaccgtgccacggggtatcctccccagatagcgggaaaatccagcaaagcggggctgaaagaaagaggacagaggaagatgaagatgtcaacgacggaggaggagatgaatcgcatcgtaaaaggataaagctctgcgggatgaataatacagtgttcaggggcctagcttgtccgtattaccgccgggatcctgacagacatcaaaagcacaggtcctgtgccggaccggggtggaaaactgttcatcgcgtgaagtgagtggttatttttctatcacgagcatgcgacaagagcatggatgctaacataacaagcagggagcatgtctaccgacaacatgccatgccgctttattgccctcgatgtggagagacattcaaggaagatcaccagctcacagctcatc

SEQ ID NO: 34370 - DNA, 2046 bp, Muscodor strobelii
  misc_feature: SGI cDNA ID NO. 571877
  misc_feature: Encodes the peptide sequence at SEQ ID NO 34371
atggcgaccttcaggccccaatctccagagcctgcactctcgagcccagcatccgcaggcgtcaagattacaatgccggatcagacgaatccaccaacgccgaggccgccatacctccccattgatccgagcctaggatacttagattggttcccggagccagtatggcctcctctcagcttcccgccacggagcccaaaagtagctgaaggccccatgcgtcggtgtcgtagtggagagacaactgtttcgactgattcgggatatgagtcttgttatccatgcccaaccggcccactgacgagcgaagatctcctgaatcattttcaagggggcgggggccgtacacggaaccagggtgccggtagtttgttggacttcaacgcctcgactacggctaaggtactgtatgatttcgttggccagaacgacaacgaactgtctatcaaagcgggcgacatcattgagattgtgacgaaaaagaagcatggatggtggctagcaaagataggtgcaaaacaagcgtgggtgccggagtcttacgtgcaagctataggccacggcgaaacgcattatgatctcgtcaaccatattccaaattattttcaaactgtgccttcaccagaatatcaatttgacaccgggcgtgtccaagaggcccgtaagcttctgagagctcggagaaaagatcagattacgccgttccaagaatcaacatactcgagcaaacaggccaattccagcaagatgaatgaccctaaggatcacgatagagagaatccacttgatgcgatgctggcaaacggcatgccttataccgattgctcgacaacacaaacatctggtgtctctgatcctctgggactatcagtatcagccttgaatttatctgatacctctatttcgggacgctttactgaaagaaaggagttacatcgatcatcctcaaatctcatagagacttatgtgaaagctaaggaatcctcaccaagcgcaatcagaaatgattccacggagaattccgagtcttctggatccgagtactctggatctgggtctgactcaagtgcgccagacagcaatttcgattggtcctgtgccggaccggggtggaaaactgttcatcgcgtgaaggagcatgtctaccgacaacatgccatgccgctttattgccctcgatgtggagagacattcaaggaagatcaccagctcacagctcatcagcggctagctgaaagctgcgagatgaaaaatatcacactgcctgatggggtttctaaggcgcaggagaaaattctacgccggcggtcgaagaagactgcaggcgcagagaagacagaggaagataagtggaaagagacgtttgtagtcttattccccgatgatgccgaagatcaaattccttctccttactacgacacgcacgatagtacgtgggagcaacgcagagaagacgagcttgatcaatttgaaagacatctccgacgcgagcttccacgagttgttaggcgacgtcttgaggagcaggtcttcggcctcctgactccgatcgagagtcaactgagagcacagctcgtcgagattgtccgagacgctcagtcggaaatattccagtcatacagaccacctcgcgacacacaacctatcactggctttgagtcaatgctcagggataatattgacacttcgtctgctggccaagatcttgcgttcccgccaccgctagatgtttccgcattctccgcgccacctattatgaatgcggactttgcgttctcgcatgacatcaacgaacttaccaacgagaatcttgatggatacacgtacacggtatcggattccggctatatatcaaatgccgcgaactttggcgatgttgcatcttttcctgggccatcttctcaattgatgccatatacggcggtctaccccggcgctgctgattttggcgacgatctgttgtggctcgggggaagcaagggggcaacatcaccccatccgatagcagaacaaggaggaacgaaactgagatcaatgaaggaatag

SEQ ID NO: 34371 - protein, 681 aa, Muscodor strobelii
  misc_feature: SGI Peptide ID NO. 571877
  misc_feature (131)..(185): Pfam Id: PF00018 Pfam Desc: SH3 domain
  misc_feature (132)..(185): Pfam Id: PF07653 Pfam Desc: Variant SH3 domain
  misc_feature (365)..(541): NCBI GI: 116194256 Blast Desc: CHGG_03726 [Chaetomium globosum CBS 148.51] gi|88179639|gb|EAQ87107.1| CHGG_03726 [Chaetomium globosum CBS 148.51]
  misc_feature (365)..(541): NCBI GI: 116205235 Blast Desc: CHGG_10501 [Chaetomium globosum CBS 148.51] gi|88176629|gb|EAQ84097.1| CHGG_10501 [Chaetomium globosum CBS 148.51]
  misc_feature (365)..(540): NCBI GI: 145614532 Blast Desc: MGG_04644 [Magnaporthe grisea 70-15] gi|145021440|gb|EDK05569.1| MGG_04644 [Magnaporthe grisea 70-15]
  misc_feature (365)..(541): NCBI GI: 171683689 Blast Desc: protein product [Podospora anserina] gi|170941804|emb|CAP67458.1| protein product [Podospora anserina]
  misc_feature (365)..(551): NCBI GI: 164424800 Blast Desc: NCU05381 [Neurospora crassa OR74A] gi|157070667|gb|EAA33958.2| [Neurospora crassa OR74A]
  misc_feature (365)..(540): NCBI GI: 171689708 Blast Desc: protein product [Podospora anserina] gi|170944816|emb|CAP70928.1| protein product [Podospora anserina]
  misc_feature (365)..(551): NCBI GI: 16416005 Blast Desc: conserved [Neurospora crassa]
  misc_feature (365)..(533): NCBI GI: 46109250 Blast Desc: FG01507.1 [Gibberella zeae PH-1]
  misc_feature (365)..(537): NCBI GI: 169605515 Blast Desc: SNOG_05782 [Phaeosphaeria nodorum SN15] gi|111065726|gb|EAT86846.1| SNOG_05782 [Phaeosphaeria nodorum SN15]
  misc_feature (319)..(523): NCBI GI: 256724972 Blast Desc: [Nectria haematococca mpVI 77-13-4]
MATFRPQSPEPALSSPASAGVKITMPDQTNPPTPRPPYLPIDPSLGYLDWFPEPVWPPLSFPPRSPKVAEGPMRRCRSGETTVSTDSGYESCYPCPTGPLTSEDLLNHFQGGGGRTRNQGAGSLLDFNASTTAKVLYDFVGQNDNELSIKAGDIIEIVTKKKHGWWLAKIGAKQAWVPESYVQAIGHGETHYDLVNHIPNYFQTVPSPEYQFDTGRVQEARKLLRARRKDQITPFQESTYSSKQANSSKMNDPKDHDRENPLDAMLANGMPYTDCSTTQTSGVSDPLGLSVSALNLSDTSISGRFTERKELHRSSSNLIETYVKAKESSPSAIRNDSTENSESSGSEYSGSGSDSSAPDSNFDWSCAGPGWKTVHRVKEHVYRQHAMPLYCPRCGETFKEDHQLTAHQRLAESCEMKNITLPDGVSKAQEKILRRRSKKTAGAEKTEEDKWKETFVVLFPDDAEDQIPSPYYDTHDSTWEQRREDELDQFERHLRRELPRVVRRRLEEQVFGLLTPIESQLRAQLVEIVRDAQSEIFQSYRPPRDTQPITGFESMLRDNIDTSSAGQDLAFPPPLDVSAFSAPPIMNADFAFSHDINELTNENLDGYTYTVSDSGYISNAANFGDVASFPGPSSQLMPYTAVYPGAADFGDDLLWLGGSKGATSPHPIAEQGGTKLRSMKE

SEQ ID NO: 34372 - DNA, 1686 bp, Muscodor strobelii; identical to SEQ ID NO: 34369
  misc_feature: SGI EST ID NO. CUFF.81513.3
  misc_feature: Variant of the nucleotide sequence at SEQ ID NO 34370

SEQ ID NO: 34373 - DNA, 1386 bp, Muscodor strobelii
  misc_feature: SGI cDNA ID NO. 571878
  misc_feature: Encodes the peptide sequence at SEQ ID NO 34374
atgctcgacgaaaacttcccaacttttttcttcaagccgtcgcccgacagctacctctccaccatcgtagaattcaccgaaaatggctccgagctagagtctaaatacaccctcgacaaggccgaccccagtctccctgctgaaaagaacagatactcgatatcgctgggcgaccctcactcggggcacgtcgccaatcagccagacaggaaaaacatagtctacgccgaagtcgtgatcgagcccgagttcacacagcccacgctctccgccgccgagatccgtcagaatggcggtgtcccgcctccccccgtgcccatgatccctgatggcttcacagttcagctgcgcaacccagaccgccccgtcgttataaaagcagagaagagcgcgtggatgggaaaggagtcttttgagttcgagataccgcaggttgcattcccacggcctaccgggtcgcagatcgatcgtcaacagagcaaccccagcgcgagcggctccggcataaaatacatgttcaagtggagacgagagaagttctccaagcaggccacatgctatctgactgggcggaacatcagtggacgcagagacaaagaaccagacatcacagtagctatatacaattatgggaagaagccatccttagccttgtacacgcccaatttcccacggttcgatgtcgacgaccctaaagggttggaggctgttctggtcttgagcgcagaggtcattcgcgaaatctacctcgtgcccaaccgggactcgttcaacttaaatggggcagccccgccgaacaagcgcaagaactccaagccgatcccaaacggaagctcggggtccccgagaccggatgcgtacacaatgacttcggggattggtaacctcacgccaggcggaaaatccggctctcccattgctcagcagtccatccctcccccagctagtcgcttgacttcgcaggaagaacgagaacgggagaagagagacaaagccgagcagaaacgtatcaagaaaatgcttgacgaggaagaaaaagagcagaagaggcgcgatgcagaagtcgcaaaagagacggagaggctgagaaaggagttcgggatggcgggacaggattatcgcccaccaaatctacctcctagacccggtccaaatccgaataactacccagggccaagtcgcccaacactccatgtccagacgccccaacccccaataagacccatgagtgcagagccgagacctcaagctggcgggcatggaagctggtttggcggcccgtcgatggggccctcattcttccctggctctcagcccaaacctgctcgcaggagaggagggagcggagacgggaagatccataagaagaaaagcaccttcttctag

SEQ ID NO: 34374 - protein, 461 aa, Muscodor strobelii
  misc_feature: SGI Peptide ID NO. 571878
  misc_feature (1)..(390): NCBI GI: 171686196 Blast Desc: protein product [Podospora anserina] gi|170943059|emb|CAP68712.1| protein product [Podospora anserina]
  misc_feature (1)..(461): NCBI GI: 154309224 Blast Desc: BC1G_07506 [Botryotinia fuckeliana B05.10] gi|150852330|gb|EDN27522.1| BC1G_07506 [Botryotinia fuckeliana B05.10]
  misc_feature (1)..(427): NCBI GI: 256726136 Blast Desc: NECHADRAFT_70270 [Nectria haematococca mpVI 77-13-4]
  misc_feature (1)..(451): NCBI GI: 261359281 Blast Desc: conserved [Verticillium albo-atrum VaMs.102]
  misc_feature (1)..(461): NCBI GI: 46116512 Blast Desc: FG04098.1 [Gibberella zeae PH-1]
  misc_feature (1)..(374): NCBI GI: 169769961 Blast Desc: [Aspergillus oryzae RIB40] gi|238487702|ref|XP_002375089.1| conserved [Aspergillus flavus NRRL3357] gi|83767309|dbj|BAE57448.1| protein product oryzae]
  misc_feature (1)..(369): NCBI GI: 156058364 Blast Desc: SS1G_03193 [Sclerotinia sclerotiorum 1980] gi|154700981|gb|EDO00720.1| SS1G_03193 [Sclerotinia sclerotiorum 1980]
  misc_feature (1)..(413): NCBI GI: 85081725 Blast Desc: NCU00454 [Neurospora crassa OR74A] gi|28917850|gb|EAA27537.1| [Neurospora crassa OR74A]
  misc_feature (1)..(367): NCBI GI: 67522829 Blast Desc: AN1871.2 [Aspergillus nidulans FGSC A4] gi|40745880|gb|EAA65036.1| AN1871.2 [Aspergillus nidulans FGSC A4] gi|259487224|tpe|CBF85729.1| TPA: conserved [Aspergillus FGSC
  misc_feature (1)..(374): NCBI GI: 119480095 Blast Desc: NFIA_081230 [Neosartorya fischeri NRRL 181] gi|119408230|gb|EAW18179.1| conserved [Neosartorya fischeri NRRL 181]
MLDENFPTFFFKPSPDSYLSTIVEFTENGSELESKYTLDKADPSLPAEKNRYSISLGDPHSGHVANQPDRKNIVYAEVVIEPEFTQPTLSAAEIRQNGGVPPPPVPMIPDGFTVQLRNPDRPVVIKAEKSAWMGKESFEFEIPQVAFPRPTGSQIDRQQSNPSASGSGIKYMFKWRREKFSKQATCYLTGRNISGRRDKEPDITVAIYNYGKKPSLALYTPNFPRFDVDDPKGLEAVLVLSAEVIREIYLVPNRDSFNLNGAAPPNKRKNSKPIPNGSSGSPRPDAYTMTSGIGNLTPGGKSGSPIAQQSIPPPASRLTSQEEREREKRDKAEQKRIKKMLDEEEKEQKRRDAEVAKETERLRKEFGMAGQDYRPPNLPPRPGPNPNNYPGPSRPTLHVQTPQPPIRPMSAEPRPQAGGHGSWFGGPSMGPSFFPGSQPKPARRRGGSGDGKIHKKKSTFF

SEQ ID NO: 34375 - DNA, 1953 bp, Muscodor strobelii
  misc_feature: SGI EST ID NO. CUFF.81525.0
  misc_feature: Variant of the nucleotide sequence at SEQ ID NO 34373
tgacctcagccacgtccgcaaatgcgcaagctcggcgcaaagtgcatcgtcacccacctttttatcagctgcacgtgtcgcatcccacctctcataagtattgatgagtccgcagctgtcgctttgtatccaacgggatgatcattattcatactctctccatccaatgatatatagaaatagacaccatcaccaaatccattcctccttatttcttttgtctttcattctcgcgcgttcttagtgcaccatccccgagacgctagaagacggggtgacgtcaagtctcacgttcccaccgcgtccgactggaccaaatcactacactcttgaatacctcacgacgacgtcaatatgctcgacgaaaacttcccaacttttttcttcaagccgtcgcccgacagctacctctccaccatcgtagaattcaccgaaaatggctccgagctagagtctaaatacaccctcgacaaggccgaccccagtctccctgctgaaaagaacagatactcgatatcgctgggcgaccctcactcggggcacgtcgccaatcagccagacaggaaaaacatagtctacgccgaagtcgtgatcgagcccgagttcacacagcccacgctctccgccgccgagatccgtcagaatggcggtgtcccgcctccccccgtgcccatgatccctgatggcttcacagttcagctgcgcaacccagaccgccccgtcgttataaaagcagagaagagcgcgtggatgggaaaggagtcttttgagttcgagataccgcaggttgcattcccacggcctaccgggtcgcagatcgatcgtcaacagagcaaccccagcgcgagcggctccggcataaaatacatgttcaagtggagacgagagaagttctccaagcaggccacatgctatctgactgggcggaacatcagtggacgcagagacaaagaaccagacatcacagtagctatatacaattatgggaagaagccatccttagccttgtacacgcccaatttcccacggttcgatgtcgacgaccctaaagggttggaggctgttctggtcttgagcgcagaggtcattcgcgaaatctacctcgtgcccaaccgggactcgttcaacttaaatggggcagccccgccgaacaagcgcaagaactccaagccgatcccaaacggaagctcggggtccccgagaccggatgcgtacacaatgacttcggggattggtaacctcacgccaggcggaaaatccggctctcccattgctcagcagtccatccctcccccagctagtcgcttgacttcgcaggaagaacgagaacgggagaagagagacaaagccgagcagaaacgtatcaagaaaatgcttgacgaggaagaaaaagagcagaagaggcgcgatgcagaagtcgcaaaagagacggagaggctgagaaaggagttcgggatggcgggacaggattatcgcccaccaaatctacctcctagacccggtccaaatccgaataactacccagggccaagtcgcccaacactccatgtccagacgccccaacccccaataagacccatgagtgcagagccgagacctcaagctggcgggcatggaagctggtttggcggcccgtcgatggggccctcattcttccctggctctcagcccaaacctgctcgcaggagaggagggagcggagacgggaagatccataagaagaaaagcaccttcttctagtgctagaggcgcaaaagaacatctcagtctggaggcatttgtttgagcgacttgaactgttttgggagttgactgcttgcttgatttgctgatacccatggtactatataaatctcaattttccgttgttccttcgctccttgtcgctttatgattgtgtgatatcgttgacttcatctcgctttgagtatctaggcgtgaccgaaatatcag

SEQ ID NO: 34376 - DNA, 3375 bp, Muscodor strobelii
  misc_feature: SGI cDNA ID NO. 571879
  misc_feature: Encodes the peptide sequence at SEQ ID NO 34377
atgcccaagcagttcctcaaaaagtgcgtgatcgcaatcgcaggaaatctcaacgatcctggtgaccgtcgttgggacgaagagaaagtccgcggttgggtaaatacatatggtggcactttcacaagcaccgtcgacccaaaggttacgcacctgctgtgcaccgaatcggatgccaagaagaagacggcacgagtcaagactgccttgaagcagaaggacaccttcttggtgacccgctactggcttgaggattgcattgcgaaaaaatctctgatcaaagccaagaattccgagtacgatctcaaggctgaattagcagctcaacaagcaaagaagcggaagtcggagaaagacgccaaatcaagcgcgcttacagacagttatgtcgatgaacgctattggaacgtctatcgcgatatcacattctttgagcaccaggtaacgctcactctcaatgatcccgaggctggacatgagggacaaaaatacgttgtcaccttatgggaatccaaagcgaagccttacagctacctcctcacttccttactctacaataaaaagggtgcaaagcctattcagtggcgcgcgaccgcagctcctacgtccctcgagaagagttttgatgggttcaaaaaattcttcaaggctaagacagggatcaaatgggatgagcgactcgacaagatagagagctcgggcaagtttaagtattcgccacctaccaaaggaaagccagtcggtctagtaaatggaaggctcgccacaagcatcgacgagacacccagccccagtacttactttgatggtctcctgagtaatactggcgaaacagaacagcaatttgaagacgacgacaccaccgagcctcctgccaagcgagctcgactggacacagaggagacggtcaaacattcacgcctcggtacgccaaacacgaccacaagcttggctcatcgtcctcactctgtaaactcgcgcaacgagctctcgagaactcatacgccagtgcatcgagaagcaatctttgaaagacgaccgaatgacaaagcaatcatgcactcgcccccttcaactcgccacgacaatatcccgaacactgccaccagcccgagcgagccactcactcgggaggtcgaggttgatcgcagctattcctctgggcccacgcctacagctcaacagcaagaacaaaacgtgccactttctgcatctgatcatgatcaggacatggctgagttgtttggtaacgtagaggatgactatactttagactcatgtgagccacaattccatgacgcaagcattgatcccagtcacccccagccgccaccgttacaacaacagcccgatgcttccaacaccgcaattgattttgataagtttgataaggatatggatgacgccttggcctctctgatgcaaattccggtcgtcacaactcctgagctacaaggtcaaaacactcaaactaccttagctcccacttacgagtctgcagaacctgcctcgcaacagcagaatgctccatccccggcgcttgactacggccaagatctagatgatctattctacgggatggaagacaactttgttgcagaccctcaggaggaaatcatgcaaaacttgaatgcatattcaagtcaatttcatcaggatcaagcctcaagccaatacatgcaagcagactccactctcccgagcttcgatgagaacgagatagatgatttgtgggcttcagcaaccgagaatcccacaggagatctcaatgcctggaatgccgaggttgggaatgccaactatactcagcctttcgggatgccggagacagccccacagcaggaacccctgaatgcatcacaatcgacgttcaactttaatgaccctgacaacatttacggcacactagcgcaaccccctattttggattcccaagcgccacaagtccaacgcgcaattaccgatgatgaacgtcctcccgagcccgaacaaccagacttgctcccagaaccattcgttcccgagaacgaagttcgtgaggcagatgaagatatggagagcctattcggagcaccacaaggggaggatgctgtcgagagtgataagcaagagatccaagatgcgaatatcgatgcttatgttcccgatggatacgcacccgcaaattcgcaacaagagcagcttgatgtcgaaaacgagacatcggcaagcgacaaggggctggaggccttgttcgaagcagcggaggacgatactatgatggagcactatgaacctgagacccaggaagcaaggtctgaaacaaaataccccggtgcctacgtagagggtgacataccacaagaccagttaccgattgagaatgaagaattcattgatgatgagaacttggaagaccttttcggcccggtggattatggagaggttggacaagctgatgcccctaacgaccaacatatggatctcaatctcgactatgctggagagtctgctcaatcgaacacctaccagaccgaagcacaacccgagcttgagggttcaggggatgaggagtggatggagaacttcctcagcgcgacacaagacaacaatgtcgatcatcaaggcagcgcagttacgtctggagtagacatagaacacgaacaagcagcgacacaagaagacacgatgcttctcgacgatgaaaagccactcatcgacggtagcacagaagcaccacccaatgcaactatggagaatggcgagatcatgccagatgaaacaaaatcagaagacttggacgataaggaggaccaacttttcgaggacgtctcacctgtgatggcacaggccgacgtcccacagcctcacctccaacaacccgacgcacagccgccagatattcaagaaacacgcacaccaccatcaccatcctacatccaagacttcaacccgcaactcccagaagtctaccgccaacaactaatccacgagcgcacgaaaccagacaacgaagacgcatacttcgagtccatactccactcactcaacccagctctcctgtcccaactaaccccaccccggtcccccaaccaccaaggcgcctcaccatcatcatcctcttcctcatcaaccatatcaacaaactccgacatccaacccgcagatcccggtcccgaagtccgcgccgccggactcctagctctttcgatttatagggagcatttccgcggtgtcatgatcagtgatgataacgaacgggatttgatagccgctgtgcagagggagatggcggaggagaaggctagaattgagatggagatgcaggatgagagtgacgaggatgtggagtgggaggattgtcttgctgaggagttgggtggggagagtgattaa

SEQ ID NO: 34377 - protein, 1124 aa, Muscodor strobelii
  misc_feature: SGI Peptide ID NO. 571879
  misc_feature (1)..(87): Pfam Id: PF00533 Pfam Desc: BRCA1 C Terminus (BRCT) domain
  misc_feature (1)..(271): NCBI GI: 46122325 Blast Desc: FG05540.1 [Gibberella zeae PH-1]
  misc_feature (2)..(250): NCBI GI: 85079721 Blast Desc: NCU00185 [Neurospora crassa OR74A] gi|28917471|gb|EAA27172.1| [Neurospora crassa OR74A]
  misc_feature (1)..(248): NCBI GI: 256729690 Blast Desc: NECHADRAFT_25201 [Nectria haematococca mpVI 77-13-4]
  misc_feature (3)..(250): NCBI GI: 156040659 Blast Desc: [Sclerotinia sclerotiorum 1980] gi|154696402|gb|EDN96140.1| [Sclerotinia sclerotiorum 1980]
  misc_feature (1)..(253): NCBI GI: 261358144 Blast Desc: [Verticillium albo-atrum VaMs.102]
  misc_feature (1)..(226): NCBI GI: 240109731 Blast Desc: BRCA1 C Terminus (BRCT) domain containing protein [Coccidioides posadasii C735 delta SOWgp]
  misc_feature (135)..(248): NCBI GI: 116191773 Blast Desc: CHGG_05604 [Chaetomium globosum CBS 148.51] gi|88181517|gb|EAQ88985.1| CHGG_05604 [Chaetomium globosum CBS 148.51]
  misc_feature (3)..(248): NCBI GI: 145608702 Blast Desc: MGG_06436 [Magnaporthe grisea 70-15] gi|145016148|gb|EDK00638.1| MGG_06436 [Magnaporthe grisea 70-15]
  misc_feature (1)..(226): NCBI GI: 119183903 Blast Desc: CIMG_06825 [Coccidioides immitis RS]
  misc_feature (12)..(242): NCBI GI: 258570659 Blast Desc: anthranilate synthase component II [Uncinocarpus reesii 1704] gi|237904403|gb|EEP78804.1| anthranilate synthase component II [Uncinocarpus reesii 1704]
MPKQFLKKCVIAIAGNLNDPGDRRWDEEKVRGWVNTYGGTFTSTVDPKVTHLLCTESDAKKKTARVKTALKQKDTFLVTRYWLEDCIAKKSLIKAKNSEYDLKAELAAQQAKKRKSEKDAKSSALTDSYVDERYWNVYRDITFFEHQVTLTLNDPEAGHEGQKYVVTLWESKAKPYSYLLTSLLYNKKGAKPIQWRATAAPTSLEKSFDGFKKFFKAKTGIKWDERLDKIESSGKFKYSPPTKGKPVGLVNGRLATSIDETPSPSTYFDGLLSNTGETEQQFEDDDTTEPPAKRARLDTEETVKHSRLGTPNTTTSLAHRPHSVNSRNELSRTHTPVHREAIFERRPNDKAIMHSPPSTRHDNIPNTATSPSEPLTREVEVDRSYSSGPTPTAQQQEQNVPLSASDHDQDMAELFGNVEDDYTLDSCEPQFHDASIDPSHPQPPPLQQQPDASNTAIDFDKFDKDMDDALASLMQIPVVTTPELQGQNTQTTLAPTYESAEPASQQQNAPSPALDYGQDLDDLFYGMEDNFVADPQEEIMQNLNAYSSQFHQDQASSQYMQADSTLPSFDENEIDDLWASATENPTGDLNAWNAEVGNANYTQPFGMPETAPQQEPLNASQSTFNFNDPDNIYGTLAQPPILDSQAPQVQRAITDDERPPEPEQPDLLPEPFVPENEVREADEDMESLFGAPQGEDAVESDKQEIQDANIDAYVPDGYAPANSQQEQLDVENETSASDKGLEALFEAAEDDTMMEHYEPETQEARSETKYPGAYVEGDIPQDQLPIENEEFIDDENLEDLFGPVDYGEVGQADAPNDQHMDLNLDYAGESAQSNTYQTEAQPELEGSGDEEWMENFLSATQDNNVDHQGSAVTSGVDIEHEQAATQEDTMLLDDEKPLIDGSTEAPPNATMENGEIMPDETKSEDLDDKEDQLFEDVSPVMAQADVPQPHLQQPDAQPPDIQETRTPPSPSYIQDFNPQLPEVYRQQLIHERTKPDNEDAYFESILHSLNPALLSQLTPPRSPNHQGASPSSSSSSSTISTNSDIQPADPGPEVRAAGLLALSIYREHFRGVMISDDNERDLIAAVQREMAEEKARIEMEMQDESDEDVEWEDCLAEELGGESD

SEQ ID NO: 34378 - DNA, 681 bp, Muscodor strobelii
  misc_feature: SGI cDNA ID NO. 571880
  misc_feature: Reduced expression when VOC is produced
  misc_feature: Encodes the peptide sequence at SEQ ID NO 34379
atggagcactgcgacgagcaacagtcctgcgtggaccatggccaagttatcgagcagtcagaggcacaacactctgccatcaatgaatctcaaactccctccatttccgagaagacgacaatcctttcacctgaactcccggcacatgtctcccctgcagacactcggaaacaagacctgacaacatcaacacctacgccagaatcgccggaaaaatgccccatgtacagcctgcaatttttcgtcgtcgaagtccttttacaaatactcctattcctccccataatcctcatctccaaattcggattcttccgcggcggcgtgatctcgctgagtctctacgcgatcctgtactaccgaaacaaggacaacaaactacccatcgatgaagaaaagagcaaagcaatcgcgtgcatcaacatgggtgtcttcctgatcatcctcttcgtttcgaacgcctataaagactatcagagcgtcatagaagacttgcaggtacctgatgatgctggctacaataacatcacgaggaacataattgttgtcggggcttatatacagatcgtggcacctgttgtatgcgtcggcttggcgattgcgacgatgtatacgggacataaggacatcttccaactgaaaaaggaccgtgcgcaggctttggctgagaaggcaaatgtgtga

SEQ ID NO: 34379 - protein, 226 aa, Muscodor strobelii
  misc_feature: SGI Peptide ID NO. 571880
  misc_feature: Useful for introducing or modulating the production of volatile compounds
MEHCDEQQSCVDHGQVIEQSEAQHSAINESQTPSISEKTTILSPELPAHVSPADTRKQDLTTSTPTPESPEKCPMYSLQFFVVEVLLQILLFLPIILISKFGFFRGGVISLSLYAILYYRNKDNKLPIDEEKSKAIACINMGVFLIILFVSNAYKDYQSVIEDLQVPDDAGYNNITRNIIVVGAYIQIVAPVVCVGLAIATMYTGHKDIFQLKKDRAQALAEKANV

SEQ ID NO: 34380 - DNA, 1106 bp, Muscodor strobelii
  misc_feature: SGI EST ID NO. CUFF.81537.0
  misc_feature: Variant of the nucleotide sequence at SEQ ID NO 34378
tcggctattatggtgtcatatgagcttagcaagcttgctagatctcccaagttaaactctattacacgctaggcattattatatgaggcgacattaatcttcacatcgtatgatttttgcttcatctatcctcattatcaataattttgtcaatcaggctgttaccttcatctatctcaacgtcaactaccattcgccccaggcctagccttgcgtattcctcgcgccggacgcaatagtatcacacgtagagacggtatattgatgatcaacctctcaacatggagcactgcgacgagcaacagtcctgcgtggaccatggccaagttatcgagcagtcagaggcacaacactctgccatcaatgaatctcaaactccctccatttccgagaagacgacaatcctttcacctgaactcccggcacatgtctcccctgcagacactcggaaacaagacctgacaacatcaacacctacgccagaatcgccggaaaaatgccccatgtacagcctgcaatttttcgtcgtcgaagtccttttacaaatactcctattcctccccataatcctcatctccaaattcggattcttccgcggcggcgtgatctcgctgagtctctacgcgatcctgtactaccgaaacaaggacaacaaactacccatcgatgaagaaaagagcaaagcaatcgcgtgcatcaacatgggtgtcttcctgatcatcctcttcgtttcgaacgcctataaagactatcagagcgtcatagaagacttgcaggtacctgatgatgctggctacaataacatcacgaggaacataattgttgtcggggcttatatacagatcgtggcacctgttgtatgcgtcggcttggcgattgcgacgatgtatacgggacataaggacatcttccaactgaaaaaggaccgtgcgcaggctttggctgagaaggcaaatgtgtgattgacgttagtcagcgatggagatttagtcaggctgatagtctgaaaatatgaaaacacaaatgccgtgtatttcaaaataccatcactgatacgtggcaacggcaaagaaacgggcagttataaatgtgcaacaagaagtccc

SEQ ID NO: 34381 - DNA, 1983 bp, Muscodor strobelii
  misc_feature: SGI cDNA ID NO. 571881
  misc_feature: Encodes the peptide sequence at SEQ ID NO 34382
atgctctcccctcggatcttcggacacacctccacctatctctactcctacgtcaagcgatttttttatcgcatcatcgactacgacgccatacttctctgccacatctttctcgagtatttcttcatcgagttcatgaactcagccttgtacaaatccgtgcccttcaagaaaaagtccaaaaaggatcagatccgagttcttgaggtcctgtctggagaatacgatgagccactttcgtgcaagttgtccgtcgtagctattggttctgtaacatatgatgccctatcttatcgttggaaaggcacacaagactcgaaaatccgcatcaacaagaccaattgtctaatccaggagaatctagcgcttgctcttcgatacctccgccaacctcacgcctcgcgctatatttggtgtgatgctatttgcatcaatcagaacacgaagtccgacgagaaggagtctcagatgatcctcatgggaaagatttatcgctgtgcagggagcgtgttggcttggctcggccctccaacgcttcgaagcaacagagcgatggagtactttgccaaatatcctggacccgagtggtgcggcggtcttccgcttcaaattcaacaagagctgagttttcaaaatcatcactcgtggtggctggattttggcgattctctgctcagctcagattggtggggtcgtgcttggatggtgcaagagatgatcctcgcgaaaaacttgatcttcgtttgtggaaactatcaaatgcctgactatgtgtttttcagtattgctcagtttgggacgcaacttaatcgccagattttcactcaacccgtgcaacaaggcgagacgtctttacggcagacggcatggatgatgatgcatcattgtcgaatagttcgccggggcggttataacgacgaatttagaataaccctagaggagatgggatatggagaagatggcgtcgggtggccgcggagtgacgtgggtttctatatcggccagtttcacggttttgcctccacggagccgaaagacagagtctatgcataccttgctctcgacgatgactgccccatccaaccgagcaagctgaccaaagagatgccattcgcccagctctaccagaaggtcgccgagtatgtcctaacgtcgtcggggtaccttgatttcatgtttctcggtggaacccacccaagagaaccggggctcccaagctgggtaccagacctgaacaagccatacgggacaaatacagctctgcccccagccaaccttggattgagaactgccttccacgcatcaaattcgcgtaaattcgagggtaacttcgacgacttcggcacacagcgcgttctgatgacaatggcccgtcgtgttggcacaatcgaggaggtgacagatgtgcacagatacgataacgaggaagaatgtatcactcggtcacaaatactggcaggctggggcgaatcaccacgcaatgacttaaaatatcagttatatgttggcaagcccagtcagacccgttacaccgcgctcagtcacaccctagtactgaacctcaactatgagcgccgcccctgctcagagtccgaaggattctttgctgatgtgtatgactacgatgtgccgccagactacgagagaggcaaccctgtgctcctccaacataaggcgcgcgcatttggtctcgactgggtattatcgaaatacaagtataggttgggccgacgaacagcacttcttaacaatggattcataggaatggtaccgaaggagtgcctaccagagaaacggggccagtcaacatatgaggtgtatgtagtgccaggagcttcaatgccgatggtgctgcgtcgtctacaagcaacgaatggcaaggctctatttgagttgattggtgaatgctacgtgcacggggtaatggatggcgaagcctataagagcacggcgtttcgagacgaaccgataatattgatctga

SEQ ID NO: 34382 - protein, 660 aa, Muscodor strobelii
  misc_feature: SGI Peptide ID NO. 571881
  misc_feature (93)..(238): Pfam Id: PF06985 Pfam Desc: Heterokaryon incompatibility protein (HET)
  misc_feature (93)..(190): Pfam Id: PF06985 Pfam Desc: Heterokaryon incompatibility protein (HET)
  misc_feature (60)..(647): NCBI GI: 256721799 Blast Desc: NECHADRAFT_53281 [Nectria haematococca mpVI 77-13-4]
  misc_feature (62)..(412): NCBI GI: 256722665 Blast Desc: NECHADRAFT_87188 [Nectria haematococca mpVI 77-13-4]
  misc_feature (61)..(513): NCBI GI: 154305655 Blast Desc: BC1G_07642 [Botryotinia fuckeliana B05.10] gi|150853161|gb|EDN28353.1| BC1G_07642 [Botryotinia fuckeliana B05.10]
  misc_feature (46)..(413): NCBI GI: 171679799 Blast Desc: protein product [Podospora anserina] gi|170939525|emb|CAP64753.1| protein product [Podospora anserina]
  misc_feature (62)..(659): NCBI GI: 119179507 Blast Desc: CIMG_08498 [Coccidioides immitis RS]
  misc_feature (46)..(657): NCBI GI: 256730052 Blast Desc: NECHADRAFT_82659 [Nectria haematococca mpVI 77-13-4]
  misc_feature (61)..(389): NCBI GI: 169774653 Blast Desc: [Aspergillus oryzae RIB40] gi|83769657|dbj|BAE59792.1| protein product [Aspergillus oryzae]
  misc_feature (61)..(389): NCBI GI: 238496765 Blast Desc: conserved [Aspergillus flavus NRRL3357] gi|220694498|gb|EED50842.1| conserved [Aspergillus flavus NRRL3357]
  misc_feature (62)..(646): NCBI GI: 238487256 Blast Desc: conserved [Aspergillus flavus NRRL3357] gi|220699745|gb|EED56084.1| conserved [Aspergillus flavus NRRL3357]
  misc_feature (49)..(640): NCBI GI: 169604834 Blast Desc: SNOG_05433 [Phaeosphaeria nodorum SN15] gi|111066704|gb|EAT87824.1| SNOG_05433 [Phaeosphaeria nodorum SN15]
MLSPRIFGHTSTYLYSYVKRFFYRIIDYDAILLCHIFLEYFFIEFMNSALYKSVPFKKKSKKDQIRVLEVLSGEYDEPLSCKLSVVAIGSVTYDALSYRWKGTQDSKIRINKTNCLIQENLALALRYLRQPHASRYIWCDAICINQNTKSDEKESQMILMGKIYRCAGSVLAWLGPPTLRSNRAMEYFAKYPGPEWCGGLPLQIQQELSFQNHHSWWLDFGDSLLSSDWWGRAWMVQEMILAKNLIFVCGNYQMPDYVFFSIAQFGTQLNRQIFTQPVQQGETSLRQTAWMMMHHCRIVRRGGYNDEFRITLEEMGYGEDGVGWPRSDVGFYIGQFHGFASTEPKDRVYAYLALDDDCPIQPSKLTKEMPFAQLYQKVAEYVLTSSGYLDFMFLGGTHPREPGLPSWVPDLNKPYGTNTALPPANLGLRTAFHASNSRKFEGNFDDFGTQRVLMTMARRVGTIEEVTDVHRYDNEEECITRSQILAGWGESPRNDLKYQLYVGKPSQTRYTALSHTLVLNLNYERRPCSESEGFFADVYDYDVPPDYERGNPVLLQHKARAFGLDWVLSKYKYRLGRRTALLNNGFIGMVPKECLPEKRGQSTYEVYVVPGASMPMVLRRLQATNGKALFELIGECYVHGVMDGEAYKSTAFRDEPIILI

SEQ ID NO: 34383 - DNA, 1863 bp, Muscodor strobelii
  misc_feature: SGI cDNA ID NO. 571882
  misc_feature: Reduced expression when VOC is produced
  misc_feature: Encodes the peptide sequence at SEQ ID NO 34384
atgccctccgtcctcaatgaggaagacaaggagattgtcaagcggatagtgcccaagcagaccaacaagatccaggccgtcgccgtcgccaggctgtatgtggcatatcccagcagatccaaatggacgtatacgggactacaaggcgccatcgtcctcgccaacgatctcgtgggcaatacctactggctgaaattggtcgatatatcccctgctcgtcgaggtgtgatctgggaccaggagatattcgaatcatggtcttacaatgctgaccggaccttcttccacaccttcgaaatcgaggaatgctgggcaggactctcctttcacgacgagaaggaggccaagcagttcaagaagaagatggacgacagggagaagaacgcctcgaaagccaccaaggcaacccccttcggcggcaccaaccagcagcagcaccacaagaccggcttctttggtagtctcttcggcggaggtagtaggcacgcctccaaccccacgccgcccgagtcgcctcgcagcagcctcccgacgctacagtcccaggcgaggctctcctcggcgaacctgaccagcaatggatatcacaagccaccctccgagttcgcgaagctggaggcctatgaccccgactggcgggacaatttcggaaacttcttgcaagagcaaggacttacagatgaattcattaaagagaaccaggacttcattgtcgagtttctcaaggaacaaggtggcaatcaggcctcttctgcgacacacgctcctccgcctccgccgcctccgcccccagcaccttcgagcaacggtcatgcccgcgcaccgccgcctccgcctccacctgctcccgcatcacggcctgcatccgatagcatctcatcgtccggctctcggcgcggcgccccacctccaccaccggcgccacgaaggtctggtaataagctggagacggttccgccgcgtgaaccaacgccgccacaggagcctacaccaccacgaccccgtttcaatgctcctcctccgctcgctgatgctgggaagttcgctcacgtggaacctcctcgtgctgctcctgccggacctccaccgcctcccagacctccaaagacaccgatagaggccaaggacgagaagccggcgcacaaattcggcgttcctcctgctttcacgggccagagactaaacaacgcaccaccgcctccaccggctagaggcccggtgccggctccaccaccgcgggaaacaccttcggcgccgccgcccttaccgccgactctgccaccaaaggggccgccctcaagccctccaccagtgccgagtatgtcgaggccagttcccgcacctcctccgcgaaacgtcccaccgccgctaccgcagtctggcgctcctccaccacctccgctaccacaatcaagcgctccgccgccgccacctcttcctccaccgtccggcatgggcgcaccaccgcctccaccgcctcctccccctccccctggcggcgccggcatgccaccaccacccccacctttgcctccgaatcgcgactcaggctatgtctcggctggaccaacggcgccgctgcccaatgttgacgctggccggaatgccatgttggacggcatccagaaggctggcggtatctcttcgctgaagaaagtggacaggtcccagatcagagacagaagcggtgcttcggtgggcggcagtggatcagatacggggccgcacggtagtggtttgccgcctgctggtgttacaccgggcggtggaggcggtatggcagatgcgcttgctcttgcgctgcagaagcggaaagctaaggttagggatagtgatgatgagaagagcgatgacgaatggtag

SEQ ID NO: 34384 - protein, 620 aa, Muscodor strobelii
  misc_feature: SGI Peptide ID NO. 571882
  misc_feature (533)..(553): Pfam Id: PF02205 Pfam Desc: WH2 motif
  misc_feature (14)..(126): Pfam Id: PF00568 Pfam Desc: WH1 domain
  misc_feature (1)..(392): NCBI GI: 85114043 Blast Desc: WASP-like pretein las17p [Neurospora crassa OR74A] gi|28926414|gb|EAA35389.1| WASP-like pretein las17p [Neurospora crassa OR74A]
  misc_feature (1)..(405): NCBI GI: 256733640 Blast Desc: NECHADRAFT_92045 [Nectria haematococca mpVI 77-13-4]
  misc_feature (1)..(394): NCBI GI: 46128557 Blast Desc: FG08656.1 [Gibberella zeae PH-1]
  misc_feature (1)..(250): NCBI GI: 171684919 Blast Desc: protein product [Podospora anserina] gi|170942420|emb|CAP68072.1| protein product [Podospora anserina]
  misc_feature (1)..(389): NCBI GI: 149210147 Blast Desc: MGCH7_ch7g555 [Magnaporthe grisea 70-15] gi|86196510|gb|EAQ71148.1| MGCH7_ch7g555 [Magnaporthe grisea 70-15]
  misc_feature (1)..(389): NCBI GI: 39970671 Blast Desc: MGG_02802 [Magnaporthe grisea 70-15] gi|145017385|gb|EDK01748.1| MGG_02802 [Magnaporthe grisea 70-15]
  misc_feature (1)..(414): NCBI GI: 154291589 Blast Desc: BC1G_15063 [Botryotinia fuckeliana B05.10] gi|150846700|gb|EDN21893.1| BC1G_15063 [Botryotinia fuckeliana B05.10]
  misc_feature (1)..(248): NCBI GI: 156056492 Blast Desc: SS1G_05600 [Sclerotinia sclerotiorum 1980] gi|154703382|gb|EDO03121.1| SS1G_05600 [Sclerotinia sclerotiorum 1980]
  misc_feature (1)..(370): NCBI GI: 258572480 Blast Desc: conserved [Uncinocarpus reesii 1704] gi|237905272|gb|EEP79673.1| conserved [Uncinocarpus reesii 1704]
  misc_feature (1)..(431): NCBI GI: 169778861 Blast Desc: [Aspergillus oryzae RIB40] gi|83772634|dbj|BAE62762.1| protein product [Aspergillus oryzae]
  misc_feature: Useful for introducing or modulating the production of volatile compounds
MPSVLNEEDKEIVKRIVPKQTNKIQAVAVARLYVAYPSRSKWTYTGLQGAIVLANDLVGNTYWLKLVDISPARRGVIWDQEIFESWSYNADRTFFHTFEIEECWAGLSFHDEKEAKQFKKKMDDREKNASKATKATPFGGTNQQQHHKTGFFGSLFGGGSRHASNPTPPESPRSSLPTLQSQARLSSANLTSNGYHKPPSEFAKLEAYDPDWRDNFGNFLQEQGLTDEFIKENQDFIVEFLKEQGGNQASSATHAPPPPPPPPPAPSSNGHARAPPPPPPPAPASRPASDSISSSGSRRGAPPPPPAPRRSGNKLETVPPREPTPPQEPTPPRPRFNAPPPLADAGKFAHVEPPRAAPAGPPPPPRPPKTPIEAKDEKPAHKFGVPPAFTGQRLNNAPPPPPARGPVPAPPPRETPSAPPPLPPTLPPKGPPSSPPPVPSMSRPVPAPPPRNVPPPLPQSGAPPPPPLPQSSAPPPPPLPPPSGMGAPPPPPPPPPPPGGAGMPPPPPPLPPNRDSGYVSAGPTAPLPNVDAGRNAMLDGIQKAGGISSLKKVDRSQIRDRSGASVGGSGSDTGPHGSGLPPAGVTPGGGGGMADALALALQKRKAKVRDSDDEKSDDEW

SEQ ID NO: 34385 - DNA, 3061 bp, Muscodor strobelii
  misc_feature: SGI EST ID NO. CUFF.81706.0
  misc_feature: Variant of the nucleotide sequence at SEQ ID NO 34383
ttcgcagacacttcgtaggcagatgtgttgtctgcaccacatttagtatccaaagtccaacgtttatatggaaacactctctaccattcattactacacatgagctggactcgtaatagttgctagtctggccactcactgggcggattcctccgtcacacccgatacatacctaccttgacttctccaactcgcatctctgttgcatcgtgctccaacctctctcactgcccacacacagggccccgcgctaccgtcgctggccgcacatctccccgctgcgaatctacaagctgcccgtcgcttcaagatagacggaagagacgagattcaacaccgttgcccgacaagcgactctcacacgaccacatcacacgacaattaccctccccagcccgccttgtccccctcatctctcgcccacgatgccctccgtcctcaatgaggaagacaaggagattgtcaagcggatagtgcccaagcagaccaacaagatccaggccgtcgccgtcgccaggctgtatgtggcatatcccagcagatccaaatggacgtatacgggactacaaggcgccatcgtcctcgccaacgatctcgtgggcaatacctactggctgaaattggtcgatatatcccctgctcgtcgaggtgtgatctgggaccaggagatattcgaatcatggtcttacaatgctgaccggaccttcttccacaccttcgaaatcgaggaatgctgggcaggactctcctttcacgacgagaaggaggccaagcagttcaagaagaagatggacgacagggagaagaacgcctcgaaagccaccaaggcaacccccttcggcggcaccaaccagcagcagcaccacaagaccggcttctttggtagtctcttcggcggaggtagtaggcacgcctccaaccccacgccgcccgagtcgcctcgcagcagcctcccgacgctacagtcccaggcgaggctctcctcggcgaacctgaccagcaatggatatcacaagccaccctccgagttcgcgaagctggaggcctatgaccccgactggcgggacaatttcggaaacttcttgcaagagcaaggacttacagatgaattcattaaagagaaccaggacttcattgtcgagtttctcaaggaacaaggtggcaatcaggcctcttctgcgacacacgctcctccgcctccgccgcctccgcccccagcaccttcgagcaacggtcatgcccgcgcaccgccgcctccgcctccacctgctcccgcatcacggcctgcatccgatagcatctcatcgtccggctctcggcgcggcgccccacctccaccaccggcgccacgaaggtctggtaataagctggagacggttccgccgcgtgaaccaacgccgccacaggagcctacaccaccacgaccccgtttcaatgctcctcctccgctcgctgatgctgggaagttcgctcacgtggaacctcctcgtgctgctcctgccggacctccaccgcctcccagacctccaaagacaccgatagaggccaaggacgagaagccggcgcacaaattcggcgttcctcctgctttcacgggccagagactaaacaacgcaccaccgcctccaccggctagaggcccggtgccggctccaccaccgcgggaaacaccttcggcgccgccgcccttaccgccgactctgccaccaaaggggccgccctcaagccctccaccagtgccgagtatgtcgaggccagttcccgcacctcctccgcgaaacgtcccaccgccgctaccgcagtctggcgctcctccaccacctccgctaccacaatcaagcgctccgccgccgccacctcttcctccaccgtccggcatgggcgcaccaccgcctccaccgcctcctccccctccccctggcggcgccggcatgccaccaccacccccacctttgcctccgaatcgcgactcaggctatgtctcggctggaccaacggcgccgctgcccaatgttgacgctggccggaatgccatgttggacggcatccagaaggctggcggtatctcttcgctgaagaaagtggacaggtcccagatcagagacagaagcggtgcttcggtgggcggcagtggatcagatacggggccgcacggtagtggtttgccgcctgctggtgttacaccgggcggtggaggcggtatggcagatgcgcttgctcttgcgctgcagaagcggaaagctaaggttagggatagtggtaagtcaatcctgtgtatttttgtatccggattttgcaacttgatatgggcaattcgagctaacgggttgtgatagatgatgagaagagcgatgacgaatggtagtgtcgaatcgaaaatgctcgtatgcagcggatgagcgcccagagacctacgctcgcgtcgtgggttacggatgagaacttaagggggacgaaagtgaagagtcacaatcgggtgtcggaaatcagcggttccctgacttaagcagcccgggagttccaaatcagaactaggaacggaataggagacgaggggagacggccatcgctacgtgttagttgacgtggtgttgtgaattgcgtacgggttaagagcgggattcttccttcagtgttcagataccctttcttaacagcaagacgatccaagatttcgaggggatttgaaaaagttctttacaatcattcctatggtttgcgtggctatggagatatcgaggtcttgggaaggagggggaggttgtggaacatgcgcaccgagagcgaaaggagaggtgggaaacgccatggttgcgaataggagcatgggcacgacacctatgggtttgaaatcgatggctggagtttgtcatggtagttttgggatagaggactattcaaaattttcgaaattaagattacggtatgtctgagtgtcagtgatggtgtgaaattgctttgtgcctgtttgtagtccatttggagtatgtttggactgtgtttattgagtgtgggatatgtggtgagacttgcgcgttcccaagagattggtatacctcgg

SEQ ID NO: 34386 - DNA, 201 bp, Muscodor strobelii
  misc_feature: SGI cDNA ID NO. 571883
  misc_feature: Reduced expression when VOC is produced
  misc_feature: Encodes the peptide sequence at SEQ ID NO 34387
atgccttccgacactgtcaccaccaagcccgttgacaagcccaacgagagccactccaacccgctgagtgaggccgtccagggcgccaagcagttcgccgctcacaaggctcaccccggccctgctattcccaaggacatgcccaaggaagagggcaccaaggaggagcgtctggctaaggctcaggagctgaacaagtaa

SEQ ID NO: 34387 - protein, 66 aa, Muscodor strobelii
  misc_feature: SGI Peptide ID NO. 571883
  misc_feature (33)..(66): NCBI GI: 46128559 Blast Desc: FG08657.1 [Gibberella zeae PH-1]
  misc_feature: Useful for introducing or modulating the production of volatile compounds
MPSDTVTTKPVDKPNESHSNPLSEAVQGAKQFAAHKAHPGPAIPKDMPKEEGTKEERLAKAQELNK

SEQ ID NO: 34388 - DNA, 933 bp, Muscodor strobelii
  misc_feature: SGI EST ID NO. CUFF.82060.0
  misc_feature: Variant of the nucleotide sequence at SEQ ID NO 34386
ggcccagatacgtcatcaccaacgcaacctgtgtcacaaccgatcgattgaaaggaagcctggcacgacttataaagagttgcctgctcctctttttagtctattttcctatcatcaagcaaattgcaatcctacaacgaaaacctgcactttgaccatccgtcacagaagatacatcaaggatatcacatagtcccacactgcaatccaaccccaccaaaatgccttccgacactgtcaccaccaagcccgttgacaagcccaacgagagccactccaacccgctgagtgaggccgtccagggcgccaagcagttcgccgctcacaaggctcaccccggccctgctattcccaaggacatgcccaaggaagagggcaccaaggaggagcgtctggctaaggctcaggagctgaacaagtaaacgggcattgctagacaagatgctagggatgtgcacagactgctggacgtgaactacaactatatcttcttgttcatcaccttgctatacaatgtataatgaaggccacgctgttatgaatagggaatcgggacatcaatcataaacttccaccaaattgcttataggaccgatgctctatgctactcgtggctcgcttctgaatatttgatttgaagttacgatacgcttcgaataatgacatcgtagatactaggcagccgagcagctggatgaaggcaagtgtttgcgttgtccaagaccatctcatccaggcagctgtataatgaaagggtcgaacgcgcgtcaatagacgatgatctcgggatttggctcgagatgaattcaaaagatagtaactacctaactcagccactgcctcggcaatgattgaagacgcaattgtaatgaaagtagtgatatcgtaaagttgttagagaacttggctcccttacatattccaatacaaacg

SEQ ID NO: 34389 - DNA, 2817 bp, Muscodor strobelii
  misc_feature: SGI cDNA ID NO. 571884
  misc_feature: Encodes the peptide sequence at SEQ ID NO 34390
atgtctacgaacaatgcacctcaaccagtgaagttgtcactgccgttggaatatcaacagaacctcttccaagagctgcgcgccgaagatgagctcgtcgtcatcgccaagggccttggcctcatgcgcctggtcaccaacctccttcacagttacgatgcctccggaaacaacctcgtgatagtaataggtgcggaagacagagaaaacgcatggattggagaagccctagcggagcatgctgccatcagcatggctcccaaggctaggggtttgacggtcgtcaatacagatttcacgagcgtcggcgcgcgagagaagatgtatgcgaagggtggtatatatagcatcacttcgcgcatcctcgtcgttgatctactgaccagtctcctgaagaccgagagcatcaccggcgtcatcttgttacacgctgacaaggttgttgccacctcactcgaggcctttattcttcgtatctaccgccagaaaaataagacgggttttctcaaggccttctcggataacccagatcctttcaccatcggattttccccattgtccactatgatgagaaacatgttcctccgcaaggcatccctctggccacgctttcacgtgactgttgctgaatccctcgagggcaggaagaaggcagaagtaattgagctggaagtgcccatgactgaagatatgcaagacatacagactgctatcatggaatgcgtcgaggtgagcattcaggaactcaagaagggcaattccggtctcgagatggacggttggaatctcgacagtgccttgctgaagaatttcgacgtcatggtgcggcgacagctagaccccaactggcatcgagtcagttggaagacaaagcagatcgtgagtgatttgacggttcttcgaggcctgttacattccgttctagccctggatgccgtttcctttctccagcatttagataccattcatgctgcgcactcgccccagccgggcacaacacgccagaaccaatctccttggctgtttcttgacgccgcccataccatcttcagtactgccaagcagagagtatatgctgccagcaaagttaatatcaatgctcaaagctcaattgactctctacgtcccgtactggaagaacagcccaagtgggccctcctagccgagattctcgaagaaattgacagagatctatacttcgagccaccaacacgggatgactccaatggaacgatcttgatcatgtgctctgatccagctacgtgccgtcaattaagagattacctacaaacgatgcacgtgcaaacgaaaacagatgagaatccgaatccgacaaaagaggatcataaaccatcagcctcattcatgatgagaaggagactccgaaactaccttaactggaagcgagagttcgcgaaggtaaacaatgaactcttctcggaaaaccagaaggccctcgaaggcgcggttgatcccagactggctcaaggtgcgtataagggcagagctcctgcgaacaaacgacgacgagtccgtggcggtggcaacgtgggtgcagcatcgacaaccaggaccgccactggcagcgtagcgcagtactttgagaagcctgccgaggtagccgatctgatggaagaggtgcagatgctcgaagaggaagcaaatcaaaaagcggatatcatcgctgacccgctcgatgacatggacgactattttgaactatatgaaatgcaggacctagtggttgtccatgcctacgagggtgatcaagatgaacacgtccttgaagaagtaagaccacgctacatcatcatgtacgagccggatgcctcttttatacgcagagtcgaggtctatcggtcttcgcataacgaccgcaacgtgcgagtgtatttcatgttctacggtgggtcggttgaggaacagcgatacttagcatcagttcgacgggaaaaggactgcttcacaaagctcatcaaagagcgcgctagcatgtcggtcgtcatgacagtagacgcgcatggcgtagaagatccgcaagaagcattcttgcggacagtcaacactcgcattgctggtggaggccggttgactgccacggcagaacagccgagagtcgttgtcgacgtcagagaattccgctcgtcactaccatcactgttacacggccgaaacctcaatgtcatcccttgcatgctgacagttggagactacattctttcacctaacatttgcatcgaacgtaagtccatcggcgatctgatcagctcgttcaaggacggccgattgtataatcaggcggagacgatgtttcagcactacaagaatcccatgctattgattgagttcgaccagaataagtccttcacgctggagccgtttgcggacttgtcgggtaatctgcggtctgtgaaccctaatgaggtaccatcagacctgcagtccaaaatagttttgcttacacttgcattcccacgcttgagagtgatttggagcagtagtccttaccagactgctgagattttcgagggtcttaagacgcaggagccagaacctgatccgttggctgctgtgcgtgcgggtctggagaaggatatgaaggcagaggatcaggcgtttaaccttgagccgcatgagatgttgggtgttgtgccaggtgttacgccacagaatctgaagaatttgacgcttgttgcggagaatgtcagagaggttgcgaatatgagtgtcgaagagttggagccgttgataggcaaggaggccgggaggaaggtggcgggcttcttcggtaggaatttgattgatcttgatttgtga

SEQ ID NO: 34390 - protein, 938 aa, Muscodor strobelii
  misc_feature: SGI Peptide ID NO. 571884
  misc_feature (705)..(785): Pfam Id: PF02732 Pfam Desc: ERCC4 domain
  misc_feature (1)..(937): NCBI GI: 46128561 Blast Desc: FG08658.1 [Gibberella zeae PH-1]
  misc_feature (1)..(937): NCBI GI: 256734134 Blast Desc: [Nectria haematococca mpVI 77-13-4]
  misc_feature (1)..(935): NCBI GI: 171684915 Blast Desc: protein product [Podospora anserina] gi|170942418|emb|CAP68070.1| protein product [Podospora anserina]
  misc_feature (4)..(935): NCBI GI: 116193577 Blast Desc: CHGG_06506 [Chaetomium globosum CBS 148.51] gi|88182419|gb|EAQ89887.1| CHGG_06506 [Chaetomium globosum CBS 148.51]
  misc_feature (18)..(935): NCBI GI: 164424249 Blast Desc: NCU07440 [Neurospora crassa OR74A] gi|157070437|gb|EAA35391.2| NCU07440 [Neurospora crassa OR74A]
  misc_feature (10)..(935): NCBI GI: 39970675 Blast Desc: MGG_02804 [Magnaporthe grisea 70-15] gi|149210151|ref|XP_001522450.1| MGCH7_ch7g557 [Magnaporthe grisea 70-15] gi|86196512|gb|EAQ71150.1| MGCH7_ch7g557 grisea
  misc_feature (8)..(935): NCBI GI: 156056488 Blast Desc: SS1G_05598 [Sclerotinia sclerotiorum 1980] gi|154703380|gb|EDO03119.1| SS1G_05598 [Sclerotinia sclerotiorum 1980]
  misc_feature (80)..(935): NCBI GI: 3219304 Blast Desc: MUS38 [Neurospora crassa]
  misc_feature (2)..(799): NCBI GI: 154291595 Blast Desc: BC1G_15066 [Botryotinia fuckeliana B05.10] gi|150846703|gb|EDN21896.1| BC1G_15066 [Botryotinia fuckeliana B05.10]
  misc_feature (4)..(935): NCBI GI: 169608720 Blast Desc: SNOG_07446 [Phaeosphaeria nodorum SN15] gi|111063792|gb|EAT84912.1| SNOG_07446 [Phaeosphaeria nodorum SN15]
MSTNNAPQPVKLSLPLEYQQNLFQELRAEDELVVIAKGLGLMRLVTNLLHSYDASGNNLVIVIGAEDRENAWIGEALAEHAAISMAPKARGLTVVNTDFTSVGAREKMYAKGGIYSITSRILVVDLLTSLLKTESITGVILLHADKVVATSLEAFILRIYRQKNKTGFLKAFSDNPDPFTIGFSPLSTMMRNMFLRKASLWPRFHVTVAESLEGRKKAEVIELEVPMTEDMQDIQTAIMECVEVSIQELKKGNSGLEMDGWNLDSALLKNFDVMVRRQLDPNWHRVSWKTKQIVSDLTVLRGLLHSVLALDAVSFLQHLDTIHAAHSPQPGTTRQNQSPWLFLDAAHTIFSTAKQRVYAASKVNINAQSSIDSLRPVLEEQPKWALLAEILEEIDRDLYFEPPTRDDSNGTILIMCSDPATCRQLRDYLQTMHVQTKTDENPNPTKEDHKPSASFMMRRRLRNYLNWKREFAKVNNELFSENQKALEGAVDPRLAQGAYKGRAPANKRRRVRGGGNVGAASTTRTATGSVAQYFEKPAEVADLMEEVQMLEEEANQKADIIADPLDDMDDYFELYEMQDLVVVHAYEGDQDEHVLEEVRPRYIIMYEPDASFIRRVEVYRSSHNDRNVRVYFMFYGGSVEEQRYLASVRREKDCFTKLIKERASMSVVMTVDAHGVEDPQEAFLRTVNTRIAGGGRLTATAEQPRVVVDVREFRSSLPSLLHGRNLNVIPCMLTVGDYILSPNICIERKSIGDLISSFKDGRLYNQAETMFQHYKNPMLLIEFDQNKSFTLEPFADLSGNLRSVNPNEVPSDLQSKIVLLTLAFPRLRVIWSSSPYQTAEIFEGLKTQEPEPDPLAAVRAGLEKDMKAEDQAFNLEPHEMLGVVPGVTPQNLKNLTLVAENVREVANMSVEELEPLIGKEAGRKVAGFFGRNLIDLDL

SEQ ID NO: 34391 - DNA, 4200 bp, Muscodor strobelii
  misc_feature: SGI EST ID NO. CUFF.82831.0
  misc_feature: Variant of the nucleotide sequence at SEQ ID NO 34389
cagcaaacagcccactcacaccactgagggctttcatcggctttagacttctaggaatcgtcctacctcgtcgtacagcggagatacaggtacctaggccatgtactaggcgccaaggagcatcaaacatgcacatcattcggtgaagcttctctccgtcgcgcatctctgcctctcgatagagacgtgccccgcatgtctacgaacaatgcacctcaaccagtgaagttgtcactgccgttggaatatcaacagaacctcttccaagagctgcgcgccgaagatgagctcgtcgtcatcgccaagggccttggcctcatgcgcctggtcaccaacctccttcacagttacgatgcctccggaaacaacctcgtgatagtaataggtgcggaagacagagaaaacgcatggattggagaagccctagcggagcatgctgccatcagcatggctcccaaggctaggggtttgacggtcgtcaatacagatttcacgagcgtcggcgcgcgagagaagatgtatgcgaagggtggtatatatagcatcacttcgcgcatcctcgtcgttgatctactgaccagtctcctgaagaccgagagcatcaccggcgtcatcttgttacacgctgacaaggttgttgccacctcactcgaggcctttattcttcgtatctaccgccagaaaaataagacgggttttctcaaggccttctcggataacccagatcctttcaccatcggattttccccattgtccactatgatgagaaacatgttcctccgcaaggcatccctctggccacgctttcacgtgactgttgctgaatccctcgagggcaggaagaaggcagaagtaattgagctggaagtgcccatgactgaagatatgcaagacatacagactgctatcatggaatgcgtcgaggtgagcattcaggaactcaagaagggcaattccggtctcgagatggacggttggaatctcgacagtgccttgctgaagaatttcgacgtcatggtgcggcgacagctagaccccaactggcatcgagtcagttggaagacaaagcagatcgtgagtgatttgacggttcttcgaggcctgttacattccgttctagccctggatgccgtttcctttctccagcatttagataccattcatgctgcgcactcgccccagccgggcacaacacgccagaaccaatctccttggctgtttcttgacgccgcccataccatcttcagtactgccaagcagagagtatatgctgccagcaaagttaatatcaatgctcaaagctcaattgactctctacgtcccgtactggaagaacagcccaagtgggccctcctagccgagattctcgaagaaattgacagagatctatacttcgagccaccaacacgggatgactccaatggaacgatcttgatcatgtgctctgatccagctacgtgccgtcaattaagagattacctacaaacgatgcacgtgcaaacgaaaacagatgagaatccgaatccgacaaaagaggatcataaaccatcagcctcattcatgatgagaaggagactccgaaactaccttaactggaagcgagagttcgcgaaggtaaacaatgaactcttctcggaaaaccagaaggccctcgaaggcgcggttgatcccagactggctcaaggtgcgtataagggcagagctcctgcgaacaaacgacgacgagtccgtggcggtggcaacgtgggtgcagcatcgacaaccaggaccgccactggcagcgtagcgcagtactttgagaagcctgccgaggtagccgatctgatggaagaggtgcagatgctcgaagaggaagcaaatcaaaaagcggatatcatcgctgacccgctcgatgacatggacgactattttgaactatatgaaatgcaggacctagtggttgtccatgcctacgagggtgatcaagatgaacacgtccttgaagaagtaagaccacgctacatcatcatgtacgagccggatgcctcttttatacgcagagtcgaggtctatcggtcttcgcataacgaccgcaacgtgcgagtgtatttcatgttctacggtgggtcggttgaggaacagcgatacttagcatcagttcgacgggaaaaggactgcttcacaaagctcatcaaagagcgcgctagcatgtcggtcgtcatgacagtagacgcgcatggcgtagaagatccgcaagaagcattcttgcggacagtcaacactcgcattgctggtggaggccggttgactgccacggcagaacagccgagagtcgttgtcgacgtcagagaattccgctcgtcactaccatcactgttacacggccgaaacctcaatgtcatcccttgcatgctgacagttggagactacattctttcacctaacatttgcatcgaacgtaagtccatcggcgatctgatcagctcgttcaaggacggccgattgtataatcaggcggagacgatgtttcagcactacaagaatcccatgctattgattgagttcgaccagaataagtccttcacgctggagccgtttgcggacttgtcgggtaatctgcggtctgtgaaccctaatgaggtaccatcagacctgcagtccaaaatagttttgcttacacttgcattcccacgcttgagagtgatttggagcagtagtccttaccagactgctgagattttcgagggtcttaagacgcaggagccagaacctgatccgttggctgctgtgcgtgcgggtctggagaaggatatgaaggcagaggatcaggcgtttaaccttgagccgcatgagatgttgggtgttgtgccaggtgttacgccacagaatctgaagaatttgacgcttgttgcggagaatgtcagagaggttgcgaatatgagtgtcgaagagttggagccgttgataggcaaggaggccgggaggaaggtggcgggcttcttcggtaggaatttgattgatcttgatttgtgaggtagctattgagatcaagtacgaatttgatacctacctacctcattactcatctcttttgtgtttcagtcctaatccgaaatacgtacgaaatgcatgtgtgtgcgcatccaagcccctcctcgcatacagtagatggccatacaataattgcaatagatgatatacagttaaaattcatacgatttcaaacttacgttcgcgcaagatgtttgatgtactaatatgttttatatgcaatatcgtatggcagggtgggatgatcacaagggtacttcaagtcacttgtcgtggttggaaaggtaggttttgtgtggaaattatcatttgttcatccatgaaatcaagacccgactccgaagaatcgcatcgtaactatcgtgaagaaaggggtatcgtggtatcataaagcgcatatcaaatgctcatgctcatgctcaacctccgcccgtactctgcatccgtccccggtcacacctaatcaaatcactctcgtatccttgcatcacacctcacgtcctcccatcttgaactttatccgtgtaaggcgagttggggtgtggaagcaagggactagattcgactagtcgttgtgtgacgatgcgagcgcgtagtgccgcgacgacgacgtccgccgcagtagccgcaggtgaagaagctgacgaggatgtcgaggaagctgacgataccgctgatgatggcgtgcaggatgttgccgacgccgttgatgatcgccatgatgacgttgccgatggttcggaagatggactggatctatgtggtctgttaggatgcgatgttatgagagggtgagtgcgaccgcgagggaacttacacagctgacgacggcacccatgatgacggtttgtgttggtttgatgggggtcagttttgataggttgttgttgttaagggttgtggaatggtagaggtgttgatagttctactatttgtagaggaactgcgtttggtgttcttatgtgttgtttgttattgagagggggactagtcacagaagatgagtgaatggtctacatttatatatcaaaattccattcaatgatacgcagccggaaagggaaagaacggcgtcgtatcagagcagcccacgatcacattggcaaggtcgcttccttaccggccgcgaactgattgtgctacagcatctagagagcaattaggtcatag

SEQ ID NO: 34392 - DNA, 222 bp, Muscodor strobelii
  misc_feature: SGI cDNA ID NO. 571885
  misc_feature: Reduced expression when VOC is produced
  misc_feature: Encodes the peptide sequence at SEQ ID NO 34393
atgggtgccgtcgtcagctgtatccagtccatcttccgaaccatcggcaacgtcatcatggcgatcatcaacggcgtcggcaacatcctgcacgccatcatcagcggtatcgtcagcttcctcgacatcctcgtcagcttcttcacctgcggctactgcggcggacgtcgtcgtcgcggcactacgcgctcgcatcgtcacacaacgactagtcgaatctag

SEQ ID NO: 34393 - protein, 73 aa, Muscodor strobelii
  misc_feature: SGI Peptide ID NO. 571885
  misc_feature (1)..(64): NCBI GI: 212526412 Blast Desc: conserved [Penicillium marneffei ATCC 18224] gi|210072761|gb|EEA26848.1| conserved [Penicillium marneffei ATCC 18224]
  misc_feature (1)..(73): NCBI GI: 46128563 Blast Desc: FG08659.1 [Gibberella zeae PH-1]
  misc_feature (1)..(73): NCBI GI: 256733639 Blast Desc: expressed protein [Nectria haematococca mpVI 77-13-4]
  misc_feature (1)..(50): NCBI GI: 261353218 Blast Desc: [Verticillium albo-atrum VaMs.102]
  misc_feature (1)..(63): NCBI GI: 189199330 Blast Desc: conserved [Pyrenophora tritici-repentis Pt-1C-BFP] gi|187983101|gb|EDU48589.1| conserved [Pyrenophora tritici-repentis Pt-1C-BFP]
  misc_feature (1)..(54): NCBI GI: 70984368 Blast Desc: conserved [Aspergillus fumigatus Af293] gi|66845325|gb|EAL85660.1| conserved [Aspergillus fumigatus Af293] gi|159122484|gb|EDP47605.1| conserved [Aspergillus A1163]
  misc_feature (1)..(53): NCBI GI: 85114055 Blast Desc: NCU07441 [Neurospora crassa OR74A] gi|28926417|gb|EAA35392.1| [Neurospora crassa OR74A]
  misc_feature (1)..(73): NCBI GI: 171684913 Blast Desc: protein product [Podospora anserina] gi|170942417|emb|CAP68069.1| protein product [Podospora anserina]
  misc_feature (1)..(54): NCBI GI: 119467558 Blast Desc: NFIA_050310 [Neosartorya fischeri NRRL 181] gi|119405737|gb|EAW15688.1| conserved [Neosartorya fischeri NRRL 181]
  misc_feature (1)..(68): NCBI GI: 67540926 Blast Desc: AN6633.2 [Aspergillus nidulans FGSC A4] gi|40738972|gb|EAA58162.1| AN6633.2 [Aspergillus nidulans FGSC A4] gi|259480213|tpe|CBF71138.1| TPA: conserved [Aspergillus FGSC
  misc_feature: Useful for introducing or modulating the production of volatile compounds
MGAVVSCIQSIFRTIGNVIMAIINGVGNILHAIISGIVSFLDILVSFFTCGYCGGRRRRGTTRSHRHTTTSRI

SEQ ID NO: 34394 - DNA, 4179 bp, Muscodor strobelii
  misc_feature: SGI EST ID NO. CUFF.82832.1
  misc_feature: Variant of the nucleotide sequence at SEQ ID NO 34392
tctagatgctgtagcacaatcagttcgcggccggtaaggaagcgaccttgccaatgtgatcgtgggctgctctgatacgacgccgttctttccctttccggctgcgtatcattgaatggaattttgatatataaatgtagaccattcactcatcttctgtgactagtccccctctcaataacaaacaacacataagaacaccaaacgcagttcctctacaaatagtagaactatcaacacctctaccattccacaacccttaacaacaacaacctatcaaaactgacccccatcaaaccaacacaaaccgtcatcatgggtgccgtcgtcagctgtatccagtccatcttccgaaccatcggcaacgtcatcatggcgatcatcaacggcgtcggcaacatcctgcacgccatcatcagcggtatcgtcagcttcctcgacatcctcgtcagcttcttcacctgcggctactgcggcggacgtcgtcgtcgcggcactacgcgctcgcatcgtcacacaacgactagtcgaatctagtcccttgcttccacaccccaactcgccttacacggataaagttcaagatgggaggacgtgaggtgtgatgcaaggatacgagagtgatttgattaggtgtgaccggggacggatgcagagtacgggcggaggttgagcatgagcatgagcatttgatatgcgctttatgataccacgatacccctttcttcacgatagttacgatgcgattcttcggagtcgggtcttgatttcatggatgaacaaatgataatttccacacaaaacctacctttccaaccacgacaagtgacttgaagtacccttgtgatcatcccaccctgccatacgatattgcatataaaacatattagtacatcaaacatcttgcgcgaacgtaagtttgaaatcgtatgaattttaactgtatatcatctattgcaattattgtatggccatctactgtatgcgaggaggggcttggatgcgcacacacatgcatttcgtacgtatttcggattaggactgaaacacaaaagagatgagtaatgaggtaggtaggtatcaaattcgtacttgatctcaatagctacctcacaaatcaagatcaatcaaattcctaccgaagaagcccgccaccttcctcccggcctccttgcctatcaacggctccaactcttcgacactcatattcgcaacctctctgacattctccgcaacaagcgtcaaattcttcagattctgtggcgtaacacctggcacaacacccaacatctcatgcggctcaaggttaaacgcctgatcctctgccttcatatccttctccagacccgcacgcacagcagccaacggatcaggttctggctcctgcgtcttaagaccctcgaaaatctcagcagtctggtaaggactactgctccaaatcactctcaagcgtgggaatgcaagtgtaagcaaaactattttggactgcaggtctgatggtacctcattagggttcacagaccgcagattacccgacaagtccgcaaacggctccagcgtgaaggacttattctggtcgaactcaatcaatagcatgggattcttgtagtgctgaaacatcgtctccgcctgattatacaatcggccgtccttgaacgagctgatcagatcgccgatggacttacgttcgatgcaaatgttaggtgaaagaatgtagtctccaactgtcagcatgcaagggatgacattgaggtttcggccgtgtaacagtgatggtagtgacgagcggaattctctgacgtcgacaacgactctcggctgttctgccgtggcagtcaaccggcctccaccagcaatgcgagtgttgactgtccgcaagaatgcttcttgcggatcttctacgccatgcgcgtctactgtcatgacgaccgacatgctagcgcgctctttgatgagctttgtgaagcagtccttttcccgtcgaactgatgctaagtatcgctgttcctcaaccgacccaccgtagaacatgaaatacactcgcacgttgcggtcgttatgcgaagaccgatagacctcgactctgcgtataaaagaggcatccggctcgtacatgatgatgtagcgtggtcttacttcttcaaggacgtgttcatcttgatcaccctcgtaggcatggacaaccactaggtcctgcatttcatatagttcaaaatagtcgtccatgtcatcgagcgggtcagcgatgatatccgctttttgatttgcttcctcttcgagcatctgcacctcttccatcagatcggctacctcggcaggcttctcaaagtactgcgctacgctgccagtggcggtcctggttgtcgatgctgcacccacgttgccaccgccacggactcgtcgtcgtttgttcgcaggagctctgcccttatacgcaccttgagccagtctgggatcaaccgcgccttcgagggccttctggttttccgagaagagttcattgtttaccttcgcgaactctcgcttccagttaaggtagtttcggagtctccttctcatcatgaatgaggctgatggtttatgatcctcttttgtcggattcggattctcatctgttttcgtttgcacgtgcatcgtttgtaggtaatctcttaattgacggcacgtagctggatcagagcacatgatcaagatcgttccattggagtcatcccgtgttggtggctcgaagtatagatctctgtcaatttcttcgagaatctcggctaggagggcccacttgggctgttcttccagtacgggacgtagagagtcaattgagctttgagcattgatattaactttgctggcagcatatactctctgcttggcagtactgaagatggtatgggcggcgtcaagaaacagccaaggagattggttctggcgtgttgtgcccggctggggcgagtgcgcagcatgaatggtatctaaatgctggagaaaggaaacggcatccagggctagaacggaatgtaacaggcctcgaagaaccgtcaaatcactcacgatctgctttgtcttccaactgactcgatgccagttggggtctagctgtcgccgcaccatgacgtcgaaattcttcagcaaggcactgtcgagattccaaccgtccatctcgagaccggaattgcccttcttgagttcctgaatgctcacctcgacgcattccatgatagcagtctgtatgtcttgcatatcttcagtcatgggcacttccagctcaattacttctgccttcttcctgccctcgagggattcagcaacagtcacgtgaaagcgtggccagagggatgccttgcggaggaacatgtttctcatcatagtggacaatggggaaaatccgatggtgaaaggatctgggttatccgagaaggccttgagaaaacccgtcttatttttctggcggtagatacgaagaataaaggcctcgagtgaggtggcaacaaccttgtcagcgtgtaacaagatgacgccggtgatgctctcggtcttcaggagactggtcagtagatcaacgacgaggatgcgcgaagtgatgctatatataccacccttcgcatacatcttctctcgcgcgccgacgctcgtgaaatctgtattgacgaccgtcaaacccctagccttgggagccatgctgatggcagcatgctccgctagggcttctccaatccatgcgttttctctgtcttccgcacctattactatcacgaggttgtttccggaggcatcgtaactgtgaaggaggttggtgaccaggcgcatgaggccaaggcccttggcgatgacgacgagctcatcttcggcgcgcagctcttggaagaggttctgttgatattcctaaataaaagaacgcgtcagtatgagaccagattggtatgatgcacgtaaacataccaacggcagtgacaacttcactggttgaggtgcattgttcgtagacatgcggggcacgtctctatcgagaggcagagatgcgcgacggagagaagcttcaccgaatgatgtgcatgtttgatgctccttggcgcctagtacatggcctaggtacctgtatctccgctgtacgacgaggtaggacgattcctagaagtctaaagccgatgaaagccctcagtggtgtgagtgggctgtttgctg

SEQ ID NO: 34395 - DNA, 603 bp, Muscodor strobelii
  misc_feature: SGI cDNA ID NO. 571886
  misc_feature: Encodes the peptide sequence at SEQ ID NO 34396
atggtcaacaaggtacatggtgccttcctaggcatcgatgttctctttgcagctacgggagcactcattctgggcttctccatcatcgtaaagagcacatgtttcgacccaccgaataacggcaacgatgccgctcgagacttgctataccagcaatttccgttcacagccggcattgccaatagtgtcgtaacgttcatcgcgtttgcctgtaccctaccagccctggctaccaacaaccgcggttggttgaagctcgccggtgttctcatcgttgtttctgcgctattcacactgatcattggcctcgatctatggattttcactttacggatcaaggagacatttggaaacatatggatagcgcagaacgcccacgttcaggaactgatgcagacagcctttcaatgctgcggttacttcaacagcacctcgccagccttccaaacagacgcgacttacaatatcttcacggccctattcggtatcgtggctgttgatgcccttaccattattgctattgcctgtgtacttaaggatcggaaagagatggaacggttcaggcacatcgatgagaaaagcggtgccagaggcggattctga

SEQ ID NO: 34396 - protein, 200 aa, Muscodor strobelii
  misc_feature: SGI Peptide ID NO. 571886
  misc_feature (1)..(197): NCBI GI: 261353246 Blast Desc: tetraspanin [Verticillium albo-atrum VaMs.102]
  misc_feature (1)..(195): NCBI GI: 171684897 Blast Desc: protein product [Podospora anserina] gi|170942409|emb|CAP68061.1| protein product [Podospora anserina]
  misc_feature (1)..(195): NCBI GI: 145610028 Blast Desc: MGG_12594 [Magnaporthe grisea 70-15] gi|145017415|gb|EDK01778.1| MGG_12594 [Magnaporthe grisea 70-15]
  misc_feature (1)..(195): NCBI GI: 149210081 Blast Desc: MGCH7_ch7g522 [Magnaporthe grisea 70-15] gi|86196477|gb|EAQ71115.1| MGCH7_ch7g522 [Magnaporthe grisea 70-15]
  misc_feature (1)..(198): NCBI GI: 24528069 Blast Desc: tetraspanin [Glomerella lindemuthiana]
  misc_feature (2)..(198): NCBI GI: 85114017 Blast Desc: NCU07432 [Neurospora crassa OR74A] gi|24528243|emb|CAD43408.1| tetraspanin [Neurospora crassa] gi|28926408|gb|EAA35383.1| NCU07432 [Neurospora crassa OR74A]
  misc_feature (1)..(197): NCBI GI: 256734087 Blast Desc: [Nectria haematococca mpVI 77-13-4]
  misc_feature (1)..(197): NCBI GI: 46128635 Blast Desc: FG08695.1 [Gibberella zeae PH-1]
  misc_feature (13)..(195): NCBI GI: 116193509 Blast Desc: CHGG_06472 [Chaetomium globosum CBS 148.51] gi|88182385|gb|EAQ89853.1| CHGG_06472 [Chaetomium globosum CBS 148.51]
  misc_feature (1)..(195): NCBI GI: 24528067 Blast Desc: tetraspanin [Botryotinia fuckeliana]
MVNKVHGAFLGIDVLFAATGALILGFSIIVKSTCFDPPNNGNDAARDLLYQQFPFTAGIANSVVTFIAFACTLPALATNNRGWLKLAGVLIVVSALFTLIIGLDLWIFTLRIKETFGNIWIAQNAHVQELMQTAFQCCGYFNSTSPAFQTDATYNIFTALFGIVAVDALTIIAIACVLKDRKEMERFRHIDEKSGARGGF

SEQ ID NO: 34397 - DNA, 1753 bp, Muscodor strobelii
  misc_feature: SGI EST ID NO. CUFF.82860.0
  misc_feature: Variant of the nucleotide sequence at SEQ ID NO 34395
ttgaaacctcaactgtcgggagtcgcgcatcatggccttccaaacaagccatgcacacgtaatctgcctgcatccacgacccttggacaacaggctactggcgagtaagtaggtaggtcaatgggaaatggcctgaccagcccgtctcacacttctcctctgacgagcgcgtgtatcatgtcttcacctctctctctcatatcatcgtaccacctttaatcacattctcttctttccaagcggcagtgccagcagaaaatagaacagtagtggatcgagtgtttcggtgtttctgaggcgtctctgcagcactctttgtctcatccgatcttcctctcttttcatacacctactgttcagctgctcgctctttcccttcctattactcgggctcgacgtcggaggattcctttctttaccactagtcgtcgatcgattttctttcattccacgttcattttcagctcgaagccatacgagaatacgttgatataccactatcgctcattttaaaagaggacgccggccgtcgccgatcacattacaaaacggagcaggaaaagggaattgagggcctagggatacggtccctagaccacgaaagagaaaggaattttgggttcggaaaaatattgggcatcgattaccaccaactcgaactcgattagcttcaacgacagggcaagatggtcaacaaggtacatggtgccttcctaggcatcgatgttctctttgcagctacgggagcactcattctgggcttctccatcatcgtaaagagcacatgtttcgacccaccgaataacggcaacgatgccgctcgagacttgctataccagcaatttccgttcacagccggcattgccaatagtgtcgtaacgttcatcgcgtttgcctgtaccctaccagccctggctaccaacaaccgcggttggttgaagctcgccggtgttctcatcgttgtttctgcgctattcacactgatcattggcctcgatctatggattttcactttacggatcaaggagacatttggaaacatatggatagcgcagaacgcccacgttcaggaactgatgcagacagcctttcaatgctgcggttacttcaacagcacctcgccagccttccaaacagacgcgacttgtccccagcccagcgtctgctgctctactaaggggttgcgccacaccgatcgcatcatttggtaacacatttgtagacaatatcttcacggccctattcggtatcgtggctgttgatgcccttaccattattgctattgcctgtgtacttaaggatcggaaagagatggaacggttcaggcacatcgatgagaaaagcggtgccagaggcggattctgaggggttaaacaattttccttggaatcacttcagcatagttcctgctccgatggtcaaggactgctaggtctaccgggcggatcgacctcccaacaacgcacctcagaacgcactggatcgtcagcatggacggaagtcgcagcacagacgatgggcgtagcgacaacctcttaggatccggattgcttcacatcacttagttgcctaatggctaatatggtggcatatgcatatcacttttatttgatttcagcgtttaccaagctcgttcacatcgagcctaaattttgtatttgagatactacaggttagataccagggatagagatcgtaacattcaatatgcacatatacacttgtactcacccatacgtacgaatcattgcgg

SEQ ID NO: 34398 - DNA, 672 bp, Muscodor strobelii
  misc_feature: SGI cDNA ID NO. 571887
  misc_feature: Encodes the peptide sequence at SEQ ID NO 34399
atggccgacgtcaccgaccagcacgacaacacctcgccccaggacctcgacgacggtcacgttggcaatggcagtgccgccgccaccgagtcgcgcggcgtcaagcgcccgcgcaatagcattgccgacgacgacgacgatgacgacgagaagggcggccgcgagcgccgcaagatcgagatcaagttcatcagcgacaagtcgcgccgccacatcaccttctccaagcgcaaggccggcatcatgaagaaggcctacgaactgtctgtccttaccggcactcaggttctcctgctcgtcgtgtccgagactggtctggtttacacgttcacgactcccaagctccagccgcttgttaccaaggccgagggcaagaatctgattcaggcgtgcttgaacgctcccgagcccaatcccggcaacgagaacggcgtcgatgatgccaaccaggtcgactcgcccgaggagccccccaatgcccacctcccgccgcagagcagtcgccctggcatgcctcagaaccacatgccgcccaactacatgcccaacgtccccatggatccccagtcggccatggcctaccagaactacgtccagcagcagcgtgcccctcccccgtacggcatgccgcccaacgcgggtatgcctcagcatactgcccaccagtcctag

SEQ ID NO: 34399 - protein, 223 aa, Muscodor strobelii
  misc_feature: SGI Peptide ID NO. 571887
  misc_feature (62)..(112): Pfam Id: PF00319 Pfam Desc: SRF-type transcription factor (DNA-binding and dimerisation domain)
  misc_feature (1)..(223): NCBI GI: 171684899 Blast Desc: protein product [Podospora anserina] gi|170942410|emb|CAP68062.1| protein product [Podospora anserina]
  misc_feature (1)..(223): NCBI GI: 256733581 Blast Desc: [Nectria haematococca mpVI 77-13-4]
  misc_feature (1)..(203): NCBI GI: 46128637 Blast Desc: FG08696.1 [Gibberella zeae PH-1]
  misc_feature (1)..(223): NCBI GI: 39970613 Blast Desc: MGG_02773 [Magnaporthe grisea 70-15] gi|145017414|gb|EDK01777.1| MGG_02773 [Magnaporthe grisea 70-15]
  misc_feature (1)..(223): NCBI GI: 85114009 Blast Desc: NCU07430 [Neurospora crassa OR74A] gi|28926406|gb|EAA35381.1| conserved [Neurospora crassa OR74A]
  misc_feature (1)..(223): NCBI GI: 110566587 Blast Desc: MADS box protein [Sordaria macrospora]
  misc_feature (1)..(223): NCBI GI: 156056468 Blast Desc: SS1G_05588 [Sclerotinia sclerotiorum 1980] gi|154703370|gb|EDO03109.1| SS1G_05588 [Sclerotinia sclerotiorum 1980] gi|226938411|gb|ACO94162.1| MADS box transcription factor
  misc_feature (1)..(176): NCBI GI: 116193505 Blast Desc: CHGG_06470 [Chaetomium globosum CBS 148.51] gi|88182383|gb|EAQ89851.1| CHGG_06470 [Chaetomium globosum CBS 148.51]
  misc_feature (82)..(223): NCBI GI: 149210087 Blast Desc: MGCH7_ch7g525 [Magnaporthe grisea 70-15] gi|86196480|gb|EAQ71118.1| MGCH7_ch7g525 [Magnaporthe grisea 70-15]
  misc_feature (2)..(192): NCBI GI: 189198700 Blast Desc: MADS box transcription factor Mcm1 [Pyrenophora tritici-repentis Pt-1C-BFP] gi|187982786|gb|EDU48274.1| MADS box transcription factor Mcm1 [Pyrenophora tritici-repentis
MADVTDQHDNTSPQDLDDGHVGNGSAAATESRGVKRPRNSIADDDDDDDEKGGRERRKIEIKFISDKSRRHITFSKRKAGIMKKAYELSVLTGTQVLLLVVSETGLVYTFTTPKLQPLVTKAEGKNLIQACLNAPEPNPGNENGVDDANQVDSPEEPPNAHLPPQSSRPGMPQNHMPPNYMPNVPMDPQSAMAYQNYVQQQRAPPPYGMPPNAGMPQHTAHQS

SEQ ID NO: 34400 - DNA, 2242 bp, Muscodor strobelii
  misc_feature: SGI EST ID NO. CUFF.81966.4
  misc_feature: Variant of the nucleotide sequence at SEQ ID NO 34398
gtgcttgttgtccctgctcccgtgccgaaccccccttcgaggtgcactgggaatcctgatttatttgacttgactcgggcatgggcactagtaactaacggaactgggtgaacagtgagcacacacggtctacagcacagggcatcgctatcgccgcccgctcacccccctgcatcgcaccccagaatagctgggtaatcaaaggcgcccccaatcccgcaagacccaggtttctgcgacagagctgccgtcgacacagagcctctccgctcaacgccagatccagtataggcccgaggcaccacgaccaaaacagcacctcccccattatttgctctctgcgcccgcgagaccagcgcccgacaccgacagtcaccatggccgacgtcaccgaccagcacgacaacacctcgccccaggacctcgacgacggtcacgttggcaatggcagtgccgccgccaccgagtcgcgcggcgtcaagcgcccgcgcaatagcattgccgacgacgacgacgatgacgacgagaagggcggccgcgagcgccgcaagatcgagatcaagttcatcagcgacaagtcgcgccgccacatcaccttctccaagcgcaaggccggcatcatgaagaaggcctacgaactgtctgtccttaccggcactcaggttctcctgctcgtcgtgtccgagactggtctggtttacacgttcacgactcccaagctccagccgcttgttaccaaggccgagggcaagaatctgattcaggcgtgcttgaacgctcccgagcccaatcccggcaacgagaacggcgtcgatgatgccaaccaggtcgactcgcccgaggagccccccaatgcccacctcccgccgcagagcagtcgccctggcatgcctcagaaccacatgccgcccaactacatgcccaacgtccccatggatccccagtcggccatggcctaccagaactacgtccagcagcagcgtgcccctcccccgtacggcatgccgcccaacgcgggtatgcctcagcatactgcccaccagtcctagcatgctggagacgggcaacccccgagggaagaggaccctccccggcagtgagctgcctcgctgccatgctgccatgctgccatgcgctgatacccagaatataatgcattgacgggatttcctgatttcctttgcatttccagcattgttcttgattccatataattgcgaggatacggtggtccggcgttgttaggtccgtgtgactactgctcaataggaatccagctttttcatcccatcttttccgctccgtctcatcctctctcgactcttccgtcccatgtgctgtagataatgtaatgacgtgtttgtttggctccgagggcaaacactcataatctccattacacatcgccgacagcacagggttgaaggatcgccgaccaccagaaatttcatccgttatccacagacagacacactccagatgctccaacacactccaagttttcaattccctggcatcttgtataaaccaccgatgtcactgctcgagcatcggacaatctccgactcttcacaaaaattgcgactttcacgctttcgcagtggaccacgaaagcatgccctgacgatctggatgacagaccccatgatcaggcggcagcaggctaccgggttacagcaggcatccatggagcaccgtgaaggctgctgagaagggtctcttaatgagcagagtgttgctgtacatccgacacacgacatctcaatccaactcggatgtgcgcaatcccacctgttgaactctacgatcctttgcagtctgccatcctctgtgactgctttttgctatggctgaacacggatggtcggttgacgtctacgtcttatgtcagatcgtgtgcgtttcacatgtcctcttctgtccaataggtgacagcccaagtgagatctggtggtgcatccattcaggttactactcgtcatccttggtcttgaatgacgggtgaaacaaccgatgcggcaatttcttgcaggaggtcatctgtggcttgctactcactggggcagaaatacgggacaaaagtcacagcattgcatctctaattgcgaattatgatgagacagcattttgctttgacgacgattgtatgatagcatgctcccacgatagataatcctgcacctttcacccactaatgaaaatccttgaccgttaaaatatcccttccggcattcaatgatgt

SEQ ID NO: 34401 - DNA, 561 bp, Muscodor strobelii
  misc_feature: SGI cDNA ID NO. 571888
  misc_feature: Encodes the peptide sequence at SEQ ID NO 34402
atgctgccgcgacgcacaatggacgatatgggaagcatgaacatggacacgagtcgatccaacacgatggtattcaccagttccatccagacgcctctctactcaacctcctggacaccaacaacggccgcaggatacgctggcaccatcatcttcctcattctcctcgcgatattcttccgcctcctcttagccgcaaaatcgctggcagaagtccgatggcttgaagcagagatagaccgccgctacgtggtagtccaggggaaagtcccgatctccgagcaagtttcgcgcgacgatttatcgaagaagatgatactgtctgaaaacggcgttgaagaggacgtggttgtggttcagcggagacaccagcctcctcgcccttggagactctcggttgatcccatccgcgctggaatcgatactgtgattgctggtgttgggtatctactcatgttggcagtcatgactttaaatgtgggatattttatagccgttttattcggcacgtttacaggatctttactagttggtcgatataacactggcgagcaacactag

SEQ ID NO: 34402 - protein, 186 aa, Muscodor strobelii
  misc_feature: SGI Peptide ID NO. 571888
  misc_feature (23)..(184): Pfam Id: PF04145 Pfam Desc: Ctr copper transporter family
  misc_feature (6)..(186): NCBI GI: 39970615 Blast Desc: MGG_02774 [Magnaporthe grisea 70-15] gi|149210089|ref|XP_001522419.1| MGCH7_ch7g526 [Magnaporthe grisea 70-15] gi|86196481|gb|EAQ71119.1| MGCH7_ch7g526 grisea
  misc_feature (11)..(186): NCBI GI: 171684901 Blast Desc: protein product [Podospora anserina] gi|170942411|emb|CAP68063.1| protein product [Podospora anserina]
  misc_feature (23)..(186): NCBI GI: 261353244 Blast Desc: low affinity copper transporter [Verticillium albo-atrum VaMs.102]
  misc_feature (25)..(186): NCBI GI: 154302662 Blast Desc: BC1G_09446 [Botryotinia fuckeliana B05.10] gi|150855193|gb|EDN30385.1| BC1G_09446 [Botryotinia fuckeliana B05.10]
  misc_feature (22)..(186): NCBI GI: 46128639 Blast Desc: FG08697.1 [Gibberella zeae PH-1]
  misc_feature (22)..(186): NCBI GI: 256734088 Blast Desc: NECHADRAFT_91955 [Nectria haematococca mpVI 77-13-4]
  misc_feature (24)..(186): NCBI GI: 85114001 Blast Desc: NCU07428 [Neurospora crassa OR74A] gi|28926404|gb|EAA35379.1| conserved [Neurospora crassa OR74A]
  misc_feature (25)..(186): NCBI GI: 156056448 Blast Desc: SS1G_05578 [Sclerotinia sclerotiorum 1980] gi|154703360|gb|EDO03099.1| SS1G_05578 [Sclerotinia sclerotiorum 1980]
  misc_feature (22)..(186): NCBI GI: 226293151 Blast Desc: low affinity copper transporter [Paracoccidioides brasiliensis Pb18]
  misc_feature (22)..(186): NCBI GI: 225683782 Blast Desc: conserved [Paracoccidioides brasiliensis Pb03]
MLPRRTMDDMGSMNMDTSRSNTMVFTSSIQTPLYSTSWTPTTAAGYAGTIIFLILLAIFFRLLLAAKSLAEVRWLEAEIDRRYVVVQGKVPISEQVSRDDLSKKMILSENGVEEDVVVVQRRHQPPRPWRLSVDPIRAGIDTVIAGVGYLLMLAVMTLNVGYFIAVLFGTFTGSLLVGRYNTGEQH

SEQ ID NO: 34403 - DNA, 417 bp, Muscodor strobelii
  misc_feature: SGI cDNA ID NO. 571889
  misc_feature: Encodes the peptide sequence at SEQ ID NO 34404
atgtataccaacctaatcatagtcatggcagcaatcttgacaggaactgtcgccgtcgcaccgcctgtagcgaacactacacttcagaacactacccatattaactacgactacatgtctatcgttaataaatggcgcggaaagcttgggttaagcgagctaatattgaacctcacactggagcaaaacgctctggacaccgtttatatagacaatggcagcatgatccatcatcttttcccggcagttttgctcaggtcatcgctcccggtaaacctgaagaatttgaacgggacttcgtgggtggatggctttgtgagattccatcccttccagggcttggcgacgtttgcaaaggaccattgggtcagggatgggagcactcacctgggcagacagggcacgcaaggattctga

SEQ ID NO: 34404 - protein, 138 aa, Muscodor strobelii
  misc_feature: SGI Peptide ID NO. 571889
  misc_feature (38)..(83): NCBI GI: 169597099 Blast Desc: SNOG_01331 [Phaeosphaeria nodorum SN15] gi|111069860|gb|EAT90980.1| SNOG_01331 [Phaeosphaeria nodorum SN15]
  misc_feature (38)..(128): NCBI GI: 189195070 Blast Desc: conserved [Pyrenophora tritici-repentis Pt-1C-BFP] gi|187979752|gb|EDU46378.1| conserved [Pyrenophora tritici-repentis Pt-1C-BFP]
MYTNLIIVMAAILTGTVAVAPPVANTTLQNTTHINYDYMSIVNKWRGKLGLSELILNLTLEQNALDTVYIDNGSMIHHLFPAVLLRSSLPVNLKNLNGTSWVDGFVRFHPFQGLATFAKDHWVRDGSTHLGRQGTQGF

SEQ ID NO: 34405 - DNA, 588 bp, Muscodor strobelii
  misc_feature: SGI cDNA ID NO. 571890
  misc_feature: Reduced expression when VOC is produced
  misc_feature: Encodes the peptide sequence at SEQ ID NO 34406
ggcaccatcaagtccgccgtgctcatctacttcaccctcctcggcctctcgcccatcctcaagtccctcacccgctccacctcctccgacagcatctgggccatgtccttctggctgctcgccatcaacatcttcttctacgactactcctccggcgtcggcgtcaaccaccccgcctccctctccaccaacgccgccctcatggcctccaccgtcctggcctcccgcctgccctctaccggacaggtctttagtctcaccatgtttagcatcgaggtctttggccttttccccgtcttccgccgatacgcccgacatcagagctggtcctatcacgtcaccctctccgtgctgctcgttgtcggcgctggcgctggcgttggcatgatactgggcggcgagaaagacggtgtctggccctggaagagcggtttgctgggcgttcttattgccgctgtcattgccattgtggctatgggcggttgtagttggtggcttattggcttgcagaagtataagaacgctatcaatgggccatgggaccaggcccgtcctatcattattagccggaggctctgggatgagtag

SEQ ID NO: 34406 - protein, 195 aa, Muscodor strobelii
  misc_feature: SGI Peptide ID NO. 571890
  misc_feature (4)..(118): Pfam Id: PF06432 Pfam Desc: Phosphatidylinositol N-acetylglucosaminyltransferase
  misc_feature (2)..(195): NCBI GI: 46128355 Blast Desc: FG08555.1 [Gibberella zeae PH-1]
  misc_feature (2)..(195): NCBI GI: 116193361 Blast Desc: CHGG_06398 [Chaetomium globosum CBS 148.51] gi|88182311|gb|EAQ89779.1| CHGG_06398 [Chaetomium globosum CBS 148.51]
  misc_feature (2)..(195): NCBI GI: 171684519 Blast Desc: protein product [Podospora anserina] gi|170942220|emb|CAP67872.1| protein product [Podospora anserina]
  misc_feature (1)..(195): NCBI GI: 156061055 Blast Desc: SS1G_02670 [Sclerotinia sclerotiorum 1980] gi|154700074|gb|EDN99812.1| SS1G_02670 [Sclerotinia sclerotiorum 1980]
  misc_feature (2)..(194): NCBI GI: 119492919 Blast Desc: phosphatidylinositol:UDP-GlcNAc transferase PIG-C [Neosartorya fischeri NRRL 181] gi|119411894|gb|EAW21837.1| phosphatidylinositol:UDP-GlcNAc transferase PIG-C [Neosartorya
  misc_feature (2)..(194): NCBI GI: 71000389 Blast Desc: phosphatidylinositol:UDP-GlcNAc transferase PIG-C [Aspergillus fumigatus Af293] gi|66852526|gb|EAL92851.1| phosphatidylinositol:UDP-GlcNAc transferase PIG-C [Aspergillus
  misc_feature (2)..(194): NCBI GI: 159127902 Blast Desc: phosphatidylinositol:UDP-GlcNAc transferase PIG-C [Aspergillus fumigatus A1163]
  misc_feature (2)..(194): NCBI GI: 45593798 Blast Desc: phosphatidylinositol:UDP-GlcNAc transferase PIG-C [Aspergillus fumigatus]
  misc_feature (1)..(194): NCBI GI: 212544470 Blast Desc: phosphatidylinositol:UDP-GlcNAc transferase PIG-C [Penicillium marneffei ATCC 18224] gi|210065358|gb|EEA19452.1| phosphatidylinositol:UDP-GlcNAc transferase PIG-C [Penicillium
  misc_feature (2)..(194): NCBI GI: 121704942 Blast Desc: phosphatidylinositol:UDP-GlcNAc transferase PIG-C [Aspergillus clavatus NRRL 1] gi|119398880|gb|EAW09308.1| phosphatidylinositol:UDP-GlcNAc transferase PIG-C [Aspergillus 1]
  misc_feature (1)..(185): SWISSPROT Homolog: EC 2.4.1.198 Phosphatidylinositol N-acetylglucosaminyltransferase
  misc_feature: Useful for introducing or modulating the production of volatile compounds
GTIKSAVLIYFTLLGLSPILKSLTRSTSSDSIWAMSFWLLAINIFFYDYSSGVGVNHPASLSTNAALMASTVLASRLPSTGQVFSLTMFSIEVFGLFPVFRRYARHQSWSYHVTLSVLLVVGAGAGVGMILGGEKDGVWPWKSGLLGVLIAAVIAIVAMGGCSWWLIGLQKYKNAINGPWDQARPIIISRRLWDE

SEQ ID NO: 34407 - DNA, 1014 bp, Muscodor strobelii
  misc_feature: SGI EST ID NO. CUFF.81665.0
  misc_feature: Variant of the nucleotide sequence at SEQ ID NO 34405
cggcaccatcaagtccgccgtgctcatctacttcaccctcctcggcctctcgcccatcctcaagtccctcacccgctccacctcctccgacagcatctgggccatgtccttctggctgctcgccatcaacatcttcttctacgactactcctccggcgtcggcgtcaaccaccccgcctccctctccaccaacgccgccctcatggcctccaccgtcctggcctcccgcctgccctctaccggacaggtctttagtctcaccatgtttagcatcgaggtctttggccttttccccgtcttccgccgatacgcccgacatcagagctggtcctatcacgtcaccctctccgtgctgctcgttgtcggcgctggcgctggcgttggcatgatactgggcggcgagaaagacggtgtctggccctggaagagcggtttgctgggcgttcttattgccgctgtcattgccattgtggctatgggcggttgtagttggtggcttattggcttgcagaagtataagaacgctatcaatgggccatgggaccaggcccgtcctatcattattagccggaggctctgggatgagtagaatcgatattcataaaagtgataataatgttgccaagttatcgtggttcgttatgcgcagcgtctccattgccgggtacaaatgaagccaagcttagatatgtgatctcatcaacacacacgagtgtctgcggatcgtgagcagcggtagatcgattgtagtgtcgtttcttgcttaccagcgtaagatataccctctatataggcatccaattatgaattgttcgcttggtgacagccttgctactatgtcgagctggcctggttgatgcttatctgtctctctattaaaaaaaaggcaaacagcgacggatctcgtagtgaggtcgcttctgcagacggtgctgtgtcatcccttatatccaaatcctttttagttccatgccatttcaggtgaatacatcgcactagtcttcccaacagaag

SEQ ID NO: 34408 - DNA, 1083 bp, Muscodor strobelii
  misc_feature: SGI cDNA ID NO. 571891
  misc_feature: Reduced expression when VOC is produced
  misc_feature: Encodes the peptide sequence at SEQ ID NO 34409
atgagtcttgctccggcggccagtataaaaagcagccaagaggcgctgacgcccggggaccgcggatcctccacgagcacgtcgacaccaaccgccttcgaggccgccgacaataaacactcggagcacgacaaggccgacggcaagacgaaaaagcgcggcttcttcggtctcggcaagaagaaacacgacgacaagccctccgcagagtcatcactgcccagcccaccaacatctcagaccagacagtcgacgaaccgaactaacacaacctctccgatccccctcgagagccccaacatgttgccctcatctcccggccggggactatattcctcgtccccgcgcatgagctcgccagcaggatcccagatattcgagcgagacgtgcaagaaagcgccatactgcccaattccccggcaatcccctcccacatccagacagagaatcacatccccccggtcctcgacgcctcatccgaagccatcaccgacgaccatctcaacccagacgccgtcgagatcgtgacccacacctcgcaccagccagccgctgtcaccgtaacgggcgcatccccctacgacaacccctctcagacctcctgggccgaagacctctccgccttctcagaaaaggacgaatcagcgtcgaactacggttcgttagactccagcgacgtgcgacgacttagcttcatctccttcgcagacgtagtccaagccgagcaggggccaccgggtctcgcgacgggatcccgggactcgatgcacatcgccggtctaacatccctgtcatccatgggcgtgcgatcgccgagcccgataagatcaccggtttcgtcgcaaggtcccgagacgtcgcctccgaatagcaagagtgggagtatgaagggcgttagtatgagcccgagcagaaaacccctcggcagtccgactacgacgacgaccgagtatggtctgagtcctggcgcgggagatctgaatattgagactatgagccaggccctgagacgaaccggtagtactgatcttagcgcggcgaggagtctaccgatcagtcctattgaggggccttctcgctga

SEQ ID NO: 34409 - protein, 360 aa, Muscodor strobelii
  misc_feature: SGI Peptide ID NO. 571891
  misc_feature (1)..(356): NCBI GI: 46137677 Blast Desc: FG10354.1 [Gibberella zeae PH-1]
  misc_feature (27)..(360): NCBI GI: 145605782 Blast Desc: MGG_06869 [Magnaporthe grisea 70-15] gi|145013569|gb|EDJ98210.1| MGG_06869 [Magnaporthe grisea 70-15]
  misc_feature (45)..(355): NCBI GI: 171693797 Blast Desc: protein product [Podospora anserina] gi|170946847|emb|CAP73651.1| protein product [Podospora anserina]
  misc_feature (18)..(355): NCBI GI: 85099808 Blast Desc: NCU04227 [Neurospora crassa OR74A] gi|21622369|emb|CAD36999.1| [Neurospora crassa] gi|28922379|gb|EAA31615.1| conserved [Neurospora crassa OR74A]
  misc_feature (31)..(358): NCBI GI: 156055280 Blast Desc: SS1G_04991 [Sclerotinia sclerotiorum 1980] gi|154702776|gb|EDO02515.1| SS1G_04991 [Sclerotinia sclerotiorum 1980]
  misc_feature (44)..(360): NCBI GI: 261351950 Blast Desc: conserved [Verticillium albo-atrum VaMs.102]
  misc_feature (44)..(358): NCBI GI: 154294768 Blast Desc: BC1G_13599 [Botryotinia fuckeliana B05.10] gi|150844557|gb|EDN19750.1| BC1G_13599 [Botryotinia fuckeliana B05.10]
  misc_feature (39)..(346): NCBI GI: 116197915 Blast Desc: CHGG_07113 [Chaetomium globosum CBS 148.51] gi|88178392|gb|EAQ85860.1| CHGG_07113 [Chaetomium globosum CBS 148.51]
  misc_feature (90)..(355): NCBI GI: 261195807 Blast Desc: conserved [Ajellomyces dermatitidis SLH14081] gi|239587440|gb|EEQ70083.1| conserved [Ajellomyces dermatitidis SLH14081]
  misc_feature (41)..(355): NCBI GI: 154281261 Blast Desc: [Ajellomyces capsulatus NAm1] gi|150411622|gb|EDN07010.1| [Ajellomyces capsulatus NAm1]
  misc_feature: Useful for introducing or modulating the production of volatile compounds
MSLAPAASIKSSQEALTPGDRGSSTSTSTPTAFEAADNKHSEHDKADGKTKKRGFFGLGKKKHDDKPSAESSLPSPPTSQTRQSTNRTNTTSPIPLESPNMLPSSPGRGLYSSSPRMSSPAGSQIFERDVQESAILPNSPAIPSHIQTENHIPPVLDASSEAITDDHLNPDAVEIVTHTSHQPAAVTVTGASPYDNPSQTSWAEDLSAFSEKDESASNYGSLDSSDVRRLSFISFADVVQAEQGPPGLATGSRDSMHIAGLTSLSSMGVRSPSPIRSPVSSQGPETSPPNSKSGSMKGVSMSPSRKPLGSPTTTTTEYGLSPGAGDLNIETMSQALRRTGSTDLSAARSLPISPIEGPSR

SEQ ID NO: 34410 - DNA, 3374 bp, Muscodor strobelii
  misc_feature: SGI EST ID NO. CUFF.82094.1
  misc_feature: Variant of the nucleotide sequence at SEQ ID NO 34408
aaagaaggaggccctgtcgatcctgacaggaacaggtttacgccggcaaacctacaagacagaaatccgttttctgtcgcggcaatgcataacggacacaatacttgtggtacaagaaacagattcttgtccgggtcagaaaccgatttttgcccagagtgactgtttcaagaagatcacactaatccgtagcgtacaaatatccggacattggtagacgagtatatcaatatatgtgtaacagcatcatcactatccttgaagatttacctcctccatcctcatagcctacttcactgcctccaaagcgtgagacgtaggacctgtctggcgatcagcgggaatttactcagacccgtcacacttacttattgactatcatctggctcgctagccactattcaaagtttattgccaccatctctcaagctgattcgctgctcaaagtcacagtccttacacacttgtacagatcgatcgtggtctgatggttgcacttagaaaaagtgccgcgggtgcctgacacatagaacatagagcgaaaacaaggaactacctagttcgcgccggcctaaccaagagtcgcatttacctgcgaaaggcgagtctgcgatacatgcggcaccaacaaaaattgcgcatgcaggtgtcgattcacacgatttgaaatctgagacgtgcatgtggccgggccttgatcgtctcaacctgttattaagcctcgatgatttcctgattcaaaccggaaatccttgacgaagcgacccaaacacataaacacgtaaagtcacgctctcatcgttcgacggcagggcaggcagccagaaataagaaagttgcgttgttcctgtgatctatttattagattgtcaagccaggggtgtcgactgtcttgcgaacccctcgtctccgaagctgcgtgcctcccaagctgtcacaaggtgcactcgtcagtccaacgaggcgcgatttcattatcgttgattgtcggaaacccggagatcaggacttgccgccacaagtcgtgtctaccgtatcttcccctctctgcaatcgaccttccctccactgagacggctgcatcctcgcggtcgcaatccatatccatcagcaggacagaaaaaatcaatatcgacatagtgtcgttcctgcgggcctgcaggctttgcatccatcgacgtgcattgcagcgcttgtaagcgcatcgccctcgccgcctgtactacccacaagcgacggcggcaaccgatagagacaggcttgaacgggcaatagaggggcggacttgatttagtagcgacgcaggcgtcctcgacaattacaatccactagacagcaaacacgccagtcgacacttcccgctttttcatctatcggattgtttcaaagaaagagaacaggaattgcagtaccttactactagcttatacttaggtcttggtcgctattgtcgggaaccaagtaacaagattgaaggtgtcagtcagtcagcccatccgcactagagtctgacaccgctctctctgtgtcgtcgatcgaaccgacatttcattcaatcaatcaaccgcaattacgacatctgacacggggcaatatgagtcttgctccggcggccagtataaaaagcagccaagaggcgctgacgcccggggaccgcggatcctccacgagcacgtcgacaccaaccgccttcgaggccgccgacaataaacactcggagcacgacaaggccgacggcaagacgaaaaagcgcggcttcttcggtctcggcaagaagaaacacgacgacaagccctccgcagagtcatcactgcccagcccaccaacatctcagaccagacagtcgacgaaccgaactaacacaacctctccgatccccctcgagagccccaacatgttgccctcatctcccggccggggactatattcctcgtccccgcgcatgagctcgccagcaggatcccagatattcgagcgagacgtgcaagaaagcgccatactgcccaattccccggcaatcccctcccacatccagacagagaatcacatccccccggtcctcgacgcctcatccgaagccatcaccgacgaccatctcaacccagacgccgtcgagatcgtgacccacacctcgcaccagccagccgctgtcaccgtaacgggcgcatccccctacgacaacccctctcagacctcctgggccgaagacctctccgccttctcagaaaaggacgaatcagcgtcgaactacggttcgttagactccagcgacgtgcgacgacttagcttcatctccttcgcagacgtagtccaagccgagcaggggccaccgggtctcgcgacgggatcccgggactcgatgcacatcgccggtctaacatccctgtcatccatgggcgtgcgatcgccgagcccgataagatcaccggtttcgtcgcaaggtcccgagacgtcgcctccgaatagcaagagtgggagtatgaagggcgttagtatgagcccgagcagaaaacccctcggcagtccgactacgacgacgaccgagtatggtctgagtcctggcgcgggagatctgaatattgagactatgagccaggccctgagacgaaccggtagtactgatcttagcgcggcgaggagtctaccgatcagtcctattgaggggccttctcgctgattcttttgtcaactagtttgactgagtggctatatcatggtcgattggactgacgccgacatcgagtacaaatttcgagtgtctgggtgtcaagagggaaggttatcgaaagcaaatatcttgaatttttttggaagcacactggttatacctcgtcttcgtctgttgctttttggccatatcggcatgtcagggttttacttgttttttacttttatcgctgggagtcaactgcgcgcgcgaactttaaaccatacccaatccgtttgataaaaacattttgctgctgctttcttcctgctttggaggtgtcgggtatatgcgcttgggaatggagttgggaagtcagttaccctgtgtgaggaacttttagtgttggtcggctccgtttctgagggacggtgacggatgaattggaactgatcatggtttatgaggctcttttaggagcgaaatatgatgtggagaggaggggtttgggatggcttaactgtaagagatggggaatgtagctgttaggttgttgtgtgtggcgaaagagagagaggagagaaggggtagtttgtcgtgacagaatttgattcccctgttcaaaatcccggattcatttttggttcgtgatgtgacttcgagttgtatatgtaattgagacgaggtaccttcgtgagcttcacatacaagtggtggtagagctgtg

SEQ ID NO: 34411 - DNA, 636 bp, Muscodor strobelii
  misc_feature: SGI cDNA ID NO. 571892
  misc_feature: Reduced expression when VOC is produced
  misc_feature: Encodes the peptide sequence at SEQ ID NO 34412
atggagaccaggcaattaataaagcccttaaacgggctctctctcaccaccaccctcacgcgatcatccgcatccaaaacgatatgctcgtcagtcgcaagccggcgtcaccaatccaccacctcgcggacgaaaaaagccctcaagatcccaccgcacccagacttcctgacaccgcaatccggagccaaccacataatctacaacccgccgccgtccgccccaaccgtcttccacacccccttcaaattcctccccaagtccgatcctcgacggcaagcaaacctcgtggcacacctgcgctccgccatatcatccgcgtccaccgccgccgtcccaccgcccatcaacgactcagaacttaggcagaagcagtacaacgtgactaaggagcaagtcgccgagatgcgcaagctgaggactgagaacccggcgaagtggagcgtgttgaagcttgcgaagaagtacgattgcacgcccatgttcatcatgatgtgtgtccatgcgccgcctgaacaccagaagaaggagtacgagaggaaggaggctatcaaggcgaggtggggccccgtcaggacgaaggctagggaggagaggaagaagaggaaggagttgttgctttcgggtgggttatag

SEQ ID NO: 34412 - protein, 211 aa, Muscodor strobelii
  misc_feature: SGI Peptide ID NO. 571892
  misc_feature (1)..(211): NCBI GI: 261351949 Blast Desc: conserved [Verticillium albo-atrum VaMs.102]
  misc_feature (31)..(205): NCBI GI: 156055282 Blast Desc: SS1G_04992 [Sclerotinia sclerotiorum 1980] gi|154702777|gb|EDO02516.1| SS1G_04992 [Sclerotinia sclerotiorum 1980]
  misc_feature (15)..(211): NCBI GI: 171693799 Blast Desc: protein product [Podospora anserina] gi|170946848|emb|CAP73652.1| protein product [Podospora anserina]
  misc_feature (31)..(205): NCBI GI: 154294766 Blast Desc: BC1G_13598 [Botryotinia fuckeliana B05.10] gi|150844556|gb|EDN19749.1| BC1G_13598 [Botryotinia fuckeliana B05.10]
  misc_feature (6)..(211): NCBI GI: 85099800 Blast Desc: NCU04225 [Neurospora crassa OR74A] gi|21622368|emb|CAD36998.1| related to ribosomal protein YmL20 precursor, mitochondrial [Neurospora crassa] [Neurospora crassa
  misc_feature (31)..(211): NCBI GI: 39960890 Blast Desc: MGG_09480 [Magnaporthe grisea 70-15] gi|145010976|gb|EDJ95632.1| MGG_09480 [Magnaporthe grisea 70-15]
  misc_feature (1)..(211): NCBI GI: 256731871 Blast Desc: NECHADRAFT_100656 [Nectria haematococca mpVI 77-13-4]
  misc_feature (29)..(204): NCBI GI: 145245613 Blast Desc: An11g11170 [Aspergillus niger] gi|134079780|emb|CAK40915.1| protein product [Aspergillus niger]
  misc_feature (36)..(211): NCBI GI: 116197911 Blast Desc: CHGG_07111 [Chaetomium globosum CBS 148.51] gi|88178390|gb|EAQ85858.1| CHGG_07111 [Chaetomium globosum CBS 148.51]
  misc_feature (29)..(204): NCBI GI: 71000747 Blast Desc: 60S ribosomal protein L20 [Aspergillus fumigatus Af293] gi|66852692|gb|EAL93017.1| 60S ribosomal protein L20, [Aspergillus fumigatus Af293] gi|159128069|gb|EDP53184.1| 60S
  misc_feature: Useful for introducing or modulating the production of volatile compounds
METRQLIKPLNGLSLTTTLTRSSASKTICSSVASRRHQSTTSRTKKALKIPPHPDFLTPQSGANHIIYNPPPSAPTVFHTPFKFLPKSDPRRQANLVAHLRSAISSASTAAVPPPINDSELRQKQYNVTKEQVAEMRKLRTENPAKWSVLKLAKKYDCTPMFIMMCVHAPPEHQKKEYERKEAIKARWGPVRTKAREERKKRKELLLSGGL

SEQ ID NO: 34413 - DNA, 1311 bp, Muscodor strobelii
  misc_feature: SGI cDNA ID NO. 571893
  misc_feature: Reduced expression when VOC is produced
  misc_feature: Encodes the peptide sequence at SEQ ID NO 34414
atggtgatctttgtagatctcgacgacgaggccgatcccccgcagaatttcttcgagtacggtgatttgctgggcgataggacgaaacatctgcatcagcaggaactggctgctattggtgcttgtgatccaattccacctgagatacgggagaaggatgaagttgtgcaagttgaagaacgagagaatccgaataggaaccgtatgacggaggcgcttggttgttatccgatcgtaacagcaatagtatcatctctagacctaaacacactcgacaacctctcccgaacatgtcgacagatccgcgaaggcctactccaataccggacaacgctcgtctctcgcacactccactgctacaaagagacacccccattagatcccgaagacaacgagatgaactggtactacatgagcataaacgagagctaccgtcggaataagacctgtgctcgggacatggtactcgagtgtcgacgttgcagtagagcagtctgtcgcaactgcgcaatccgccccccaggcccctcatccctcaaagcgcgccatcgtcgtctctgcgtgccctgcgcaaaagcacccctagtttccctgacacgaggctatctacacccaaacacgccaccagactccgatgaagtgcgccgcgccgtgtgtcaatgcgccagcgatcgggtctggctctgccagccctgcggtcggaacatcatcggcgcagaccaagattatcggtcaatatggcgctggcgcaaccaatacggcgaagtcctaggcggcgtcggaataggcgaaggcaaccgaggcgtaatctgcggccgcgaatcaacctgtctctcctcgaaagccctcgaacaagaaacagactgcgacgcgcacgactctcgctccctccattcccttccctcctcctcatccccctcaacaccgagtccctcctcatccctgatcatcagctccccgctttcactctctcctcactctccacacagtagtagtttaggtagtggtgcaagttcgggaagttccgagagtctccctcggacgccatcaccactgcagaacgttcacggtaatttgggattaaggccgggctacgcaagacatgaaatcgaaggcataggcggcagagtcaagacgctacacgtcaatatggtgcgtgtaggcgcttgtgtgcccgagtgggaagatgagaaagtaaagaatcagattcttgagcgtgaggttacgggtctgaggaggagttggtgtgggtggtgttggagggttatacctgctggtaaggatttgggagcggcgaagattgggaagtga

SEQ ID NO: 34414 - protein, 436 aa, Muscodor strobelii
  misc_feature: SGI Peptide ID NO. 571893
  misc_feature (1)..(428): NCBI GI: 116197909 Blast Desc: CHGG_07110 [Chaetomium globosum CBS 148.51] gi|88178389|gb|EAQ85857.1| CHGG_07110 [Chaetomium globosum CBS 148.51]
  misc_feature (1)..(429): NCBI GI: 39978005 Blast Desc: MGG_06887 [Magnaporthe grisea 70-15] gi|145013544|gb|EDJ98185.1| MGG_06887 [Magnaporthe grisea 70-15]
  misc_feature (66)..(428): NCBI GI: 256732257 Blast Desc: NECHADRAFT_93804 [Nectria haematococca mpVI 77-13-4]
  misc_feature (69)..(429): NCBI GI: 46137681 Blast Desc: FG10356.1 [Gibberella zeae PH-1]
  misc_feature (1)..(433): NCBI GI: 85099796 Blast Desc: NCU04224 [Neurospora crassa OR74A] gi|28922376|gb|EAA31612.1| NCU04224 [Neurospora crassa OR74A]
  misc_feature (1)..(433): NCBI GI: 21622367 Blast Desc: [Neurospora crassa]
  misc_feature (1)..(429): NCBI GI: 156055258 Blast Desc: SS1G_04980 [Sclerotinia sclerotiorum 1980] gi|154702765|gb|EDO02504.1| SS1G_04980 [Sclerotinia sclerotiorum 1980]
  misc_feature (1)..(429): NCBI GI: 154294790 Blast Desc: BC1G_13610 [Botryotinia fuckeliana B05.10] gi|150844568|gb|EDN19761.1| BC1G_13610 [Botryotinia fuckeliana B05.10]
  misc_feature (59)..(430): NCBI GI: 121708679 Blast Desc: conserved [Aspergillus clavatus NRRL 1] gi|119400360|gb|EAW10786.1| conserved [Aspergillus clavatus NRRL 1]
  misc_feature (1)..(429): NCBI GI: 238504286 Blast Desc: conserved [Aspergillus flavus NRRL3357] gi|220690845|gb|EED47194.1| conserved [Aspergillus flavus NRRL3357]
  misc_feature: Useful for introducing or modulating the production of volatile compounds
MVIFVDLDDEADPPQNFFEYGDLLGDRTKHLHQQELAAIGACDPIPPEIREKDEVVQVEERENPNRNRMTEALGCYPIVTAIVSSLDLNTLDNLSRTCRQIREGLLQYRTTLVSRTLHCYKETPPLDPEDNEMNWYYMSINESYRRNKTCARDMVLECRRCSRAVCRNCAIRPPGPSSLKARHRRLCVPCAKAPLVSLTRGYLHPNTPPDSDEVRRAVCQCASDRVWLCQPCGRNIIGADQDYRSIWRWRNQYGEVLGGVGIGEGNRGVICGRESTCLSSKALEQETDCDAHDSRSLHSLPSSSSPSTPSPSSSLIISSPLSLSPHSPHSSSLGSGASSGSSESLPRTPSPLQNVHGNLGLRPGYARHEIEGIGGRVKTLHVNMVRVGACVPEWEDEKVKNQILEREVTGLRRSWCGWCWRVIPAGKDLGAAKIGK

SEQ ID NO: 34415 - DNA, 3694 bp, Muscodor strobelii
  misc_feature: SGI EST ID NO. CUFF.82057.0
  misc_feature: Variant of the nucleotide sequence at SEQ ID NO 34413
acgctttcaagagtcaatgaccctcgcaccggtatcaagatcgaataccgagacagagttatcaagtactccaaattgaagcatgatattgggtctgtacgacttcaaacaccgcattagaatctttgatcttgatgtaagaacatatcaggtaaacccatgcgacactcatgaccccgagaccccaaaactgtccgatcacagggacaaacaatccagctcttggggttcggggccagtggaagttaccgtctggagaacggttgggtttaagtagcgacggtcttctgcatcatgttgtcccaattatatcttaacgccacacactatccagaatccatcccctctgtccttgtgcggatctccgattgcctgtccagtccagccgagggtcctgctcaatgccaccctacaattcgtaccagactgtacggcacgcccgtcagtatctggaacccgcaagaaagcaccccaaaccaggcaggtaggctcatcgtagtggatagacggatatgtatgcatgaattcccacacgagctctgcacgagcaagacgaatacagacgggatgatggggcacggtgcttcaatcgcgcaggtacttgcgtgatccttgtcggtgacgatacgattagccggattactctttacgacgtgcagctacgtattgtttcgtttcttggtcttagaggtcctacggacatccttctacactctagaatcctaagacatgacttcttcaatgtctagacaataacataactcattcctcaatccttcgaattccctacctgcgtgccctgcatagcccgagatcggattccggccgatgggaggacagagacagagacacttatagatctttgttatcacgttgtttcaacaacgacaacccgtgacgcagcgatggtgatctttgtagatctcgacgacgaggccgatcccccgcagaatttcttcgagtacggtgatttgctgggcgataggacgaaacatctgcatcagcaggaactggctgctattggtgcttgtgatccaattccacctgagatacgggagaaggatgaagttgtgcaagttgaagaacgagagaatccgaataggaaccgtatgacggaggcgcttggttgttatccgatcgtaacagcaatagtatcatctctagacctaaacacactcgacaacctctcccgaacatgtcgacagatccgcgaaggcctactccaataccggacaacgctcgtctctcgcacactccactgctacaaagagacacccccattagatcccgaagacaacgagatgaactggtactacatgagcataaacgagagctaccgtcggaataagacctgtgctcgggacatggtactcgagtgtcgacgttgcagtagagcagtctgtcgcaactgcgcaatccgccccccaggcccctcatccctcaaagcgcgccatcgtcgtctctgcgtgccctgcgcaaaagcacccctagtttccctgacacgaggctatctacacccaaacacgccaccagactccgatgaagtgcgccgcgccgtgtgtcaatgcgccagcgatcgggtctggctctgccagccctgcggtcggaacatcatcggcgcagaccaagattatcggtcaatatggcgctggcgcaaccaatacggcgaagtcctaggcggcgtcggaataggcgaaggcaaccgaggcgtaatctgcggccgcgaatcaacctgtctctcctcgaaagccctcgaacaagaaacagactgcgacgcgcacgactctcgctccctccattcccttccctcctcctcatccccctcaacaccgagtccctcctcatccctgatcatcagctccccgctttcactctctcctcactctccacacagtagtagtttaggtagtggtgcaagttcgggaagttccgagagtctccctcggacgccatcaccactgcagaacgttcacggtaatttgggattaaggccgggctacgcaagacatgaaatcgaaggcataggcggcagagtcaagacgctacacgtcaatatggtgcgtgtaggcgcttgtgtgcccgagtgggaagatgagaaagtaaagaatcagattcttgagcgtgaggttacgggtctgaggaggagttggtgtgggtggtgttggagggttatacctgctggtaaggatttgggagcggcgaagattgggaagtgatgatgaatactataagtaccccaagtccccaggcatgattgaggactaggtggtgttttgatgggctgtttgaatgtgtgtttggtttgggtttaggagtttggttgattaaataattcttaaggcgcattaggcatggagcatacgggtatagggagggtatataagcattgtaacgaatttatatcatgactgaatgttgagtttgagtcgttgtagatttggttgtgatcgaatttatacaaaggaattaaaatacagcctagctacaatacactacacaagagtgtgagctgagcgtgaggtatgtgagtttgatgtacacgtctttttctgatatacattggaagtgcgagtcggggggttcccatcttccgtcttttcctcgccaggtccgtgtctctatgcaaatggacaggtgcgggagccacgtttgtcgtagtgtacaggttattgagatttcgggttatatcgccggttggtcgcgcatgaggtcggtcacagtccattcctcgggtcgaagattcagtatcatcttcataaccaagccccatccgaaatcctccctcgtccccatctcaccaactcactataacccacccgaaagcaacaactccttcctcttcttcctctcctccctagccttcgtcctgacggggccccacctcgccttgatagcctccttcctctcgtactccttcttctggtgttcaggcggcgcatggacacacatcatgatgaacatgggcgtgcaatcgtacttcttcgcaagcttcaacacgctccacttcgccgggttctcagtcctcagcttgcgcatctcggcgacttgctccttagtcacgttgtactgcttctgcctaagttctgagtcgttgatgggcggtgggacggcggcggtggacgcggatgatatggcggagcgcaggtgtgccacgaggtttgcttgccgtcgaggatcggacttggggaggaatttgaagggggtgtggaagacggttggggcggacggcggcgggttgtagattatgtggttggctccggattgcggtgtcaggaagtctgggtgcggtgggatcttgagggcttttttcgtccgcgaggtggtggattggtgacgccggcttgcgactgacgagcatatcgttttggatgcggatgatcgcgtgagggtggtggtgagagagagcccgtttaagggctttattaattgcctggtctccatttggataggctgttaagtatatgtgcaaataatacaaaaaaggaatcgacagcaccttcacctcgaggagaggagatagccgggagacgagttgctggtagtgtggatggcgaatgtcgtcgtcctcgagctggcttgggaaatctgaagtttggatgctggcacaatgtaatccgagcttcgattggcaaatttcgacggaatctttcgcggcccggggttcaaggtcacgtggacaggcgtcgaccttctc

SEQ ID NO: 34416 - DNA, 579 bp, Muscodor strobelii
  misc_feature: SGI cDNA ID NO. 571894
  misc_feature: Encodes the peptide sequence at SEQ ID NO 34417
atgtccagccccaactcacggactgctttcgtgaccataggcgccaccgctggcttccgggctttacttgaggaagtcatatcaccaacggtccttgatgtactccggtcacttgaattcaccaacctcacagtgcaatgtggccccgacctcgaatatttcaacagcatcaagcccaaagacacgaacgggttgactataagtagtttcgactatgcgccagatctaaaaccatattaccggctggcctctgtcggcaaagatgagaatggcgaacgcgcaagaggtctcatcatctcgcatgcaggatccggcagcatcatcgaagctctcgagttcgattcgaccctcatcgccgttcccaacccgtcgctcatggacaaccaccaggtcgagatcgcagaggagatggagtctcaggggttcttgatccatggcacacttggatccgttgataaggccattgacaggatcaagacgaccacactacggaaatggcctccaggcccatccccggggtcggcttatcaggagggcggcctttgggaggctattaatgaattgatgcctcaacaatga

SEQ ID NO: 34417 - protein, 192 aa, Muscodor strobelii
  misc_feature: SGI Peptide ID NO. 571894
  misc_feature (8)..(188): Pfam Id: PF04101 Pfam Desc: Glycosyltransferase family 28 C-terminal domain
  misc_feature (8)..(164): Pfam Id: PF04101 Pfam Desc: Glycosyltransferase family 28 C-terminal domain
  misc_feature (2)..(179): NCBI GI: 240106121 Blast Desc: UDP-N-acetylglucosamine transferase subunit Alg13, [Coccidioides posadasii C735 delta SOWgp]
  misc_feature (7)..(158): NCBI GI: 116201537 Blast Desc: CHGG_08653 [Chaetomium globosum CBS 148.51] gi|88177171|gb|EAQ84639.1| CHGG_08653 [Chaetomium globosum CBS 148.51]
  misc_feature (7)..(148): NCBI GI: 171677933 Blast Desc: protein product [Podospora anserina] gi|170937035|emb|CAP61694.1| protein product [Podospora anserina]
  misc_feature (7)..(168): NCBI GI: 238838493 Blast Desc: UDP-N-acetylglucosamine transferase subunit alg13 [Microsporum canis CBS 113480]
  misc_feature (2)..(168): NCBI GI: 261197271 Blast Desc: glycosyltransferase family 28 [Ajellomyces dermatitidis SLH14081] gi|239595668|gb|EEQ78249.1| glycosyltransferase family 28 [Ajellomyces dermatitidis SLH14081]
  misc_feature (2)..(168): NCBI GI: 239606657 Blast Desc: glycosyltransferase family 28 [Ajellomyces dermatitidis ER-3]
  misc_feature (7)..(143): NCBI GI: 154316793 Blast Desc: BC1G_03814 [Botryotinia fuckeliana B05.10] gi|150845426|gb|EDN20619.1| BC1G_03814 [Botryotinia fuckeliana B05.10]
  misc_feature (2)..(175): NCBI GI: 226289870 Blast Desc: UDP-N-acetylglucosamine transferase subunit alg13 [Paracoccidioides brasiliensis Pb18]
  misc_feature (2)..(175): NCBI GI: 225682469 Blast Desc: conserved [Paracoccidioides brasiliensis Pb03]
  misc_feature (2)..(175): NCBI GI: 226280987 Blast Desc: UDP-N-acetylglucosamine transferase subunit alg13 [Paracoccidioides brasiliensis Pb01]
  misc_feature (6)..(177): SWISSPROT Homolog: EC 2.4.1.141 N-acetylglucosaminyldiphosphodolichol N-acetylglucosaminyltransferase
MSSPNSRTAFVTIGATAGFRALLEEVISPTVLDVLRSLEFTNLTVQCGPDLEYFNSIKPKDTNGLTISSFDYAPDLKPYYRLASVGKDENGERARGLIISHAGSGSIIEALEFDSTLIAVPNPSLMDNHQVEIAEEMESQGFLIHGTLGSVDKAIDRIKTTTLRKWPPGPSPGSAYQEGGLWEAINELMPQQ

SEQ ID NO: 34418 - DNA, 1069 bp, Muscodor strobelii
  misc_feature: SGI EST ID NO. CUFF.81709.1
  misc_feature: Variant of the nucleotide sequence at SEQ ID NO 34416
gacggttagccatgcgaggtttgattgggctgtcgtttgactgcacaagagctgcaggcggctctccagtgtgggacctgctgctggctcgatgcttcagggacaacacgctaccctgtaagtgacacctcacgaagcaatcaagtcaacatgagacggtaacacatatccaaatgacaactggccactgttcaattgagataagtcagatcttctacagtcagagttgtcctaatgcctcatcaagatgtccagccccaactcacggactgctttcgtgaccataggcgccaccgctggcttccgggctttacttgaggaagtcatatcaccaacggtccttgatgtactccggtcacttgaattcaccaacctcacagtgcaatgtggccccgacctcgaatatttcaacagcatcaagcccaaagacacgaacgggttgactataagtagtttcgactatgcgccagatctaaaaccatattaccggctggcctctgtcggcaaagatgagaatggcgaacgcgcaagaggtctcatcatctcgcatgcaggtacgcgtcaatctgcacaatggccccccggtacatcccaagcctcattcgtggtaggatccggcagcatcatcgaagctctcgagttcgattcgaccctcatcgccgttcccaacccgtcgctcatggacaaccaccaggtcgagatcgcagaggagatggagtctcaggggttcttgatccatggcacacttggatccgttgataaggccattgacaggatcaagacgaccacactacggaaatggcctccaggcccatccccggggtcggcttatcaggagggcggcctttgggaggctattaatgaattgatgcctcaacaatgaaataactcaacacggccagatcagtacgaaactagatttcgtcctagctgtgacttggaagatctttgagtacattatcctgcgttgtgtttggtatcattacccaataagtatgtcgttgtcttacgtttggattggtgatttgtagctgtcttaatgtcactttgaagccatgttcgaagccag

SEQ ID NO: 34419 - DNA, 1110 bp, Muscodor strobelii
  misc_feature: SGI cDNA ID NO. 571895
  misc_feature: Reduced expression when VOC is produced
  misc_feature: Encodes the peptide sequence at SEQ ID NO 34420
atggcttctgcagtgcaatcgctgcggctgtctttacgacgggcagctacagccacgaggaaatctgccgcgcccgtcaaattcgtctcatcccgaccacacctcgctgtccgacctttttcctccaccccattgcgaaaccagcccgctagagacgaagaagatgacgacgatatcgacgaagacggtgacttggagatgctcgacgacgatggcgctcatcttaccacccgagagatggacgatctcatgaaggccacccgcaccggcgagcgtgtcagcaccaaccttcgcaaaattctcaaccagacaccccccttgacacggaaacaaaaaggaacattttggaacgacgaggaggaggatcccgacttgatggtacccgaagacgatccagatgacttcaacgaggacgatatcacctctctcgcccacggcaaattcgaggagttccgcgagtacagagagtatgcccgcatcgccgcctggcagatgccccttttgtcaaaactagcaacaccattcgaagccccctccgcccaacaacccctacgattccgatacacaacctacatgggcgaatcccaccccgccgagcaaaaagtcgtcgtcgagttctccccccaagacatgcccctgaacgaggcccaacagcagaagctcaggaagctgttaggcgctaggtggaaccccgagacagacatcgccaagatgagctgcgagcagttcgaccacccggcccagaacaagagatacctcagcgatctcgtcaataagctcgtcacagaggccaaggacggaaaagacacattcgaagacgtacccctcgacacgagacatcacaaattcaaagtccaccataaattccccaaggaatggcgcatgaccgaggaacggaagaaggagattgaagatgcgagacagcaggccctgttgttggatgagagtaaggagaaagctggcttgttggttgatgggaaggagaagattgagaggcattttgcgcccgtttatgttccacaggagcacaggcagaaggttcctgagtatcttagggcgaaggcgggtgctgcgggtaggaatgcgggtgctaggttgcctggttattag

SEQ ID NO: 34420 - protein, 369 aa, Muscodor strobelii
  misc_feature: SGI Peptide ID NO. 571895
  misc_feature (1)..(368): NCBI GI: 7899415 Blast Desc: conserved [Neurospora crassa]
  misc_feature (1)..(368): NCBI GI: 164426619 Blast Desc: NCU03926 [Neurospora crassa OR74A] gi|157071409|gb|EAA28329.2| [Neurospora crassa OR74A]
  misc_feature (1)..(321): NCBI GI: 116201535 Blast Desc: CHGG_08652 [Chaetomium globosum CBS 148.51] gi|88177170|gb|EAQ84638.1| CHGG_08652 [Chaetomium globosum CBS 148.51]
  misc_feature (67)..(361): NCBI GI: 39971911 Blast Desc: MGG_07271 [Magnaporthe grisea 70-15] gi|145019775|gb|EDK04003.1| MGG_07271 [Magnaporthe grisea 70-15]
  misc_feature (1)..(346): NCBI GI: 261355722 Blast Desc: 37S ribosomal protein S24 [Verticillium albo-atrum VaMs.102]
  misc_feature (1)..(332): NCBI GI: 171677935 Blast Desc: protein product [Podospora anserina] gi|170937036|emb|CAP61695.1| protein product [Podospora anserina]
  misc_feature (1)..(360): NCBI GI: 154316795 Blast Desc: BC1G_03815 [Botryotinia fuckeliana B05.10] gi|150845427|gb|EDN20620.1| BC1G_03815 [Botryotinia fuckeliana B05.10]
  misc_feature (1)..(366): NCBI GI: 46136885 Blast Desc: FG09958.1 [Gibberella zeae PH-1]
  misc_feature (114)..(365): NCBI GI: 256731725 Blast Desc: NECHADRAFT_80386 [Nectria haematococca mpVI 77-13-4]
  misc_feature (108)..(330): NCBI GI: 238504246 Blast Desc: conserved [Aspergillus flavus NRRL3357] gi|220690825|gb|EED47174.1| conserved [Aspergillus flavus NRRL3357]
  misc_feature: Useful for introducing or modulating the production of volatile compounds
MASAVQSLRLSLRRAATATRKSAAPVKFVSSRPHLAVRPFSSTPLRNQPARDEEDDDDIDEDGDLEMLDDDGAHLTTREMDDLMKATRTGERVSTNLRKILNQTPPLTRKQKGTFWNDEEEDPDLMVPEDDPDDFNEDDITSLAHGKFEEFREYREYARIAAWQMPLLSKLATPFEAPSAQQPLRFRYTTYMGESHPAEQKVVVEFSPQDMPLNEAQQQKLRKLLGARWNPETDIAKMSCEQFDHPAQNKRYLSDLVNKLVTEAKDGKDTFEDVPLDTRHHKFKVHHKFPKEWRMTEERKKEIEDARQQALLLDESKEKAGLLVDGKEKIERHFAPVYVPQEHRQKVPEYLRAKAGAAGRNAGARLPGY

SEQ ID NO: 34421 - DNA, 1267 bp, Muscodor strobelii
  misc_feature: SGI EST ID NO. CUFF.81759.0
  misc_feature: Variant of the nucleotide sequence at SEQ ID NO 34419
tgagagtgccgggacggtgtctgccatcacccattgaccactatggcttctgcagtgcaatcgctgcggctgtctttacgacgggcagctacagccacgaggaaatctgccgcgcccgtcaaattcgtctcatcccgaccacacctcgctgtccgacctttttcctccaccccattgcgaaaccagcccgctagagacgaagaagatgacgacgatatcgacgaagacggtgacttggagatgctcgacgacgatggcgctcatcttaccacccgagagatggacgatctcatgaaggccacccgcaccggcgagcgtgtcagcaccaaccttcgcaaaattctcaaccagacaccccccttgacacggaaacaaaaaggaacattttggaacgacgaggaggaggatcccgacttgatggtacccgaagacgatccagatgacttcaacgaggacgatatcacctctctcgcccacggcaaattcgaggagttccgcgagtacagagagtatgcccgcatcgccgcctggcagatgccccttttgtcaaaactagcaacaccattcgaagccccctccgcccaacaacccctacgattccgatacacaacctacatgggcgaatcccaccccgccgagcaaaaagtcgtcgtcgagttctccccccaagacatgcccctgaacgaggcccaacagcagaagctcaggaagctgttaggcgctaggtggaaccccgagacagacatcgccaagatgagctgcgagcagttcgaccacccggcccagaacaagagatacctcagcgatctcgtcaataagctcgtcacagaggccaaggacggaaaagacacattcgaagacgtacccctcgacacgagacatcacaaattcaaagtccaccataaattccccaaggaatggcgcatgaccgaggaacggaagaaggagattgaagatgcgagacagcaggccctgttgttggatgagagtaaggagaaagctggcttgttggttgatgggaaggagaagattgagaggcattttgcgcccgtttatgttccacaggagcacaggcagaaggttcctgagtatcttagggcgaaggcgggtgctgcgggtaggaatgcgggtgctaggttgcctggttattaggcgtgtattatagaggtgtagatattagagaaggaaagggggggctgtataaatgtatattgttgtaacattcaaaggcggtgtaaacttgtcactttggtgagttggatgtcag

SEQ ID NO: 34422 - DNA, 555 bp, Muscodor strobelii
  misc_feature: SGI cDNA ID NO. 571896
  misc_feature: Encodes the peptide sequence at SEQ ID NO 34423
atgccacccgtgcgaactgacgactcccggcgagctggtgccccagagctatccgcttttaaggatacgtcagtgacacggcagaatgacgatcttgcccgtcgcatgctaggacctatacacaactctaaagaccaaggcatcacggatcattatgaaggggaaatggtccttgacacatgggaacccaagcttcgtgaagccgaccctgttattgcccatgatgcaccggctcataagctcgcaatagaagcattgatcaaacctaagaaacgaatcagagaagaaatcaaacagacgagccgccggccaccgatacctacctcttcagcacatcaaccaaaggctggttacgtgccgcagggatcaacagtgccggtggcaggggcctgggctgagcctgtcctggtgttgcgtgttggtggtgttggtgctaatactagtgcctatcccatcgccatctctgcgaaaggcttggcatcagcccatcaggcccttactcatgtatctcaaagcaggaactcgtcattatctaccgatagggccataatgtag

SEQ ID NO: 34423 - protein, 184 aa, Muscodor strobelii
  misc_feature: SGI Peptide ID NO. 571896
MPPVRTDDSRRAGAPELSAFKDTSVTRQNDDLARRMLGPIHNSKDQGITDHYEGEMVLDTWEPKLREADPVIAHDAPAHKLAIEALIKPKKRIREEIKQTSRRPPIPTSSAHQPKAGYVPQGSTVPVAGAWAEPVLVLRVGGVGANTSAYPIAISAKGLASAHQALTHVSQSRNSSLSTDRAIM

SEQ ID NO: 34424 - DNA, 269 bp, Muscodor strobelii
  misc_feature: SGI EST ID NO. CUFF.81723.0
  misc_feature: Variant of the nucleotide sequence at SEQ ID NO 34422
ctcatctatcaggttctccaacgtgataagacgtgccccaaaaaaggtcacttagacctatccggatcgacctgtgttctgtgcaatgggaaaaggagacaatcttctattcgacctggacaaacacatacatccgcattgcaaccagccagccatcgtctttggtgcgcgccttatcggcatcatgccacccgtgcgaactgacgactcccggcgagctggtgccccagagctatccgcttttaaggatacgtcagtgacacggcaga

SEQ ID NO: 34425 - DNA, 1587 bp, Muscodor strobelii
  misc_feature: SGI cDNA ID NO. 571897
  misc_feature: Encodes the peptide sequence at SEQ ID NO 34426
atgggcaaccagcaaggtttcagtcgtactatcagtagtctagttgagcacgaccaaaactgggatgtgtggacggctagtgtggctctgtttctatgcttctccaatggtcctgggatcagacaccggctagcagccgagttcaacagcgacaggctcgacaggctcttgaaactaagctatttatcgacccacgcaatcatgacccgcatcaatctacttgtctccctgttgtcggtccagctcgcgcggctagctagacctccgggttcagcagactcagctttcgtcagagcgtttgtttctattttggcctcactgatatctcgggctttgtataatgatctgtttcggaatggcgcccgagcacttgaattccttgaccttttctctggcgtgacccccaagtggacttacggcactgtcacaaaggtgctacttccacaggcaacattggacacgtcgcttccatttcaggggccagagacttattatcagcacaaatcgctcgatgacaacacggccatgattcgacttatacgcttgcttccatcaaatgatcccctctctcccgttcgttgcgaggttcttcatacgtctaggaccaatgctccatgctatgatgcgctctcatatacgtggggcgatcaagataccggctgcgtcatatactgtggatcaaaacgcctcctcatcaagcataaccttttcttagccctcgctaggctcagactccaggacgatgagcgattgatctgggttgatgctgtgtgtattgatcagaaagatgaattggaaaagaccgctcaagttcttatgatgaaagagacataccgtaaggctcagaaggtgatcatatggcttggtggtgatgagggcgatagccacagtgctactatcctgcttgagaagcttgctaaggtgctgcgacgccggcgccgctcgttgggccctgacaatactcatgtcgaccccacccaggtcgcgatacagttgtttaaggaagatatcacacatctcgggttacccccaagcgctgatatgagttatgacgccttgtcgagactgttcagcagaacgtattttggccgcgtatggatcattcaggaaattgtcatggcttgtgatacgcaaattatgtgtggtacctctcctgtctcgctgaactgggacgacttggtgatagtgatgcattctatgccagatctggtagcgtacacgaatacgataccttctgccctagactttatccagcttattgagcggacacgagcagccgtgatcaacggtcacagtcaatgtcttacgctgtcgaagcttctttctcgtcatagctgtgctcaggccagtgatgcaaaagataacatcatcggcataataggcctgatgagcagccggccagacatcaggatcgattatagtcaagacactagagacatcgaccacgattcagcattggccccgttgaatgttacagctggaggcatgaagacggcctcatgggtcccctactggcagaagcgtgcggcagacatgccacctacaatgtcaccgtccgcgaagagcgaggtggtttgggattcatag

SEQ ID NO: 34426 - protein, 528 aa, Muscodor strobelii
  misc_feature: SGI Peptide ID NO. 571897
  misc_feature (207)..(370): Pfam Id: PF06985 Pfam Desc: Heterokaryon incompatibility protein (HET)
  misc_feature (161)..(521): NCBI GI: 226287224 Blast Desc: conserved [Paracoccidioides brasiliensis Pb18]
  misc_feature (161)..(521): NCBI GI: 225683598 Blast Desc: [Paracoccidioides brasiliensis Pb03]
  misc_feature (161)..(464): NCBI GI: 171683161 Blast Desc: protein product [Podospora anserina] gi|170941540|emb|CAP67192.1| protein product [Podospora anserina]
  misc_feature (149)..(521): NCBI GI: 239612306 Blast Desc: conserved [Ajellomyces dermatitidis ER-3]
  misc_feature (149)..(521): NCBI GI: 261202540 Blast Desc: conserved [Ajellomyces dermatitidis SLH14081] gi|239590581|gb|EEQ73162.1| conserved [Ajellomyces dermatitidis SLH14081]
  misc_feature (164)..(464): NCBI GI: 164423925 Blast Desc: NCU07527 [Neurospora crassa OR74A] gi|157070290|gb|EAA29804.2| [Neurospora crassa OR74A]
  misc_feature (165)..(505): NCBI GI: 256730222 Blast Desc: NECHADRAFT_82497 [Nectria haematococca mpVI 77-13-4]
  misc_feature (177)..(513): NCBI GI: 256722966 Blast Desc: NECHADRAFT_86875 [Nectria haematococca mpVI 77-13-4]
  misc_feature (123)..(517): NCBI GI: 238498684 Blast Desc: conserved [Aspergillus flavus NRRL3357] gi|220693851|gb|EED50196.1| conserved [Aspergillus flavus NRRL3357]
  misc_feature (159)..(505): NCBI GI: 115401102 Blast Desc: [Aspergillus terreus NIH2624] gi|114190080|gb|EAU31780.1| [Aspergillus terreus NIH2624]
MGNQQGFSRTISSLVEHDQNWDVWTASVALFLCFSNGPGIRHRLAAEFNSDRLDRLLKLSYLSTHAIMTRINLLVSLLSVQLARLARPPGSADSAFVRAFVSILASLISRALYNDLFRNGARALEFLDLFSGVTPKWTYGTVTKVLLPQATLDTSLPFQGPETYYQHKSLDDNTAMIRLIRLLPSNDPLSPVRCEVLHTSRTNAPCYDALSYTWGDQDTGCVIYCGSKRLLIKHNLFLALARLRLQDDERLIWVDAVCIDQKDELEKTAQVLMMKETYRKAQKVIIWLGGDEGDSHSATILLEKLAKVLRRRRRSLGPDNTHVDPTQVAIQLFKEDITHLGLPPSADMSYDALSRLFSRTYFGRVWIIQEIVMACDTQIMCGTSPVSLNWDDLVIVMHSMPDLVAYTNTIPSALDFIQLIERTRAAVINGHSQCLTLSKLLSRHSCAQASDAKDNIIGIIGLMSSRPDIRIDYSQDTRDIDHDSALAPLNVTAGGMKTASWVPYWQKRAADMPPTMSPSAKSEVVWDS

SEQ ID NO: 34427 - DNA, 269 bp, Muscodor strobelii
  misc_feature: SGI EST ID NO. CUFF.81732.0
  misc_feature: Variant of the nucleotide sequence at SEQ ID NO 34425
cgcgccggccccttccacgtcatgcccaccatgggcaaccagcaaggtttcagtcgtactatcagtagtctagttgagcacgaccaaaactgggatgtgtggacggctagtgtggctctgtttctatgcttctccaatggtcctgggatcagacaccggctagcagccgagttcaacagcgacaggctcgacaggctcttgaaactaagctatttatcgacccacgcaatcagttggctcgttgagttggttgatctccttgacccgca

SEQ ID NO: 34428 - DNA, 1662 bp, Muscodor strobelii
  misc_feature: SGI cDNA ID NO. 571898
  misc_feature: Encodes the peptide sequence at SEQ ID NO 34429
atgccgacatctcagagtgacgccaactattaccccgtccacttaggggtatggaccaactggtcgcgtggtactgttttaggaccgacgctgactattacacggcaacaaggcgatctcctcattgcctttaccgcgctctttatcacctgggtcgctgaccgcggctggcgaatactgtctcttgccttgcatagacactactcatcaccaaatcctcgaggtgccttgcatcatcagaaccaggcaattctacgaaattatgattcccacgatagcattttacagctgagttccctgctgtgggtcaaccgaaacaagcataacagaatcttcaagccattactacttcttattttcgcgaccgcatacaccgtgatctttgcagccgcaagtggcttctcatcgcaaatctcgactgcagtaggaacagaagtgttaattagaagttcggactgcggatggttcggcagcgatatcgaattgacagatgccgacgcaatatctgttgcgcccaaactgtacgcacgagctgttagcaatgccgctaactatgccttgcaatgctactccgatgatagcagtgggatcctagattgcagtcggttggcagttcaaaagatacagtcaacaagtgatacaacagcaggttgtccatttgaaggcgacgtctgtcggagcgatgccaacctcattgttgattccggctttatgaacagccatgagcacttcggcctcaacacaccgccagacgagagaatgctcgtgagaatcgttgatcattgcgcacccatgaagaccgaaggctttactagccatagggtttcgactgccggaaacattacagtttaccattatgggaatattaccctcgatgatggtctggccgattacatggggacggcgaagtctatcgagtcacaatattcgtacatcattgcaaaagacacgttgcagatgattgctaattatcaactggacgccgaggtagcatatgtagaagatggaaacgtcaatagcgatacgtccgactttgtgccagcgagttccatcttccccctaaatgcagatctcctggtcgtcttccttgctggaaatggtgtcctacatacagcggcctctggcgatgagtggtatcgtgtatcaccgaccgcatcaagtattggccagacacagagcaatagtaccgcatctttcgaattctttcatccattagaagatgcctcgcctcttggttgtacccttcagtggcagttctgcagagagaaccaggagaattgtggcattttaggaagcttatcagatgcaactaatagcgctgctccattgttcggcatcgacggcaaatttgacacagatacacagtataacactactgctgcaagcaactttcactatttcgcgacgacgatacagaggtcaaacacaattcctggcatcttgagtcaaatgggccctactagcttaaaatctcaggacgagttggccagcgctcgacaagggccattgccgtctaatcaatggcaacttgacgttgctcattgggtcgacatcgaacttgcagccctccagttggccttcttgaacgcggcgtacttgagcccaacggaaacctccttgctcaagttccaaaatcaggagtacagcgtacagctcgtttag

SEQ ID NO: 34429 - protein, 553 aa, Muscodor strobelii
  misc_feature: SGI Peptide ID NO. 571898
  misc_feature (5)..(535): NCBI GI: 169615058 Blast Desc: SNOG_10683 [Phaeosphaeria nodorum SN15] gi|111060957|gb|EAT82077.1| SNOG_10683 [Phaeosphaeria nodorum SN15]
  misc_feature (1)..(524): NCBI GI: 115399382 Blast Desc: [Aspergillus terreus NIH2624] gi|114192163|gb|EAU33863.1| [Aspergillus terreus NIH2624]
  misc_feature (13)..(531): NCBI GI: 189194015 Blast Desc: conserved [Pyrenophora tritici-repentis Pt-1C-BFP] gi|187978910|gb|EDU45536.1| conserved [Pyrenophora tritici-repentis Pt-1C-BFP]
  misc_feature (1)..(524): NCBI GI: 119474227 Blast Desc: NFIA_004500 [Neosartorya fischeri NRRL 181] gi|119407142|gb|EAW17092.1| conserved [Neosartorya fischeri NRRL 181]
  misc_feature (1)..(524): NCBI GI: 70986226 Blast Desc: conserved [Aspergillus fumigatus Af293] gi|66846236|gb|EAL86569.1| conserved [Aspergillus fumigatus Af293]
  misc_feature (1)..(524): NCBI GI: 159128250 Blast Desc: conserved [Aspergillus fumigatus A1163]
  misc_feature (13)..(524): NCBI GI: 169772941 Blast Desc: [Aspergillus oryzae RIB40] gi|83768800|dbj|BAE58937.1| protein product [Aspergillus oryzae]
  misc_feature (13)..(524): NCBI GI: 121699395 Blast Desc: ACLA_082720 [Aspergillus clavatus NRRL 1] gi|119396149|gb|EAW06581.1| ACLA_082720 [Aspergillus clavatus NRRL 1]
  misc_feature (14)..(440): NCBI GI: 115433432 Blast Desc: [Aspergillus terreus NIH2624] gi|114189705|gb|EAU31405.1| [Aspergillus terreus NIH2624]
  misc_feature (8)..(444): NCBI GI: 169618215 Blast Desc: SNOG_12297 [Phaeosphaeria nodorum SN15] gi|160703576|gb|EAT80110.2| SNOG_12297 [Phaeosphaeria nodorum SN15]
MPTSQSDANYYPVHLGVWTNWSRGTVLGPTLTITRQQGDLLIAFTALFITWVADRGWRILSLALHRHYSSPNPRGALHHQNQAILRNYDSHDSILQLSSLLWVNRNKHNRIFKPLLLLIFATAYTVIFAAASGFSSQISTAVGTEVLIRSSDCGWFGSDIELTDADAISVAPKLYARAVSNAANYALQCYSDDSSGILDCSRLAVQKIQSTSDTTAGCPFEGDVCRSDANLIVDSGFMNSHEHFGLNTPPDERMLVRIVDHCAPMKTEGFTSHRVSTAGNITVYHYGNITLDDGLADYMGTAKSIESQYSYIIAKDTLQMIANYQLDAEVAYVEDGNVNSDTSDFVPASSIFPLNADLLVVFLAGNGVLHTAASGDEWYRVSPTASSIGQTQSNSTASFEFFHPLEDASPLGCTLQWQFCRENQENCGILGSLSDATNSAAPLFGIDGKFDTDTQYNTTAASNFHYFATTIQRSNTIPGILSQMGPTSLKSQDELASARQGPLPSNQWQLDVAHWVDIELAALQLAFLNAAYLSPTETSLLKFQNQEYSVQLV

SEQ ID NO: 34430 - DNA, 2492 bp, Muscodor strobelii
  misc_feature: SGI EST ID NO. CUFF.81762.0
  misc_feature: Variant of the nucleotide sequence at SEQ ID NO 34428
cagaaccaggcaattctacgaaattatgattcccacgatagcattttacagctgagttccctgctgtgggtcaaccgaaacaagcataacagaatcttcaagccattactacttcttattttcgcgaccgcatacaccgtgatctttgcagccgcaagtggcttctcatcgcaaatctcgactgcagtaggaacagaagtgttaattagaagttcggactgcggatggttcggcagcgatatcgaattgacagatgccgacgcaatatctgttgcgcccaaactgtacgcacgagctgttagcaatgccgctaactatgccttgcaatgctactccgatgatagcagtgggatcctagattgcagtcggttggcagttcaaaagatacagtcaacaagtgatacaacagcaggttgtccatttgaaggcgacgtctgtcggagcgatgccaacctcattgttgattccggctttatgaacagccatgagcacttcggcctcaacacaccgccagacgagagaatgctcgtgagaatcgttgatcattgcgcacccatgaagaccgaaggctttactagccatagggtttcgactgccggaaacattacagtttaccattatgggaatattaccctcgatgatggtctggccgattacatggggacggcgaagtctatcgagtcacaatattcgtacatcattgcaaaagacacgttgcagatgattgctaattatcaactggacgccgaggtagcatatgtagaagatggaaacgtcaatagcgatacgtccgactttgtgccagcgagttccatcttccccctaaatgcagatctcctggtcgtcttccttgctggaaatggtgtcctacatacagcggcctctggcgatgagtggtatcgtgtatcaccgaccgcatcaagtattggccagacacagagcaatagtaccgcatctttcgaattctttcatccattagaagatgcctcgcctcttggttgtacccttcagtggcagttctgcagagagaaccaggagaattgtggcattttaggaagcttatcagatgcaactaatagcgctgctccattgttcggcatcgacggcaaatttgacacagatacacagtataacactactgctgcaagcaactttcactatttcgcgacgacgatacagaggtcaaacacaattcctggcatcttgagtcaaatgggccctactagcttaaaatctcaggacgagttggccagcgctcgacaagggccattgccgtctaatcaatggcaacttgacgttgctcattgggtcgacatcgaacttgcagccctccagttggccttcttgaacgcggcgtacttgagcccaacggaaacctccttgctcaagttccgtaagtccttccatggagaagagacaaggctatgtcataatcagaaaatcaggagtacagcgtacagctcgtttagtctgttcggcctcctatttgcctacatacttggatttcttatcatatccgtgtccttcatactcgagccgcttctcctgtttctttacaggcgatttcgatacaaggggtacgaaacattggaatggaccaccaactcaactttgcagctacagcgccttgcgcacgaagcaagaggattcggcacctggtctaactgtacacaaaaaattccggtcgcaagagatgatgatctattaggcaatcttgatctagcggatactagtcatccggtattgacgcgctctttgacacgttcatacgcggatatgagggagagcaatactaccctgagaaacgtgattgagacagtagatgggaagtcaagtaccgatgcagaaattaacagtctttagtatgacaagcgagtacatatctcatagaatgcacaaagatcaagtatcctcagaaatagccaccccctaatttggggtagcttttttcagtttcttttagttgacaattgtccaggcatgagattgactccggcaggtaggtctcacctcgagggctttttcgaggaccagttaattgagtcgcccgactcggtcagataacatgaaggggaccatcgtcaccgacctagcaatgtgccgagacgtggttagccaccgtttcatacccctcaaaagtggctttacggtgaacaggtcatggccgattatctcttccattcattcgtctttgcggcatgcttcgctgctctgccgcgcggccggtctgaacattgcgcaaaagtgcatatgagacctcgtaatccaagcagttggaggtgcagatcctgctggatgtctcggagctgtcaatgtacgcagaacgccatgatttgtgacgactcgatggcgaggtgatcgcaatccgctttttcccacacgaacgctcgacaatgtctataatatacggccggcgacctctgatgaagtaggggaaatgtcattgaaaacatcttatttacgaacaccaccagacctccctttttggttgc

SEQ ID NO: 34431 - DNA, 777 bp, Muscodor strobelii
  misc_feature: SGI cDNA ID NO. 571899
  misc_feature: Encodes the peptide sequence at SEQ ID NO 34432
atgtccaacaaaggcgacaccctccaactcaacacttccctcggacaaggcgactatctccagagcgccggtggcaagttccggctggtcatgcagggcgatggcaacatcgttctgtacgcttcgagcgggccaaaagatccggcgtccttttcgggagctgcgacatgggcgtcaggaacgaacgggaagcctgtgtcaaagctggtcatgcaggaagatggcaacctcgtgggatacgattcagcggggacgccgctctggagcactaacacgtttgcgacggcgcagcacgggccgcggctcgtgatgcaggacgacggcaacttagtgctgtacccgagcggaaagaacgaaaacgcgtcctgggccagcggtaccacaaacccagtgcccttctacaaggcgaagttcgtgaacaacaccaacggcgtccaggcctatccgtccgtacacgataagacgggtaacgcagaggtgtggacgggccgctggaataaggactgggagtggttactgcaggaaggagactcgaagacttgcaacttcaatacggaccgggacgacaagggcgacccggttggggtccgcattggcggtgacaacacggtggtatgtctgtggttcaactgcaaagctgccggagatcgtggaatccatgcttcgacccaacaattcgtgtacaaggccgattccggtattgaagtcactgtgcatgcctcggggtgggcgcaaagtgatgagaccgctgggtatgatggcgagcaacgtggttga

SEQ ID NO: 34432 - protein, 258 aa, Muscodor strobelii
  misc_feature: SGI Peptide ID NO. 571899
  misc_feature (6)..(130): Pfam Id: PF01453 Pfam Desc: D-mannose binding lectin
  misc_feature (68)..(127): Pfam Id: PF01453 Pfam Desc: D-mannose binding lectin
  misc_feature (11)..(168): NCBI GI: 242761114 Blast Desc: TSTA_062180 [Talaromyces stipitatus ATCC 10500] gi|218723313|gb|EED22730.1| TSTA_062180 [Talaromyces stipitatus ATCC 10500]
  misc_feature (8)..(127): NCBI GI: 256393277 Blast Desc: Curculin domain protein (mannose-binding) lectin [Catenulispora acidiphila DSM 44928] gi|256359503|gb|ACU73000.1| Curculin domain protein (mannose-binding) lectin [Catenulispora
  misc_feature (3)..(138): NCBI GI: 256371719 Blast Desc: Curculin domain protein (mannose-binding) lectin [Acidimicrobium ferrooxidans DSM 10331] gi|256008303|gb|ACU53870.1| Curculin domain protein lectin DSM
  misc_feature (12)..(113): NCBI GI: 170698757 Blast Desc: Peptidase S53 propeptide [Burkholderia ambifaria IOP40-10] gi|170136314|gb|EDT04578.1| Peptidase S53 propeptide [Burkholderia ambifaria IOP40-10]
  misc_feature (5)..(127): NCBI GI: 118468679 Blast Desc: mannose-binding lectin [Mycobacterium smegmatis str. MC2 155] gi|118169966|gb|ABK70862.1| mannose-binding lectin [Mycobacterium smegmatis str. MC2 155]
  misc_feature (6)..(127): NCBI GI: 227980927 Blast Desc: D-mannose binding lectin family protein [Tsukamurella paurometabola DSM 20162] gi|227963485|gb|EEJ98796.1| D-mannose binding lectin family protein [Tsukamurella paurometabola DSM
  misc_feature (12)..(113): NCBI GI: 172059837 Blast Desc: peptidase S53 propeptide [Burkholderia ambifaria MC40-6] gi|171992354|gb|ACB63273.1| Peptidase S53 propeptide [Burkholderia ambifaria MC40-6]
  misc_feature (3)..(127): NCBI GI: 33943121 Blast Desc: lectin precursor [Typhonium divaricatum]
  misc_feature (8)..(129): NCBI GI: 87080658 Blast Desc: lily-type lectin [Platycephalus indicus]
  misc_feature (7)..(113): NCBI GI: 146161312 Blast Desc: TTHERM_00037370 [Tetrahymena thermophila] gi|146146807|gb|EAR86248.2| TTHERM_00037370 [Tetrahymena thermophila SB210]
MSNKGDTLQLNTSLGQGDYLQSAGGKFRLVMQGDGNIVLYASSGPKDPASFSGAATWASGTNGKPVSKLVMQEDGNLVGYDSAGTPLWSTNTFATAQHGPRLVMQDDGNLVLYPSGKNENASWASGTTNPVPFYKAKFVNNTNGVQAYPSVHDKTGNAEVWTGRWNKDWEWLLQEGDSKTCNFNTDRDDKGDPVGVRIGGDNTVVCLWFNCKAAGDRGIHASTQQFVYKADSGIEVTVHASGWAQSDETAGYDGEQRG

SEQ ID NO: 34433 - DNA, 773 bp, Muscodor strobelii
  misc_feature: SGI EST ID NO. CUFF.81765.0
  misc_feature: Variant of the nucleotide sequence at SEQ ID NO 34431
tgcagggcgatggcaacatcgttctgtacgcttcgagcgggccaaaagatccggcgtccttttcgggagctgcgacatgggcgtcaggaacgaacgggaagcctgtgtcaaagctggtcatgcaggaagatggcaacctcgtgggatacgattcagcggggacgccgctctggagcactaacacgtttgcgacggcgcagcacgggccgcggctcgtgatgcaggacgacggcaacttagtgctgtacccgagcggaaagaacgaaaacgcgtcctgggccagcggtaccacaaacccagtgcccttctacaaggcgaagttcgtgaacaacaccaacggcgtccaggcctatccgtccgtacacgataagacgggtaacgcagaggtgtggacgggccgctggaataaggactgggagtggttactgcaggaaggagactcgaagacttgcaacttcaatacggaccgggacgacaagggcgacccggttggggtccgcattggcggtgacaacacggtggtatgtctgtggttcaactgcaaagctgccggagatcgtggaatccatgcttcgacccaacaattcgtgtacaaggccgattccggtattgaagtcactgtgcatgcctcggggtgggcgcaaagtgatgagaccgctgggtatgatggcgagcaacgtggttgatacggccagtaaaacacctaggaactaggcttttctatgttggtatttctaagaccttaccagacaggtagactacactgaaatctg

SEQ ID NO: 34434 - DNA, 2913 bp, Muscodor strobelii
  misc_feature: SGI cDNA ID NO. 571900
  misc_feature: Elevated expression when VOC is produced
  misc_feature: Encodes the peptide sequence at SEQ ID NO 34435
atgaattctttggggcagttcaatgctgcagctgctagcttcagggccgagaatacaaatgcgttggttaacgtcaaccttgagttcaatctcttcgcaaaaagatatgtgcaacctccactggaatatgctggtgtgggtcgatatcttgcgaagaatcgaattcgtgaggcggaagagggtgctcgccacggagttgcccgaagactcggagcgcttttcaaagatcgagaactactaccctcaacccctgagctcatcaaagcgtacgggctgcgggcatcagaaatcgcaaagagggtctcggatacctctggggacaggaggtcacatggattcttcgccgacatgatgggcgctgatgctacaacgctctgggcggcagccacttctggatggggagccatacagtgtcatctcctagcctgtatgcttgcccggatctgggacccccctgaagcaacttcaatttgggtggagatcgtcttgagaagaaagcaagtcctcaggaagaggctcatggaagaaggcgagctagagggcgatatggctaatgctgttgttgaggatatcgcccgtaatgacctctttgattgggatgctagcgcgcgagcatggctcaatgtcgctgataaagtcatggaaaaacagcagacgcaaatgagactgatcgttgacaatttggacttagctgttaattccaaaccagacacgtatgaaagcgtgatggacgcctgggcctcagcaatgacacaaatggagaagcttctctgtggaacacctctgcaagtgtatcgtggtgatatccttctgggactaatctcttggcacctataccccgatatgaaatgtctcatagggaaacaacaagatataagacagaatgattgtctcctttccggtcgaggtatgctgactttaggcttagaaccgtccccacgagtcgccattgatcgcaagtctgtctactggtctcttcctcttgcgcatctaagattttatggacgcttgcctgtcactaggttgcgatccgtcagaactacggaaagagaccggctgactattgacgagttgctttgggtgatggtctcagtgtttgcacaggactggtttgatggctcagcccctgatgcagatgtgctgcagtacataagcaacgtggccacagagctacacttcgcgcttcgggataaggattatattgaaagtgacagatctcaatgggctggtctccgtcgtcagaaggtcacaagcgcctcgtggttgacgatggtttctggtgtctgtctccgaaccaaggatcatctcgatgaagagcggattcgcaaacttcaggcgcttggatcacggtctgtcaaagatcttggatcgccttttggaggagcctttagtgtcgatacgtttttggaagcaaataaaaacatcgagacaaaaatcgagcttctcagggaaatcgcaagttccatacctgaacacagatcgaagtcatcaacaggctacgagttcatcattacctacagggttccatgttgtatgagagccagcgtagaagacttggggggcacaggtggcttaaagttcttcgagtatgcgactgcctttccaaaagggaacgataatcagcctgcagcaaatattcataggagatgggttactccaggtattggaaaaggctccagacaatatactatggaccactttctgtcccgcagagagaaaattcttcaaatgggcgagactgttgacataactttcaacaagacacacgggctattcattcgccagggtggcaaaaccgacacagatgaggttggaactcacctaggtaccatcaactccagtggaggaacacaggaagaaggcccattcgtgttgaaagtaaaagagccatgttattccagaaactacgtggtaatttgtggcgaccccgaggatattgcacttctcaagcgagagcgcaaaccacttataacaattcatcacggcgatcacaagctggatattaattcgatgccttctaacaatgatttcttgttgacatcgtctcaaataatgcgttttttccagcccggtaccgttgatttctcttgctgtgctgagaagatgacgggctttgcggatcaggctcggcgttttcaggcactaacgttcatcgagagtctatacaggaagttggacggagcaacaattgatgttagggcggtacgggctgtgtaccctttggctgaatggtacaacgcagcttgtgaacgacacagaacaacagagtatcctcgtaacgatctctcagttgacgataggcgatttacaagtatcaactacttatatgcgaaaaaggttgatccagcaacctgctttgcgtgtattgcaatgatggaaactgggtactacaatcttaagcctagtgagttggaaagtgcattcgctctctgttcggcggactcgctgtatattgcatcttctctgctccaggatccgactacagagaagggcgggccagtaatcaaacgattcactggtaatattggtaaagctggaatggcattcgctaacatcccattaatggtcgctcccaaggatcccgaaatccggacatacgatgctatagacgagtggtaccagtttgatcaccgcccattcacgggaaagatggaggattgtttccaatccacgagcctccaaatctccttttccgacgcatcgcaagcaatcaacgttaactttactgggggacgtgatgtggaggcgtatttcctagaaacactggtgtctgtataccacggcgaggaatgggtggcggagctagatgtcctcaatgcaatgagtaacaccaagcttgtgcagagttcagtggcaggcggtacagtgaagactaagatctacgatggttcagacgtcacaatcatcatatga

SEQ ID NO: 34435 - protein, 970 aa, Muscodor strobelii
  misc_feature: SGI Peptide ID NO. 571900
  misc_feature (3)..(942): NCBI GI: 169605903 Blast Desc: SNOG_05984 [Phaeosphaeria nodorum SN15] gi|111065928|gb|EAT87048.1| SNOG_05984 [Phaeosphaeria nodorum SN15]
  misc_feature (3)..(744): NCBI GI: 119494152 Blast Desc: NFIA_007650 [Neosartorya fischeri NRRL 181] gi|119412148|gb|EAW22089.1| conserved [Neosartorya fischeri NRRL 181]
  misc_feature (3)..(370): NCBI GI: 169604668 Blast Desc: SNOG_05349 [Phaeosphaeria nodorum SN15] gi|160706620|gb|EAT87740.2| SNOG_05349 [Phaeosphaeria nodorum SN15]
  misc_feature (16)..(345): NCBI GI: 255945597 Blast Desc: Pc20g10770 [Penicillium chrysogenum Wisconsin 54-1255] gi|211588301|emb|CAP86406.1| Pc20g10770 [Penicillium chrysogenum Wisconsin 54-1255]
  misc_feature (1)..(488): NCBI GI: 46137867 Blast Desc: FG10449.1 [Gibberella zeae PH-1]
  misc_feature (16)..(381): NCBI GI: 145244114 Blast Desc: An11g05770 [Aspergillus niger] gi|134079251|emb|CAK40734.1| [Aspergillus niger]
  misc_feature (17)..(590): NCBI GI: 238844746 Blast Desc: conserved [Microsporum canis CBS 113480]
  misc_feature (4)..(506): NCBI GI: 256731930 Blast Desc: NECHADRAFT_80807 [Nectria haematococca mpVI 77-13-4]
  misc_feature (3)..(345): NCBI GI: 240111731 Blast Desc: CPC735_011940 [Coccidioides posadasii C735 delta SOWgp]
  misc_feature (2)..(370): NCBI GI: 149210921 Blast Desc: MGCH7_ch7g933 [Magnaporthe grisea 70-15] gi|86196888|gb|EAQ71526.1| MGCH7_ch7g933 [Magnaporthe grisea 70-15]
  misc_feature: Useful for introducing or modulating the production of volatile compounds
MNSLGQFNAAAASFRAENTNALVNVNLEFNLFAKRYVQPPLEYAGVGRYLAKNRIREAEEGARHGVARRLGALFKDRELLPSTPELIKAYGLRASEIAKRVSDTSGDRRSHGFFADMMGADATTLWAAATSGWGAIQCHLLACMLARIWDPPEATSIWVEIVLRRKQVLRKRLMEEGELEGDMANAVVEDIARNDLFDWDASARAWLNVADKVMEKQQTQMRLIVDNLDLAVNSKPDTYESVMDAWASAMTQMEKLLCGTPLQVYRGDILLGLISWHLYPDMKCLIGKQQDIRQNDCLLSGRGMLTLGLEPSPRVAIDRKSVYWSLPLAHLRFYGRLPVTRLRSVRTTERDRLTIDELLWVMVSVFAQDWFDGSAPDADVLQYISNVATELHFALRDKDYIESDRSQWAGLRRQKVTSASWLTMVSGVCLRTKDHLDEERIRKLQALGSRSVKDLGSPFGGAFSVDTFLEANKNIETKIELLREIASSIPEHRSKSSTGYEFIITYRVPCCMRASVEDLGGTGGLKFFEYATAFPKGNDNQPAANIHRRWVTPGIGKGSRQYTMDHFLSRREKILQMGETVDITFNKTHGLFIRQGGKTDTDEVGTHLGTINSSGGTQEEGPFVLKVKEPCYSRNYVVICGDPEDIALLKRERKPLITIHHGDHKLDINSMPSNNDFLLTSSQIMRFFQPGTVDFSCCAEKMTGFADQARRFQALTFIESLYRKLDGATIDVRAVRAVYPLAEWYNAACERHRTTEYPRNDLSVDDRRFTSINYLYAKKVDPATCFACIAMMETGYYNLKPSELESAFALCSADSLYIASSLLQDPTTEKGGPVIKRFTGNIGKAGMAFANIPLMVAPKDPEIRTYDAIDEWYQFDHRPFTGKMEDCFQSTSLQISFSDASQAINVNFTGGRDVEAYFLETLVSVYHGEEWVAELDVLNAMSNTKLVQSSVAGGTVKTKIYDGSDVTIII

SEQ ID NO: 34436 - DNA, 1101 bp, Muscodor strobelii
  misc_feature: SGI cDNA ID NO. 571901
  misc_feature: Encodes the peptide sequence at SEQ ID NO 34437
atggcttcttctagcatgcgtgctgtcggaatctccgaatatggtcccattgataatctgaaggcagggcaagtccccaggccgccgaagccaacagatcgacagcttcgtgttcaagtgaaagctgtttctgtcaatccgattgacatcaaagtgcgcggaggtgtctacgacgacccgcccgattactatgaccgtgtcacatccttgacgaaagagtcgccgaacctgcacatcatcggctacgatggtgccggcatcgttcttgagaccggacccgatgtcaagcacttcgaagtaggcgaagacgtcttctatctcgcgtcaccggttatgcagggctcctattcggaagagcagattattgacgagcgacacgccggtcataagccaaggtcccttgactttgtccaagcagctgcgatgcctctgacttacggcacggcgtacgagtctcttgtcgagagattggagatcaagaaaggggagaacgcggcaattctgatcatcaacggtggtggtgggatggggtcaattgcgtcacagatcgctagacatatcttgaaattgcctatcgtgatcacaacagcgtcgagaccggagacaattgagttctccaagcagatgggtgcgacgcatgtaatcaaccatcgcggtgatctggtgaagcagattcaggacttgaacttgccggctgatgtgccactgaaatacgcatacatcacctcacgtacggagcagtacctcaaccccatcggtgacatactcttggcttttggaaaggtctgcagtattgtacaggcccgcttcgacatgtatggttcacagtttatgagcaagtcattgacatttgtgtggtgctggatcggaaccggtccgtaccaccactaccaacatgacaagcaggaaaagcatcatgagtggtacgaagaactgagccgactgcttgatgagggtgtcataaagtgtcatttgaagcagcgactgagacttacagcagagggtatcaaggaggcacacagaagggttgaagagggcaaggccgtaggaaagattgcgctgggtgttgatgagccgggcgaaggtgaggcattctcctga

SEQ ID NO: 34437 - protein, 366 aa, Muscodor strobelii
  misc_feature: SGI Peptide ID NO. 571901
  misc_feature (33)..(130): Pfam Id: PF08240 Pfam Desc: Alcohol dehydrogenase GroES-like domain
  misc_feature (163)..(228): Pfam Id: PF00107 Pfam Desc: Zinc-binding dehydrogenase
  misc_feature (6)..(366): NCBI GI: 145249678 Blast Desc: An14g05550 [Aspergillus niger] gi|134081861|emb|CAK42116.1| protein product [Aspergillus niger]
  misc_feature (60)..(360): NCBI GI: 169782696 Blast Desc: [Aspergillus oryzae RIB40] gi|83774554|dbj|BAE64677.1| protein product [Aspergillus oryzae]
  misc_feature (6)..(354): NCBI GI: 189208233 Blast Desc: quinone oxidoreductase [Pyrenophora tritici-repentis Pt-1C-BFP] gi|187976543|gb|EDU43169.1| quinone oxidoreductase [Pyrenophora tritici-repentis Pt-1C-BFP]
  misc_feature (134)..(365): NCBI GI: 145235157 Blast Desc: An03g03450 [Aspergillus niger] gi|134057908|emb|CAK47785.1| protein product [Aspergillus niger]
  misc_feature (60)..(237): NCBI GI: 238492349 Blast Desc: alcohol dehydrogenase, [Aspergillus flavus NRRL3357] gi|220695905|gb|EED52247.1| alcohol dehydrogenase, [Aspergillus flavus NRRL3357]
  misc_feature (1)..(354): NCBI GI: 229097910 Blast Desc: Alginate lyase [Bacillus cereus Rock3-29] gi|228685503|gb|EEL39430.1| Alginate lyase [Bacillus cereus Rock3-29]
  misc_feature (1)..(354): NCBI GI: 229116919 Blast Desc: Alginate lyase [Bacillus cereus Rock1-3] gi|228666751|gb|EEL22209.1| Alginate lyase [Bacillus cereus Rock1-3]
  misc_feature (1)..(354): NCBI GI: 229085886 Blast Desc: Alginate lyase [Bacillus cereus Rock3-44] gi|228697410|gb|EEL50170.1| Alginate lyase [Bacillus cereus Rock3-44]
  misc_feature (6)..(354): NCBI GI: 226315463 Blast Desc: oxidoreductase [Brevibacillus brevis NBRC 100599] gi|226098413|dbj|BAH46855.1| oxidoreductase [Brevibacillus brevis NBRC 100599]
  misc_feature (1)..(354): NCBI GI: 229103997 Blast Desc: Alginate lyase [Bacillus cereus Rock3-28] gi|228679436|gb|EEL33636.1| Alginate lyase [Bacillus cereus Rock3-28]
  misc_feature (27)..(354): SWISSPROT Homolog: EC 1.6.5.5 NADPH:quinone reductase
MASSSMRAVGISEYGPIDNLKAGQVPRPPKPTDRQLRVQVKAVSVNPIDIKVRGGVYDDPPDYYDRVTSLTKESPNLHIIGYDGAGIVLETGPDVKHFEVGEDVFYLASPVMQGSYSEEQIIDERHAGHKPRSLDFVQAAAMPLTYGTAYESLVERLEIKKGENAAILIINGGGGMGSIASQIARHILKLPIVITTASRPETIEFSKQMGATHVINHRGDLVKQIQDLNLPADVPLKYAYITSRTEQYLNPIGDILLAFGKVCSIVQARFDMYGSQFMSKSLTFVWCWIGTGPYHHYQHDKQEKHHEWYEELSRLLDEGVIKCHLKQRLRLTAEGIKEAHRRVEEGKAVGKIALGVDEPGEGEAFS

SEQ ID NO: 34438 - DNA, 1260 bp, Muscodor strobelii
  misc_feature: SGI EST ID NO. CUFF.81781.0
  misc_feature: Variant of the nucleotide sequence at SEQ ID NO 34436
gctatctagccgtggcctcaagcttgttattaatctaaatggcttcttctagcatgcgtgctgtcggaatctccgaatatggtcccattgataatctgaaggcagggcaagtccccaggccgccgaagccaacagatcgacagcttcgtgttcaagtgaaagctgtttctgtcaatccgattgacatcaaagtgcgcggaggtgtctacgacgacccgcccgattactatgaccgtgtcacatccttgacgaaagagtcgccgaacctgcacatcatcggctacgatggtgccggcatcgttcttgagaccggacccgatgtcaagcacttcgaagtaggcgaagacgtcttctatctcgcgtcaccggttatgcagggctcctattcggaagagcagattattgacgagcgacacgccggtcataagccaaggtcccttgactttgtccaagcagctgcgatgcctctgacttacggcacggcgtacgagtctcttgtcgagagattggagatcaagaaaggggagaacgcggcaattctgatcatcaacggtggtggtgggatggggtcaattgcgtcacagatcgctagacatatcttgaaattgcctatcgtgatcacaacagcgtcgagaccggagacaattgagttctccaagcagatgggtgcgacgcatgtaatcaaccatcgcggtgatctggtgaagcagattcaggacttgaacttgccggctgatgtgccactgaaatacgcatacatcacctcacgtacggagcagtacctcaaccccatcggtgacatactcttggcttttggaaaggtctgcagtattgtacaggcccgcttcgacatgtatggttcacagtttatgagcaagtcattgacatttgtgtggtgctggatcggaaccggtccgtaccaccactaccaacatgacaagcaggaaaagcatcatgagtggtacgaagaactgagccgactgcttgatgagggtgtcataaagtgtcatttgaagcagcgactgagacttacagcagagggtatcaaggaggcacacagaagggttgaagagggcaaggccgtaggaaagattgcgctgggtgttgatgagccgggcgaaggtgaggcattctcctgagacatatgcactgttgtgaagagttactattatctatcagtcgttgtcgagtttacttgagatgtctttcgagaattgacttgactttgccgtagccatcgccaaattgataatatgtacc

SEQ ID NO: 34439 - DNA, 762 bp, Muscodor strobelii
  misc_feature: SGI cDNA ID NO. 571902
  misc_feature: Encodes the peptide sequence at SEQ ID NO 34440
atgtcgcaaactcccagcaaagcagcagtcaacccagacgcacccaaattgaaagactctgaaggcccaacacaggctgtccgaacgataccctcgccagccgctcaggctcttcgtcatgcccaccccgccatccttctatccctcttcgtcgcggcattcccctcactagtgcgcgatccagtatcgacaatgtggaacacgatcccagttgtcctcgcccttcaggcagcatataccatagtctgcctgcctgccgttggttcatccggcgcgaaagcgcagcgcaagccgagacctggcgagaagaaaaaggccgtctcagaaggcgcaatctctaattttgccgtgacaacgctcgtagctctcgtactatccaccgtctccgccgccgccctccacataacgttcgttctcttcggcgccccattcctcacacatcttcaacacacgctcctctgctcgcttcacctatcactcctaggtctatatccactgttctacactcgcggtgtctcagcaaaggactgggtcgagattctgagtgcgagggcaccctttgatgaaacattcggtggactagtgggtgcttgtgtaggagcttggctaggagctgtgccaatcccacttgactgggatcgcgagtggcagaagtggcctatcacgatactgtgtggcatctatgctgggtattctgtagggaaactaattggtgggacactagctttcgggaagaggtttgggagtgttgatgatgcatga

SEQ ID NO: 34440 - protein, 253 aa, Muscodor strobelii
  misc_feature: SGI Peptide ID NO. 571902
  misc_feature (35)..(241): Pfam Id: PF06699 Pfam Desc: GPI biosynthesis protein family Pig-F
  misc_feature (120)..(241): Pfam Id: PF06699 Pfam Desc: GPI biosynthesis protein family Pig-F
  misc_feature (27)..(247): NCBI GI: 85100159 Blast Desc: NCU06663 [Neurospora crassa OR74A] gi|74619748|sp|Q871U9.1|GPI11_NEUCR RecName: Full=Glycosylphosphatidylinositol anchor biosynthesis protein 11
  misc_feature (1)..(247): NCBI GI: 171692135 Blast Desc: protein product [Podospora anserina] gi|170946016|emb|CAP72817.1| protein product [Podospora anserina]
  misc_feature (42)..(247): NCBI GI: 256731817 Blast Desc: NECHADRAFT_80581 [Nectria haematococca mpVI 77-13-4]
  misc_feature (22)..(246): NCBI GI: 154294849 Blast Desc: BC1G_13547 [Botryotinia fuckeliana B05.10] gi|150844505|gb|EDN19698.1| BC1G_13547 [Botryotinia fuckeliana B05.10]
  misc_feature (18)..(247): NCBI GI: 46137415 Blast Desc: FG10223.1 [Gibberella zeae PH-1] gi|81170636|sp|Q4HXT5.1|GPI11_GIBZE RecName: Full=Glycosylphosphatidylinositol anchor biosynthesis protein 11
  misc_feature (27)..(247): NCBI GI: 116206798 Blast Desc: CHGG_02692 [Chaetomium globosum CBS 148.51] gi|88183289|gb|EAQ90757.1| CHGG_02692 [Chaetomium globosum CBS 148.51]
  misc_feature (4)..(241): NCBI GI: 39976113 Blast Desc: MGG_06017 [Magnaporthe grisea 70-15] gi|88909615|sp|P0C148.1|GPI11_MAGGR RecName: Full=Glycosylphosphatidylinositol anchor biosynthesis protein 11
  misc_feature (27)..(237): NCBI GI: 156044478 Blast Desc: SS1G_10342 [Sclerotinia sclerotiorum 1980] gi|154694731|gb|EDN94469.1| SS1G_10342 [Sclerotinia sclerotiorum 1980]
  misc_feature (14)..(247): NCBI GI: 242783524 Blast Desc: GPI-anchor biosynthesis protein (Pig-F), [Talaromyces stipitatus ATCC 10500] gi|218720351|gb|EED19770.1| GPI-anchor biosynthesis protein (Pig-F), [Talaromyces stipitatus ATCC 10500]
  misc_feature (6)..(247): NCBI GI: 189199964 Blast Desc: glycosylphosphatidylinositol anchor biosynthesis protein 11 [Pyrenophora tritici-repentis Pt-1C-BFP] gi|187983418|gb|EDU48906.1| glycosylphosphatidylinositol anchor
MSQTPSKAAVNPDAPKLKDSEGPTQAVRTIPSPAAQALRHAHPAILLSLFVAAFPSLVRDPVSTMWNTIPVVLALQAAYTIVCLPAVGSSGAKAQRKPRPGEKKKAVSEGAISNFAVTTLVALVLSTVSAAALHITFVLFGAPFLTHLQHTLLCSLHLSLLGLYPLFYTRGVSAKDWVEILSARAPFDETFGGLVGACVGAWLGAVPIPLDWDREWQKWPITILCGIYAGYSVGKLIGGTLAFGKRFGSVDDA

SEQ ID NO: 34441 - DNA, 2053 bp, Muscodor strobelii
  misc_feature: SGI EST ID NO. CUFF.81889.1
  misc_feature: Variant of the nucleotide sequence at SEQ ID NO 34439
tctttgtgcagcgttcattcttttcaactaattgtcgccaagtcatttcaccgaccactgcagcgaagtgactgctgtgcgcccgcgcaatttccttcttccttttgccgttaatcttacctgaaaagccaacgtcttaagcagggccggccccccagcgatcacgatgtcgcaaactcccagcaaagcagcagtcaacccagacgcacccaaattgaaagactctgaaggcccaacacaggctgtccgaacgataccctcgccagccgctcaggctcttcgtcatgcccaccccgccatccttctatccctcttcgtcgcggcattcccctcactagtgcgcgatccagtatcgacaatgtggaacacgatcccagttgtcctcgcccttcaggcagcatataccatagtctgcctgcctgccgttggttcatccggcgcgaaagcgcagcgcaagccgagacctggcgagaagaaaaaggccgtctcagaaggcgcaatctctaattttgccgtgacaacgctcgtagctctcgtactatccaccgtctccgccgccgccctccacataacgttcgttctcttcggcgccccattcctcacacatcttcaacacacgctcctctgctcgcttcacctatcactcctaggtctatatccactgttctacactcgcggtgtctcagcaaaggactgggtcgagattctgagtgcgagggcaccctttgatgaaacattcggtggactagtgggtgcttgtgtaggagcttggctaggagctgtgccaatcccacttgactgggatcgcgagtggcagaagtggcctatcacgatactgtgtggcatctatgctgggtattctgtagggaaactaattggtgggacactagctttcgggaagaggtttgggagtgttgatgatgcatgattgcactgcggagcgttatacttagccaacacggagaatataatcttcattaagaaatcactccaacgcccaaggccttttgagctgcggtgctgtttagtaggcgcggggcatagagtagtacatcctctttatcgcttgagctcgtgtcctacctcacgatttaaggacttaacaacagtagagccaccgacgacgctgtgtacagtcatgcagcaccatgcggcagtacgtaataagttcacgctactttgcaccgatttttcatttggagcctgcgtttagggaacatatgagcctcgttcaagaggtgcagcatgcatgcatcgtgcttgcactgtgcaatgcacgttcatacctgacctctagacgcccatcttgattcccttccagccagcgcaatcttgcactctgctcaaaaagaagtgcatggctggatagcgcaacatcgagactacaaatgagcgaaaattggagtaaaaatgataaaggcggcgaagggcaaaaaatgcaaaagaaatgggtacggtggtcgtgaaggatgtagtgtaaaccgttttgtcgtcaccggcccggctaccttcgctgagaagcgcggcttctctaaggtagaggcgtgatggtcccgcaacggacagtgacccagatcaatcaccaggttccaggccgtaccgttggaaagtgcagcaattatcggaacctatatacagtagtcctggtccgaggttctgccgttcagggcgcgtgcctccattgcggcaatactgcatgtgcacgttcacctcttcatctcctgggatttctacgtcaaccttcacacattttgcattttgtatcctttcatgaatgcatccagtcatcagttgtctttctcattctcttcgcatcaaagccaattgcaaccgaggtgtgtgtctgtgtattcacacgcccgcatagtctcgactgaggtgtgatgatccgtacccgtcggagcaaatggactgcgctttgatatagcactgccctaaagcttgtaataaccataagtgatctctcactggctgcatcattcgtggcaaattggcgctgagcctagattgctgttacgcagtgcttcaccccccaaatcttttgatcctcggg

SEQ ID NO: 34442 - DNA, 729 bp, Muscodor strobelii
  misc_feature: SGI cDNA ID NO. 571903
  misc_feature: Encodes the peptide sequence at SEQ ID NO 34443
atggcgagcatcaatactggcggcatgattgaccccgccatctttgagtacctcaaagcccatggtgaagaggagcttcaagtgggcgacaagcttcaccagatcagcgcgatgctcaaccgccacatctcgacatgccaaggtcttttgagccgcattcattcaaccccgagcgcaaaattgccgaccttgctcaagcaggttgaagaaactggcatccagcctgagattgagaccgtcgcagagctagccgagttcgcctcacagtacccctactacaaatacaatcacagatggactcgaagcattcagaacgtcgttgggacgattctcctcacagcctggctgggcggcatgggcactgtgtcagagcctggtgagcttggtcgcctcctgactattgagcaagttggagaagtcgtgaaggttcccgtcaacctcaaggacaaggacgccttccacatcacgatcgaggaatacctgcttgcgctcactgatatcaccgaggagctcagccgtctagccatgaactcagtaacgatgggcgatgtcgcgctgacggtccgtatcagcagcttcatcaaagatctatttgcaggcttccagctgctcaatctcaagaacgacatcgtcaggaagcgtgttgacgccgtcaagtaccatgtgaagaaagtggaggacgtcatctacgatctgtcactgcgcaacttgcttcccgctactgagtga

SEQ ID NO: 34443 - protein, 242 aa, Muscodor strobelii
  misc_feature: SGI Peptide ID NO. 571903
  misc_feature (31)..(237): Pfam Id: PF01997 Pfam Desc: Translin family
  misc_feature (148)..(237): Pfam Id: PF01997 Pfam Desc: Translin family
  misc_feature (9)..(242): NCBI GI: 85100163 Blast Desc: NCU06664 [Neurospora crassa OR74A] gi|28922443|gb|EAA31675.1| NCU06664 [Neurospora crassa OR74A] gi|28950113|emb|CAD70893.1| conserved [Neurospora crassa]
  misc_feature (9)..(238): NCBI GI: 46137657 Blast Desc: FG10344.1 [Gibberella zeae PH-1]
  misc_feature (1)..(238): NCBI GI: 256731866 Blast Desc: [Nectria haematococca mpVI 77-13-4]
  misc_feature (9)..(242): NCBI GI: 261352095 Blast Desc: translin [Verticillium albo-atrum VaMs.102]
  misc_feature (1)..(242): NCBI GI: 156044480 Blast Desc: SS1G_10343 [Sclerotinia sclerotiorum 1980] gi|154694732|gb|EDN94470.1| SS1G_10343 [Sclerotinia sclerotiorum 1980]
  misc_feature (1)..(242): NCBI GI: 154294847 Blast Desc: BC1G_13546 [Botryotinia fuckeliana B05.10] gi|150844504|gb|EDN19697.1| BC1G_13546 [Botryotinia fuckeliana B05.10]
  misc_feature (9)..(242): NCBI GI: 39976157 Blast Desc: MGG_05995 [Magnaporthe grisea 70-15] gi|145011731|gb|EDJ96387.1| MGG_05995 [Magnaporthe grisea 70-15]
  misc_feature (9)..(240): NCBI GI: 171692133 Blast Desc: protein product [Podospora anserina] gi|170946015|emb|CAP72816.1| protein product [Podospora anserina]
  misc_feature (9)..(239): NCBI GI: 242815804 Blast Desc: recombination hotspot-binding protein (Translin), [Talaromyces stipitatus ATCC 10500] gi|218714981|gb|EED14404.1| recombination hotspot-binding protein (Translin), [Talaromyces
  misc_feature (9)..(239): NCBI GI: 212545478 Blast Desc: recombination hotspot-binding protein (Translin), [Penicillium marneffei ATCC 18224] gi|210065862|gb|EEA19956.1| recombination hotspot-binding protein (Translin), [Penicillium
MASINTGGMIDPAIFEYLKAHGEEELQVGDKLHQISAMLNRHISTCQGLLSRIHSTPSAKLPTLLKQVEETGIQPEIETVAELAEFASQYPYYKYNHRWTRSIQNVVGTILLTAWLGGMGTVSEPGELGRLLTIEQVGEVVKVPVNLKDKDAFHITIEEYLLALTDITEELSRLAMNSVTMGDVALTVRISSFIKDLFAGFQLLNLKNDIVRKRVDAVKYHVKKVEDVIYDLSLRNLLPATE

SEQ ID NO: 34444 - DNA, 1919 bp, Muscodor strobelii
  misc_feature: SGI EST ID NO. CUFF.82015.0
  misc_feature: Variant of the nucleotide sequence at SEQ ID NO 34442
gttatttctcggtcggagaaactaagccaaaaggcaaagagagctggagtgacatattcccactccagctctctttgcctttcggttatggcttagttttttaccctcaacaaattacgtcaatcccataaacttgaaataattgctaacgacgcgtgtatagatcaagtgtagtatctgttcttttcagtttaatctctgaaagagtcctactggactcaatcgtgattattctaatttttgttacctggtagcgcatcctctgtgcttgcgcatgatcgcttccaccgtgtccctggtataacactgcctccaggcgacgcgaaccctcttttcgttgcagttcatggcttgccatggatgtgaagaagagacgagtgaggggggtcagctacagcagaaatccgagtgctatggttagatgcgacgtggatgatgcttccatcgatatttttgtacctgtgtgtctcaccacttttgggggtgcgagccccgatagctggtcctgcgccgtcaagatgtgagctagagatcatagtcattccggaaaattcacctgtaccgcattgtttgatgcttggccggtgtttgatgatgtcgtcagtcattggaggtgggattgcgggcagcaggtggcaatcgtgggaacaatcttgggaacaatcgtggaaatatgcagcacatgcatcatcaatagcgtcaaacgtgcacatagtaggtagataaatacacgagaacaagcaagagacaaaagatattgtcgtcttcaaaaatctttttttcgctgtgagatcgagagctgtatgcgacgagtgtttgcagtactgcctgcaccttctaacgtcattcacgccagctttacaacttcccgtactgcatatatcggccccacggttcactcttcacctttacatcctgtcccaggcataacagtcaagatggcgagcatcaatactggcggcatgattgaccccgccatctttgagtacctcaaagcccatggtgaagaggagcttcaagtgggcgacaagcttcaccagatcagcgcgatgctcaaccgccacatctcgacatgccaaggtcttttgagccgcattcattcaaccccgagcgcaaaattgccgaccttgctcaagcaggttgaagaaactggcatccagcctgagattgagaccgtcgcagagctagccgagttcgcctcacagtacccctactacaaatacaatcacagatggactcgaagcattcagaacgtcgttgggacgattctcctcacagcctggctgggcggcatgggcactgtgtcagagcctggtgagcttggtcgcctcctgactattgagcaagttggagaagtcgtgaaggttcccgtcaacctcaaggacaaggacgccttccacatcacgatcgaggaatacctgcttgcgctcactgatatcaccgaggagctcagccgtctagccatgaactcagtaacgatgggcgatgtcgcgctgacggtccgtatcagcagcttcatcaaagatctatttgcaggcttccagctgctcaatctcaagaacgacatcgtcaggaagcgtgttgacgccgtcaagtaccatgtgaagaaagtggaggacgtcatctacgatctgtcactgcgcaacttgcttcccgctactgagtgaagagttcacaagatccatcgctaagtagatatatgagcagagagcaatttagttgagtctttcaatgaacatgcttctcgttgctcttcaaaaaagatggatggtatttcagtcacagtgatcaaaggcatacggcgtcaggtctactgaacatcttcattcaagcattgcttacgtatgattttaattacaaaagttatcattgtcggattttttcgttcgtcaaatacaagagcctatcatgtttgccca

SEQ ID NO: 34445 - DNA, 771 bp, Muscodor strobelii
  misc_feature: SGI cDNA ID NO. 571904
  misc_feature: Encodes the peptide sequence at SEQ ID NO 34446
atgataattggaagccctgtagtgctagaagtagtgctggaagaagttggcggtggtggcggactcccaaacagggtactagaagtagaagtcggcggcggtggtggtgatcctccaaccaggctactggaagaggaagtcggcggcggtggtggcagtccaactagagtactagaagaagtactcggaaacggtggtggtggtccgtcgattaacgtactagaagaagtactcggaaatggtggcggtagtcccccaactagggtactagaagaaccagtcgagactgacggtggaggcctaactagtgtagttgacgatgtattcggggatgaggatgttgatcccccaactagagtaccagaagaggtagttaccaatgaaggcggtccgactagagtaacagaagatgtgatcgaagttggtgaagtcggtgatgtcagtggcccgccgcttggctctgaagaaaaggtaggtatagtaccaaagggtgtcgtgcttgaatccgccgaccctggagttggcactatcgaggtcgtagacgagccactacttgaagtgctcgttattataactggtatcgtcgcgctactcgaagaaatgctgttgaatcttgaggttgaattgatgccagaggttggcaccgacgaattgcccgtcgtgatagtactaccaccagcagaaggtgatataataccagagcttgtagtagctcgggtagacgaggtagccgatccattgacagaactattagggatggacgtggtctga

SEQ ID NO: 34446 - protein, 256 aa, Muscodor strobelii
  misc_feature: SGI Peptide ID NO. 571904
MIIGSPVVLEVVLEEVGGGGGLPNRVLEVEVGGGGGDPPTRLLEEEVGGGGGSPTRVLEEVLGNGGGGPSINVLEEVLGNGGGSPPTRVLEEPVETDGGGLTSVVDDVFGDEDVDPPTRVPEEVVTNEGGPTRVTEDVIEVGEVGDVSGPPLGSEEKVGIVPKGVVLESADPGVGTIEVVDEPLLEVLVIITGIVALLEEMLLNLEVELMPEVGTDELPVVIVLPPAEGDIIPELVVARVDEVADPLTELLGMDVV

SEQ ID NO: 34447 - DNA, 2313 bp, Muscodor strobelii
  misc_feature: SGI cDNA ID NO. 571905
  misc_feature: Encodes the peptide sequence at SEQ ID NO 34448
atggttcgaacagatgcaccttctgctgaagcagccgatgctctactttccgacgcggcagaggttttcgggttggttgtggagactgcaaagaaagtgtcggccttcttcaacgaccagcggcaagaagaatgggagggatttctgaatgagggttctctgctcgattcgaaagatgatgatgacgatgacggagatggcgacctgccaccagactctccagatgagtgtccagagcctggtattgaccctgatggaccagacggtccagaacctccggtacctcgtaaccaaactgcatcagagtatattgacagtgcctatgccggacttcccggtatcaaaaatctttgtcaacgagccccgtggaccacagaacgacttctgaatgtggcaaagtcattgtcagtaatcgatcttgcctcgacaaaccgaacaactcttattcaaaagctgcagacatataggaagaactatatgaacaaccaacctcagggagaagaagggctaaaaagcggcgggggtgtcattgtggctggcgccgcgggctttcacatcgtatcaagaatacagatgggcacttccatagatcttttcggctcgaggtcatggtgggtcagaatgaaacaatctgtcgttgatcttaagggagaatggtattacaactcgacggccaactggctagacggaggtgggggattccgaggaatctatcctaccggctttggatacaaggccagcttgtcagttgctcaaggtttcccactgatgtgggctttggaaaatgcaacggagaccatgctctgggtgaatctatttgctaactctgataacaggccctttggagacgcttatggcgaagacttcccagatgacgatggttccactgatggttcagatacgaggtatccgtatcagcaagatcaattttggaaaaggcgcggtacttacatacccgttccaccagcgaaaaactatcaaagactactttctgccagaaaggatcagccaatcctcctgcaaggctggggctatgatggtgacgccgtaccgggtacgggaatcaccattttcatcatcgactccggttttggtattgatgttccaggaaatgatggtgacaaagcagatgcagaaaccatgcgagatgccttgtatgatcccaagacatccgaaaacataggccatggaactcagatggcgatgctggctgtcggtcgtaaatacggtatagcaccaggagctagtccatatctcgtcaaggttataggttcttataccggctcagacggcacgaagcagaccggtatcattgagcccgcagctctcgaccatgcacttactcacgtggcggcagtagtaggtcaaaaaaacctaaaaggcaaagctgtgatctcattttctggaacattaaaacgagacgaagccggcgacgactgggaaagcgtctttcgtactcacctacaggtactcaatgcgatgggtgttgtatgggttcaagcggcagggaacaacggatacaaaagccccctaggtttggcatatcttagccaactgatacctcaatgtttaggaactagtgataacggcatgattactgtcggagcgaccaacaatgtaggccgatacgcactctatacaagtccagaaggaccggccggcgcaacagatcctggatctatcactgtatgggcacaagggtctaatgttatagtgaaaatgcctaatggagtcgaaagttcgacacaaggcacctcgaatgctgcccctcaagtggctggccttgttgcgtactatctaacgcgttggcctgcacgatacgacggacttcctgggactgagattgcgaagaaagtcaaagcagacctgagagccaattcgtacagaaggataccaatggcccaacaagtgaatccaactaacacactcccataccccacaccaactgacatcaacgttgcatacaataattactggggcccgcagaattgcggtgacgttgataatccgtcggtatctgctagtagttcgagtccgtcttccactgccggtagcccaaatccgactggcattttgcaacgtcaatctaatgacccagatggcgatttcgggacatgtcccctgtcatcccctgctaccagcttaggaaccacattcaccacttccgtacggccatccgataccgcatcttcaagcactggtgggggtagcgcaacgttgagcagtagtgttacgtcgagcagtctgacaacctcgagctccaacacaaagacgtacactagcttcctgacattgactttttcacaaacgtaa

SEQ ID NO: 34448 - protein, 770 aa, Muscodor strobelii
  misc_feature: SGI Peptide ID NO. 571905
  misc_feature (334)..(658): Pfam Id: PF00082 Pfam Desc: Subtilase family
  misc_feature (393)..(600): NCBI GI: 169605173 Blast Desc: SNOG_05604 [Phaeosphaeria nodorum SN15] gi|160706719|gb|EAT86668.2| SNOG_05604 [Phaeosphaeria nodorum SN15]
  misc_feature (333)..(649): NCBI GI: 260776899 Blast Desc: alkaline serine exoprotease A precursor [Vibrio coralliilyticus ATCC BAA-450] gi|260606565|gb|EEX32839.1| alkaline serine exoprotease A precursor [Vibrio coralliilyticus
  misc_feature (345)..(600): NCBI GI: 238838995 Blast Desc: alkaline proteinase [Microsporum canis CBS 113480]
  misc_feature (345)..(601): NCBI GI: 240105175 Blast Desc: subtilisin-like protease, [Coccidioides posadasii C735 delta SOWgp]
  misc_feature (333)..(733): NCBI GI: 153832400 Blast Desc: alkaline serine exoprotease A [Vibrio harveyi HY01] gi|148871429|gb|EDL70292.1| alkaline serine exoprotease A [Vibrio harveyi HY01]
  misc_feature (352)..(605): NCBI GI: 85716695 Blast Desc: peptidase S8 and S53, subtilisin, kexin, sedolisin [Nitrobacter sp. Nb-311A] gi|85696535|gb|EAQ34424.1| peptidase S8 and S53, subtilisin, kexin, sedolisin [Nitrobacter sp. Nb-311A]
  misc_feature (345)..(601): NCBI GI: 119194751 Blast Desc: CIMG_01750 [Coccidioides immitis RS]
  misc_feature (345)..(620): NCBI GI: 74599993 Blast Desc: SUB1_TRIRU RecName: Full=Subtilisin-like protease 1; Flags: Precursor gi|38146039|gb|AAR11460.1| subtilisin-like protease SUB1 [Trichophyton rubrum]
  misc_feature (345)..(620): NCBI GI: 240109874 Blast Desc: subtilisin-like protease, [Coccidioides posadasii C735 delta SOWgp]
  misc_feature (342)..(600): NCBI GI: 10181226 Blast Desc: serine protease precursor [Fusarium oxysporum f. sp. lycopersici]
MVRTDAPSAEAADALLSDAAEVFGLVVETAKKVSAFFNDQRQEEWEGFLNEGSLLDSKDDDDDDGDGDLPPDSPDECPEPGIDPDGPDGPEPPVPRNQTASEYIDSAYAGLPGIKNLCQRAPWTTERLLNVAKSLSVIDLASTNRTTLIQKLQTYRKNYMNNQPQGEEGLKSGGGVIVAGAAGFHIVSRIQMGTSIDLFGSRSWWVRMKQSVVDLKGEWYYNSTANWLDGGGGFRGIYPTGFGYKASLSVAQGFPLMWALENATETMLWVNLFANSDNRPFGDAYGEDFPDDDGSTDGSDTRYPYQQDQFWKRRGTYIPVPPAKNYQRLLSARKDQPILLQGWGYDGDAVPGTGITIFIIDSGFGIDVPGNDGDKADAETMRDALYDPKTSENIGHGTQMAMLAVGRKYGIAPGASPYLVKVIGSYTGSDGTKQTGIIEPAALDHALTHVAAVVGQKNLKGKAVISFSGTLKRDEAGDDWESVFRTHLQVLNAMGVVWVQAAGNNGYKSPLGLAYLSQLIPQCLGTSDNGMITVGATNNVGRYALYTSPEGPAGATDPGSITVWAQGSNVIVKMPNGVESSTQGTSNAAPQVAGLVAYYLTRWPARYDGLPGTEIAKKVKADLRANSYRRIPMAQQVNPTNTLPYPTPTDINVAYNNYWGPQNCGDVDNPSVSASSSSPSSTAGSPNPTGILQRQSNDPDGDFGTCPLSSPATSLGTTFTTSVRPSDTASSSTGGGSATLSSSVTSSSLTTSSSNTKTYTSFLTLTFSQT

SEQ ID NO: 34449 - DNA, 1233 bp, Muscodor strobelii
  misc_feature: SGI cDNA ID NO. 571906
  misc_feature: Encodes the peptide sequence at SEQ ID NO 34450
atgtttgggagccctaacttcgcagttgttcccaccccagtccctgcggctgtcgacatcctgcatctacctcaagaagtcacctggtgtattggtgactacctcgacattcacagtctttccaaccttgcccatacatgcgttggactaaggggtcaacttcaacgttaccttaacggaagaatgatcaaatggcataaggaggccacagagatgggccattgttgctgccactttgcctttaggcatctattcgatcgccatcccaagtcctatcctcccaacatcattgcacatgccattgcgaacgagtggtcgaccgacgacttcaagcaagttgttgagtcttgcgcttggcttaatccaggaatgatcaacggaactgacactggggatgattcctggccgccagttttcattgcggtcgcgaagaagagatacgatgcgatcaagctgttgcaagagaagggtgccgatctcaacgttgagtacaagcccaggtatctatgtaacacatcttacgcggatccattcaatttcctcaatggaaatagtgaaaactgcagctctgactgcaactatccgcataacaagcgactgccatcctatatctcatgtcgtccaaaaatatggggcagctacaccatcttcgacctggtgacacagtccaaagacgctgcgatggccgaacaccttcttgcgaaccaaggagtgaaaatggacttcacagcaatcgcaaacgccatggaagactggtggctcgctggccttagcgtcttcatctcttcgggcagagtcgaaaggcaggaaatagagaacactatcattcacacgctctttatcagatcgtcgtggctggtaaccgaagctcaacaagagtttgctctgggattggttgcactcatattggacccgaagccgaagaaagagggagagcttgaggaattttgtctacacggaatgattcaggctcaggaagttctgcacgcttgcagcctcctcacaaatgtgtctttcaatcatgctcagcttatgcaggctttgcatactagcgcacaggacgatgagatgcttgctgttactgaaataatcttagtacagctgggtccgaaagacagcatctggagagatgcgttgacagccgttttcagccacgagcatgtcgggcaagtcgacaacaaaaagacaactcgatacatctttgagtactttggggagtttctggagggatag

SEQ ID NO: 34450 - protein, 410 aa, Muscodor strobelii
  misc_feature: SGI Peptide ID NO. 571906
MFGSPNFAVVPTPVPAAVDILHLPQEVTWCIGDYLDIHSLSNLAHTCVGLRGQLQRYLNGRMIKWHKEATEMGHCCCHFAFRHLFDRHPKSYPPNIIAHAIANEWSTDDFKQVVESCAWLNPGMINGTDTGDDSWPPVFIAVAKKRYDAIKLLQEKGADLNVEYKPRYLCNTSYADPFNFLNGNSENCSSDCNYPHNKRLPSYISCRPKIWGSYTIFDLVTQSKDAAMAEHLLANQGVKMDFTAIANAMEDWWLAGLSVFISSGRVERQEIENTIIHTLFIRSSWLVTEAQQEFALGLVALILDPKPKKEGELEEFCLHGMIQAQEVLHACSLLTNVSFNHAQLMQALHTSAQDDEMLAVTEIILVQLGPKDSIWRDALTAVFSHEHVGQVDNKKTTRYIFEYFGEFLEG

SEQ ID NO: 34451 - DNA, 636 bp, Muscodor strobelii
  misc_feature: SGI cDNA ID NO. 571907
  misc_feature: Encodes the peptide sequence at SEQ ID NO 34452
atgctccagcgctattctgacatgggacagccgatggcttcatcgctcagcatgttccatgacatcgataagacccagcagcctatgggagcagtgtttgtgtgtcctgactacgacaagtttcttaaatccgctggtgacgacagtctcgagccacttgcctcgattgagagtgaactgagctatagcgacgactcagataatttgcccgaacttccaatgcgccacgtctcaggtaaactgggtcgtgaagaacttcaatctattcgcaatctggtcgtcgctgagcaatttgagccaacggatgagcctattagctgggactcggatgatgactggtgctacgacgaatacatggatctaaatcggagtgggatacgaaactactggcacatgtggctcgacgaggaaaacagctttgtttgtgacatttcggaaaaggatggcagactgtgcgattggcaccaattggataagctcgtctgggggagaaaacgctctcgatccccgagttcaggtgcagagatcttcttggtcaataagagggtacgtgatgagctcaaacgtttcgagaagcaacggaaagcgtggagatggagacctggctcgattcacccacccccgaagctacgttga

SEQ ID NO: 34452 - protein, 211 aa, Muscodor strobelii
  misc_feature: SGI Peptide ID NO. 571907
MLQRYSDMGQPMASSLSMFHDIDKTQQPMGAVFVCPDYDKFLKSAGDDSLEPLASIESELSYSDDSDNLPELPMRHVSGKLGREELQSIRNLVVAEQFEPTDEPISWDSDDDWCYDEYMDLNRSGIRNYWHMWLDEENSFVCDISEKDGRLCDWHQLDKLVWGRKRSRSPSSGAEIFLVNKRVRDELKRFEKQRKAWRWRPGSIHPPPKLR

SEQ ID NO: 34453 - DNA, 843 bp, Muscodor strobelii
  misc_feature: SGI cDNA ID NO. 571908
  misc_feature: Encodes the peptide sequence at SEQ ID NO 34454
atggcaacctcacagccagatcactcagtggtagcagatggccgaccgccctaccggtcatggagagagctgaggagagatcacatccgcgtcatggcctccagcgtcttcgatcgtcttctttggcccctggagggcgattttcctgccaatatatttgtcatgaaagatcccaagggagcgaacggtgatcttgagcccttcttcaactcccaaagcggcgaatggcacgagatcgcatcccagcccgtgacggacctgcagaaggtctcgtcgatagaggttatctctactgacctcaacgaatggtacagtagatggatggagtcgcacagagatcacggcgatgaaggcaaattcaactcggtgttcgtcacatacggcgatcttgacgacgatgtccgcccttttagggatggcacctgggagtgggatgctgactcagataccgagttcatgatcgagtgctgtggccaggagcgcccgctccggaaaggcggggagagcctggtcgtcacacccgcaccggggatcgatttcgttacagtgcgcgactatgtcggcgcaacacatgcctggctcttggataggcgggatgatcttgtcaaatccaagacggttggattcgctgcctgcaactacgtcggggtggagacgttggactggatggtgcaacgcgatacgttgttccagctaagaatagaagagaagcaaatttggctgaaaacccatacccctcctcctccacccaccgaagccgagtctgcctatcgcgcaaaatttcttgcgagaatacaggcaatgaaacgcagagaagacgacggctggcgttcgacacattaa

SEQ ID NO: 34454 - protein, 280 aa, Muscodor strobelii
  misc_feature: SGI Peptide ID NO. 571908
  misc_feature (16)..(246): NCBI GI: 85092569 Blast Desc: NCU05903 [Neurospora crassa OR74A] gi|28920889|gb|EAA30225.1| [Neurospora crassa OR74A]
  misc_feature (55)..(246): NCBI GI: 85092443 Blast Desc: NCU04949 [Neurospora crassa OR74A] gi|28920802|gb|EAA30161.1| [Neurospora crassa OR74A]
  misc_feature (34)..(253): NCBI GI: 116180240 Blast Desc: CHGG_00748 [Chaetomium globosum CBS 148.51] gi|88185045|gb|EAQ92513.1| CHGG_00748 [Chaetomium globosum CBS 148.51]
  misc_feature (34)..(202): NCBI GI: 116180280 Blast Desc: CHGG_00768 [Chaetomium globosum CBS 148.51] gi|88185065|gb|EAQ92533.1| CHGG_00768 [Chaetomium globosum CBS 148.51]
MATSQPDHSVVADGRPPYRSWRELRRDHIRVMASSVFDRLLWPLEGDFPANIFVMKDPKGANGDLEPFFNSQSGEWHEIASQPVTDLQKVSSIEVISTDLNEWYSRWMESHRDHGDEGKFNSVFVTYGDLDDDVRPFRDGTWEWDADSDTEFMIECCGQERPLRKGGESLVVTPAPGIDFVTVRDYVGATHAWLLDRRDDLVKSKTVGFAACNYVGVETLDWMVQRDTLFQLRIEEKQIWLKTHTPPPPPTEAESAYRAKFLARIQAMKRREDDGWRSTH

SEQ ID NO: 34455 - DNA, 798 bp, Muscodor strobelii
  misc_feature: SGI EST ID NO. CUFF.81841.0
  misc_feature: Variant of the nucleotide sequence at SEQ ID NO 34453
cggaagccctctgaaaaaataattaacccgatacctttttggctaccaggaagaccccatacagttggaagatggcacctgggagtgggatgctgactcagataccgagttcatgatcgagtgctgtggccaggagcgcccgctccggaaaggcggggagagcctggtcgtcacacccgcaccggggatcgatttcgttacagtgcgcgactatgtcggcgcaacacatgcctggctcttggataggcgggatgatcttgtcaaatccaagacggttggattcgctgcctgcaactacgtcggggtggagacgttggactggatggtgcaacgcgatacgttgttccagctaagaatagaagagaagcaaatttggctgaaaacccatacccctcctcctccacccaccgaagccgagtctgcctatcgcgcaaaatttcttgcgagaatacaggcaatgaaacgcagagaagacgacggctggcgttcgacacattaacccggcggagaagaaatacgttcgtttcggaaagaaaaccccaagtcagagcgatgttacattatacagtgtatatatcaattactcaaaatttttcttcccttaattcctcctgtctgactaatagttgcatacgtgtgggtgcgtgtaagctttcacttaccggcctgacctttggcatctagaggcacagtctctggtctaaccctaataatcaacagataatcagcccgctcgcctgacgcttccgtgatgaattcttcgtgtaagcgaggcacgaagatacatttcgaattcga

SEQ ID NO: 34456 - DNA, 987 bp, Muscodor strobelii
  misc_feature: SGI cDNA ID NO. 571909
  misc_feature: Encodes the peptide sequence at SEQ ID NO 34457
atgatggaaggaaccgacacgcctgaggctaagggaatctatctcatgcatctcgatgctatgctacttatctgtgatttactcaatctccaagatatctcagctttggcccaagtcagtcggcactttagagatcaactgaaacactatctctcaaaggagacgatgaggtggcatagagacttagcacccaaggcgaaactgggcactatggaactctgggagtccgtcatgggcggtatggctagccacccggtatattatgccagctctttccgacccccgaacatgatcacacatgccatccagaacgcatggccgctgaatgatgtgaagcaagttatcgaagacgctaaacagctacaccctcctcttctagatggcttggttagctgccacagaccagtacctccagtattcgttgcagtagagaagaacaggctcgatattctttctctgctggaagccaatggtgcgaacttggatattcgttgtactcgcgactgctttttcctgacttgcgccagcaaatacgagcgttgccactgtgtacacgactcaagaactcagtgtaaacacacttttccgcagttgtttgagcatgtattccataatgccaccgaatgctgcttcataccgaacccgggcagatggtgtcacgctggcgaagaatgcgacaagatactcgacattgccatcaaccacaagcatctggatatggtgaacatgattctgtcacgagacgatatactcgtgtatcctagatccttgaagatagctttggctacgcactggcagcccggcatccaagcaattctctcgtcgggacgcataggaaagtcgaccgccgtgaacgaacttactaagtttctacacgaacatcagaacgattggatagacattcctctcccgttcacacgggaattcgtggaatttctaatcacatgtggcgcgagaccacagttcgctaacctgatggatgagtaa

SEQ ID NO: 34457 - protein, 328 aa, Muscodor strobelii
  misc_feature: SGI Peptide ID NO. 571909
MMEGTDTPEAKGIYLMHLDAMLLICDLLNLQDISALAQVSRHFRDQLKHYLSKETMRWHRDLAPKAKLGTMELWESVMGGMASHPVYYASSFRPPNMITHAIQNAWPLNDVKQVIEDAKQLHPPLLDGLVSCHRPVPPVFVAVEKNRLDILSLLEANGANLDIRCTRDCFFLTCASKYERCHCVHDSRTQCKHTFPQLFEHVFHNATECCFIPNPGRWCHAGEECDKILDIAINHKHLDMVNMILSRDDILVYPRSLKIALATHWQPGIQAILSSGRIGKSTAVNELTKFLHEHQNDWIDIPLPFTREFVEFLITCGARPQFANLMDE

SEQ ID NO: 34458 - DNA, 253 bp, Muscodor strobelii
  misc_feature: SGI EST ID NO. CUFF.81852.0
  misc_feature: Variant of the nucleotide sequence at SEQ ID NO 34456
gcccaagtcagtcggcactttagagatcaactgaaacactatctctcaaaggagacgatgaggtggcatagagacttagcacccaaggcgaaactgggcactatggaactctgggagtccgtcatgggcggtatggctagccacccggtatattatgccagctctttccgacccccgaacatgatcacacatgccatccagaacgcatggccgctgaatgatgtgaagcaagttatcgaagacgctaaacagc

SEQ ID NO: 34459 - DNA, 1320 bp, Muscodor strobelii
  misc_feature: SGI cDNA ID NO. 571910
  misc_feature: Encodes the peptide sequence at SEQ ID NO 34460
atgctggaggcaaatggcgcgaacatggacgtacgactaatggagccatacagcgttccaagcccagacctcagtggccgcttctccttcttgccatggttttcccactacacgctactcgatgttgcaatcgtggaggaaaatctggagtttgcccgcagtatcatcgcgaggaccgacattcccgttcgttcgttttctctgtggcgagctctggaatgtcaatggctacctggtatagacgccatcctcgcctctggccgtatccctgatgaagatgtcaaggagctgttcacgaaagcacttttccggttcaaggccgcagattccgcagatactggcacgatgggaaaggaatcgtggttaggattattgatacgacgaggagccaacccgtatccagaaaagggtccaggagaattcggctgtggcgctcttctgagcttggtaaaagcacacgagccattggtagcgcacaaacttctccatcttgtcgagatgccccgcaggccgaagatcaaggctctcgctgtctgtgtacggcacgactgtttcctcgatgttacaaagaagatcatggaggactctgatatcgtgatccgtatgtggaagaagacccttgaaattgcattccatcactggtgcgaacatacgacgtggatgcctggtccaagaaacgagcgaaccatagattttctcttgaaaagaatcagcaggtttctggcggaaggagggaagattgatctcaacgataagacatcgggcgcttcgggcctaacacttctcgagcttgccacgagcgccacagcctgttctagagtacatcttagcggcggtcatcgagatcgggtcagaggtgagcgggactggattactccagtgctgcgaatgggtgctgagcttggagcacccaatgactggcacagcccgaataattatcacgcggccgcctataaacaagcagaactcaaacaaagatggacagcaaggacttcggtatcgacttatcgtgcgagtcgtgccgccactcagcctttcgtagagaaagctcggaagaagagagcgagatctatgtacacgcatctaaaaccaatcaagttcaatccacacaaattcaattggcccacaggcagcacttggcagtggtcgcggaaaaactaccgcacagcctacgagagaacactagactacacctacattgcgactcaggccagccaacgagctcaagatatgctattgtctagtcaatactttcaagaaacatcaaacatggcagcaggtggtggctggccatgtggatggaacaccgtgagacgctag

SEQ ID NO: 34460 - protein, 439 aa, Muscodor strobelii
  misc_feature: SGI Peptide ID NO. 571910
MLEANGANMDVRLMEPYSVPSPDLSGRFSFLPWFSHYTLLDVAIVEENLEFARSIIARTDIPVRSFSLWRALECQWLPGIDAILASGRIPDEDVKELFTKALFRFKAADSADTGTMGKESWLGLLIRRGANPYPEKGPGEFGCGALLSLVKAHEPLVAHKLLHLVEMPRRPKIKALAVCVRHDCFLDVTKKIMEDSDIVIRMWKKTLEIAFHHWCEHTTWMPGPRNERTIDFLLKRISRFLAEGGKIDLNDKTSGASGLTLLELATSATACSRVHLSGGHRDRVRGERDWITPVLRMGAELGAPNDWHSPNNYHAAAYKQAELKQRWTARTSVSTYRASRAATQPFVEKARKKRARSMYTHLKPIKFNPHKFNWPTGSTWQWSRKNYRTAYERTLDYTYIATQASQRAQDMLLSSQYFQETSNMAAGGGWPCGWNTVRR

SEQ ID NO: 34461 - DNA, 1197 bp, Muscodor strobelii
  misc_feature: SGI cDNA ID NO. 571911
  misc_feature: Reduced expression when VOC is produced
  misc_feature: Encodes the peptide sequence at SEQ ID NO 34462
atggctcaagagggccggggcaaccaaatttctgcagtcgcttacacctttctgaccatctcgaccgtagcctgtctccttcgagtatactgccgaggatgggttatcaaggcatttgcgattgaagactggctggctgtgattgctcaggttctgttcataattttctgtgcctatgaaattgccggcgttcaatacgggactggtcgacacgtgaaggatattcccgtgggagacgtgcccaaggctctacagatgtggtggacctgcgagcctctctacgtcttggcaaacatgttcatcaaagccagtatcgccattttcttgctacgaatctgcatcaccaagctacaccgaatgattatctacgtcaccatagttgttactgagctctatggtctcttctttttcatcatcttcatcctgcaatgtcagccgacatcattcttctgggagcgcgcaacggccaacccgcctaagggtggtcattgcctaaatgctgaaattgtcgccaacgtcgtttacggatactctgctatcagtacctggacagattggacctacagtatcctgcccgcgttccttatctggaacctgcaaatgagtacccgagtcaaggtgtccgttatagctattctggccaccagttgcgttgcctctgcagcaaccattgtccgtttcccatatatccatagcttgaccaattttggtgacttcctttactctaccaccgacgtcgccatctggtcgactatcgagactggtcttggtatcacggctgcatgtgttgccactcttcgaccactccttaagggcttcttcggcggctcatcggccactggctatggcacctcggcgcatgctgctggatggcgtaagaccggcagcggccacaacgcaaagagtcgcgacacctttgcaatgcatgacttgactagtggcaaatgcggtgtcaccactgtcattgatcacgacaagcagggtatcaacggcgacctcgaaagccagaagaataagggcgacgacggctccgagggctcaggatctattcggggcaacgactattggaacaccagcgagtctaacctggccgacaaggctcacaacgatagctacggcgcccacttacaacaggccggtgccaccaatccttggaacatcaaagttaagacgtcgattgtccaaacaaggaactaa

SEQ ID NO: 34462 - protein, 398 aa, Muscodor strobelii
  misc_feature: SGI Peptide ID NO. 571911
  misc_feature (1)..(397): NCBI GI: 46139657 Blast Desc: FG11343.1 [Gibberella zeae PH-1]
  misc_feature (4)..(365): NCBI GI: 85109074 Blast Desc: NCU07649 [Neurospora crassa OR74A] gi|28924355|gb|EAA33496.1| [Neurospora crassa OR74A]
  misc_feature (52)..(343): NCBI GI: 154308878 Blast Desc: BC1G_07967 [Botryotinia fuckeliana B05.10] gi|150852593|gb|EDN27785.1| BC1G_07967 [Botryotinia fuckeliana B05.10]
  misc_feature (4)..(378): NCBI GI: 212529590 Blast Desc: integral membrane protein, [Penicillium marneffei ATCC 18224] gi|210074350|gb|EEA28437.1| integral membrane protein, [Penicillium marneffei ATCC 18224]
  misc_feature (1)..(334): NCBI GI: 169615038 Blast Desc: SNOG_10673 [Phaeosphaeria nodorum SN15] gi|160702870|gb|EAT82067.2| SNOG_10673 [Phaeosphaeria nodorum SN15]
  misc_feature (4)..(341): NCBI GI: 242805784 Blast Desc: integral membrane protein, [Talaromyces stipitatus ATCC 10500] gi|218715229|gb|EED14651.1| integral membrane protein, [Talaromyces stipitatus ATCC 10500]
  misc_feature (4)..(310): NCBI GI: 256734176 Blast Desc: NECHADRAFT_92086 [Nectria haematococca mpVI 77-13-4]
  misc_feature (6)..(363): NCBI GI: 67903912 Blast Desc: AN8943.2 [Aspergillus nidulans FGSC A4] gi|40744921|gb|EAA64077.1| AN8943.2 [Aspergillus nidulans FGSC A4] gi|259486614|tpe|CBF84606.1| TPA: integral membrane protein,
  misc_feature (2)..(364): NCBI GI: 70992381 Blast Desc: integral membrane protein [Aspergillus fumigatus Af293] gi|66848672|gb|EAL89001.1| integral membrane protein, [Aspergillus fumigatus Af293] gi|159124610|gb|EDP49728.1| A1163]
  misc_feature (1)..(304): NCBI GI: 145230541 Blast Desc: An01g11690 [Aspergillus niger] gi|134055697|emb|CAK44071.1| protein product [Aspergillus niger]
  misc_feature: Useful for introducing or modulating the production of volatile compounds
MAQEGRGNQISAVAYTFLTISTVACLLRVYCRGWVIKAFAIEDWLAVIAQVLFIIFCAYEIAGVQYGTGRHVKDIPVGDVPKALQMWWTCEPLYVLANMFIKASIAIFLLRICITKLHRMIIYVTIVVTELYGLFFFIIFILQCQPTSFFWERATANPPKGGHCLNAEIVANVVYGYSAISTWTDWTYSILPAFLIWNLQMSTRVKVSVIAILATSCVASAATIVRFPYIHSLTNFGDFLYSTTDVAIWSTIETGLGITAACVATLRPLLKGFFGGSSATGYGTSAHAAGWRKTGSGHNAKSRDTFAMHDLTSGKCGVTTVIDHDKQGINGDLESQKNKGDDGSEGSGSIRGNDYWNTSESNLADKAHNDSYGAHLQQAGATNPWNIKVKTSIVQTRN

SEQ ID NO: 34463 - DNA, 1681 bp, Muscodor strobelii
  misc_feature: SGI EST ID NO. CUFF.81871.0
  misc_feature: Variant of the nucleotide sequence at SEQ ID NO 34461
tatacatggtgcttgccttgcccacttctctgcgaaacctccatatcgtcctcgttcctgtgttgttccatcagagtgcagtcggtcgttcgtcgcatagcaccgcatttcaatctgttgatagtttcttgccctgtccgcccgggaaaacattaacacacgtgcaacatggctcaagagggccggggcaaccaaatttctgcagtcgcttacacctttctgaccatctcgaccgtagcctgtctccttcgagtatactgccgaggatgggttatcaaggcatttgcgattgaagactggctggctgtgattgctcaggttctgttcataattttctgtgcctatgaaattgccggcgttcaatacgggactggtcgacacgtgaaggatattcccgtgggagacgtgcccaaggctctacagatgtggtggacctgcgagcctctctacgtcttggcaaacatgttcatcaaagccagtatcgccattttcttgctacgaatctgcatcaccaagctacaccgaatgattatctacgtcaccatagttgttactgagctctatggtctcttctttttcatcatcttcatcctgcaatgtcagccgacatcattcttctgggagcgcgcaacggccaacccgcctaagggtggtcattgcctaaatgctgaaattgtcgccaacgtcgtttacggatactctgctatcagtacctggacagattggacctacagtatcctgcccgcgttccttatctggaacctgcaaatgagtacccgagtcaaggtgtccgttatagctattctggccaccagttgcgttgcctctgcagcaaccattgtccgtttcccatatatccatagcttgaccaattttggtgacttcctttactctaccaccgacgtcgccatctggtcgactatcgagactggtcttggtatcacggctgcatgtgttgccactcttcgaccactccttaagggcttcttcggcggctcatcggccactggctatggcacctcggcgcatgctgctggatggcgtaagaccggcagcggccacaacgcaaagagtcgcgacacctttgcaatgcatgacttgactagtggcaaatgcggtgtcaccactgtcattgatcacgacaagcagggtatcaacggcgacctcgaaagccagaagaataagggcgacgacggctccgagggctcaggatctattcggggcaacgactattggaacaccagcgagtctaacctggccgacaaggctcacaacgatagctacggcgcccacttacaacaggccggtgccaccaatccttggaacatcaaagttaagacgtcgattgtccaaacaaggaactaaagatcatgaagagaatatgagacgaatgggtcgtagcggcaatgacgacgcgtaaaaattataattattactaggatgtaacaatatatagtagaactaggaccttttttgatatagtcacgcgactatcacggcttgggagatcgtctaggcgattttattggaattttcacagcgttcccaacattatttgccctataatttctgcgagtctttgcttagatctgtgtaagagatagatagtaccggactgtgaaaattctagggtggtagattgatcggatgtggttgctcggagtagcggccggccggcgat

SEQ ID NO: 34464 - DNA, 337 bp, Muscodor strobelii
  misc_feature: SGI cDNA ID NO. 571912
  misc_feature: Elevated expression when VOC is produced
  misc_feature: Encodes the peptide sequence at SEQ ID NO 34465
atgtctgtcactagcactgcccggcacgatagcattgccaatccatccgatgaaactgagccgtgcgccttagagtctaccgccacccgaatcgccgctccccaagcacggtcggaaaagcaactaggtcccgaaagtattgacacggatgattacacttcgactccggagagtagttccctcgccgccgataaatatgccgctttggctaatgaggtttttggcttcaatggctggtcatcgagtattcagggcgtccacactaactttcttaacaagaacggtcagatctccgaggtctccctagacatatccgttactattcgcgtcactttaa

SEQ ID NO: 34465 - protein, 112 aa, Muscodor strobelii
  misc_feature: SGI Peptide ID NO. 571912
  misc_feature (69)..(112): Pfam Id: PF04098 Pfam Desc: Rad52/22 family double-strand break repair protein
  misc_feature (8)..(112): NCBI GI: 52783233 Blast Desc: RAD52_MAGGR RecName: Full=DNA repair and recombination protein rhm52; AltName: Full=RAD52 homolog gi|22775418|dbj|BAC11860.1| recombinational repair protein
  misc_feature (8)..(112): NCBI GI: 145604450 Blast Desc: MGG_08585 [Magnaporthe grisea 70-15] gi|145012445|gb|EDJ97101.1| MGG_08585 [Magnaporthe grisea 70-15]
  misc_feature (8)..(112): NCBI GI: 85100991 Blast Desc: NCU04275 [Neurospora crassa OR74A] gi|52783241|sp|Q9HGI2.1|RAD52_NEUCR RecName: Full=DNA repair and recombination protein mus-11; AltName: Full=RAD52 homolog MUS11
  misc_feature (8)..(112): NCBI GI: 171694273 Blast Desc: protein product [Podospora anserina] gi|170947085|emb|CAP73890.1| protein product [Podospora anserina]
  misc_feature (13)..(112): NCBI GI: 212528506 Blast Desc: RAD52 DNA repair protein RADC [Penicillium marneffei ATCC 18224] gi|210073808|gb|EEA27895.1| RAD52 DNA repair protein RADC [Penicillium marneffei ATCC 18224]
  misc_feature (13)..(112): NCBI GI: 111380642 Blast Desc: RAD52-like protein [Penicillium marneffei]
  misc_feature (11)..(112): NCBI GI: 261352115 Blast Desc: DNA repair and recombination protein rad22 [Verticillium albo-atrum VaMs.102]
  misc_feature (11)..(112): NCBI GI: 154316488 Blast Desc: BC1G_04175 [Botryotinia fuckeliana B05.10] gi|150845975|gb|EDN21168.1| BC1G_04175 [Botryotinia fuckeliana B05.10]
  misc_feature (11)..(112): NCBI GI: 156043271 Blast Desc: SS1G_10638 [Sclerotinia sclerotiorum 1980] gi|154695026|gb|EDN94764.1| SS1G_10638 [Sclerotinia sclerotiorum 1980]
  misc_feature (13)..(112): NCBI GI: 240280058 Blast Desc: RAD52 DNA repair protein RADC [Ajellomyces capsulatus H143]
  misc_feature: Useful for introducing or modulating the production of volatile compounds
MSVTSTARHDSIANPSDETEPCALESTATRIAAPQARSEKQLGPESIDTDDYTSTPESSSLAADKYAALANEVFGFNGWSSSIQGVHTNFLNKNGQISEVSLDISVTIRVTL

SEQ ID NO: 34466 - DNA, 722 bp, Muscodor strobelii
  misc_feature: SGI EST ID NO. CUFF.81891.1
  misc_feature: Variant of the nucleotide sequence at SEQ ID NO 34464
ctatggtctgtcgtggctggaggagaggatagaccaaggatgcgctttagcggaaggtgggttggggtgttcacggtgtgggtggggttcctaggtaggagcggtcgacgtcaatcaactagttagactaatacacgtgacatcccttatttccgacagttaagtagcaactatgaaagcagtctgctataaaaagaaccattttagacgcacgtcaaggttgtctatcaacatcaactcaacggtgctcatttcgcctagttcttattagcttgttagctatttaaaactacctagaacgatcggcgctgcgagttcgaacacccagccgcccgtcgaaaagttacttatccgcttccagcgcccgatcacgcaaggatttcatcatgtctgtcactagcactgcccggcacgatagcattgccaatccatccgatgaaactgagccgtgcgccttagagtctaccgccacccgaatcgccgctccccaagcacggtcggaaaagcaactaggtcccgaaagtattgacacggatgattacacttcgactccggagagtagttccctcgccgccgataaatatgccgctttggctaatgaggtttttggcttcaatggctggtcatcgagtattcagggcgtccacactaactttcttaacaagaacggtcagatctccgaggtctccctagacatatccgttactattcgcgtcacttta

SEQ ID NO: 34467 - DNA, 369 bp, Muscodor strobelii
  misc_feature: SGI cDNA ID NO. 571914
  misc_feature: Encodes the peptide sequence at SEQ ID NO 34468
atgcctagcgaacgctctgcattattcgcgaagcgaagccggtcgcagagctacagcagcgatgacgaggagtctatcgatttacaacacgtgccgtcaaagaggcgccggttcgaagatacttacaagccgcgtgagcgagcagagagttggggcgacctctttttcaccattagtgcagtttatataagaagaggcggcgacgttgaagctttggggtttaatcccgaagaccgtatttggactgacccggatggtgtcgcgtacgacttcgataatggcaaattcacagcagcgagggcctattgggccatgttacgtcagttctcgtattggtggtattttcagagcgaagtgaatgaggcgtag

SEQ ID NO: 34468 - protein, 122 aa, Muscodor strobelii
  misc_feature: SGI Peptide ID NO. 571914
MPSERSALFAKRSRSQSYSSDDEESIDLQHVPSKRRRFEDTYKPRERAESWGDLFFTISAVYIRRGGDVEALGFNPEDRIWTDPDGVAYDFDNGKFTAARAYWAMLRQFSYWWYFQSEVNEA

SEQ ID NO: 34469 - DNA, 885 bp, Muscodor strobelii
  misc_feature: SGI cDNA ID NO. 571915
  misc_feature: Encodes the peptide sequence at SEQ ID NO 34470
atgaaactaggagtctcgggcgttttatatttagtgatacttaccctttaccgtcccgagcggagtttcatgaagccttatctacatctagcagctttagagaaggctgctcacgcccttgcattcgtccaaggcgtcgtattcgcttgtctcctatattccctcccactgtatttccaggcagtgagaggatatgccgttgctgtctccggtaccgcccttctttcattgctacttccttttgtattctcatcctttatcatttcttggctcgtccccatcaccggcatatcccgctattgcatccacactgggtggctgatcgtgacggcaggggcggcttttcatttgtttctgaccccaggcacgtcgacgcccagctggctgtccatcgaggctgttgttggtctcggtcttgggatcgcatggagtgtcagaagctttgctgctcgggcatcaccagacggcgaagagctactatccgtggataggttgtacgtcttctttcaatcagcaggtctgactgtaggtgtcactatctgtagtgttgtattcctgagctcttttaagatgctcgtccggaagaatgctctatacgcaccattcgcccaggaatggaccggccatgccttggttttgatgggaatactcaatgagctaaccgcgccccaagatcaagacctccggacctttctcgtattggtctttggtgaaagtctcagaattttctggttagtcatgtcggtattttgcggcgtgggtgctctggtctatctgctatatgcttggaagcaggcgactgaccctgtgaggaaacgagaagctcaatccggcagcttcagctcgtcccgttccgagtttggtctggttccctactggatatga

SEQ ID NO: 34470 - protein, 294 aa, Muscodor strobelii
  misc_feature: SGI Peptide ID NO. 571915
  misc_feature (43)..(278): NCBI GI: 212538817 Blast Desc: MFS multidrug transporter, [Penicillium marneffei ATCC 18224] gi|210069306|gb|EEA23397.1| MFS multidrug transporter, [Penicillium marneffei ATCC 18224]
  misc_feature (7)..(268): NCBI GI: 242820296 Blast Desc: MFS multidrug transporter, [Talaromyces stipitatus ATCC 10500] gi|218713948|gb|EED13372.1| MFS multidrug transporter, [Talaromyces stipitatus ATCC 10500]
  misc_feature (17)..(277): NCBI GI: 119467438 Blast Desc: MFS transporter, [Neosartorya fischeri NRRL 181] gi|119405677|gb|EAW15628.1| MFS transporter, [Neosartorya fischeri NRRL 181]
  misc_feature (3)..(261): NCBI GI: 154302704 Blast Desc: BC1G_09467 [Botryotinia fuckeliana B05.10] gi|150855214|gb|EDN30406.1| BC1G_09467 [Botryotinia fuckeliana B05.10]
  misc_feature (41)..(285): NCBI GI: 70984475 Blast Desc: MFS multidrug transporter [Aspergillus fumigatus Af293] gi|66845371|gb|EAL85706.1| MFS multidrug transporter, [Aspergillus fumigatus Af293] gi|159122527|gb|EDP47648.1| MFS
  misc_feature (3)..(261): NCBI GI: 156056404 Blast Desc: SS1G_05556 [Sclerotinia sclerotiorum 1980] gi|154703338|gb|EDO03077.1| SS1G_05556 [Sclerotinia sclerotiorum 1980]
  misc_feature (7)..(254): NCBI GI: 169777863 Blast Desc: [Aspergillus oryzae RIB40] gi|83772134|dbj|BAE62264.1| protein product [Aspergillus oryzae]
  misc_feature (43)..(284): NCBI GI: 189203755 Blast Desc: PTRG_07881 [Pyrenophora tritici-repentis Pt-1C-BFP] gi|187985312|gb|EDU50800.1| PTRG_07881 [Pyrenophora tritici-repentis Pt-1C-BFP]
  misc_feature (43)..(286): NCBI GI: 255931155 Blast Desc: Pc12g02460 [Penicillium chrysogenum Wisconsin 54-1255] gi|211581753|emb|CAP79873.1| Pc12g02460 [Penicillium chrysogenum Wisconsin 54-1255]
  misc_feature (43)..(260): NCBI GI: 238494722 Blast Desc: MFS multidrug transporter, [Aspergillus flavus NRRL3357] gi|220695247|gb|EED51590.1| MFS multidrug transporter, [Aspergillus flavus NRRL3357]
MKLGVSGVLYLVILTLYRPERSFMKPYLHLAALEKAAHALAFVQGVVFACLLYSLPLYFQAVRGYAVAVSGTALLSLLLPFVFSSFIISWLVPITGISRYCIHTGWLIVTAGAAFHLFLTPGTSTPSWLSIEAVVGLGLGIAWSVRSFAARASPDGEELLSVDRLYVFFQSAGLTVGVTICSVVFLSSFKMLVRKNALYAPFAQEWTGHALVLMGILNELTAPQDQDLRTFLVLVFGESLRIFWLVMSVFCGVGALVYLLYAWKQATDPVRKREAQSGSFSSSRSEFGLVPYWI

SEQ ID NO: 34471 - DNA, 476 bp, Muscodor strobelii
  misc_feature: SGI EST ID NO. CUFF.81942.0
  misc_feature: Variant of the nucleotide sequence at SEQ ID NO 34469
ctggctgtccatcgaggctgttgttggtctcggtcttgggatcgcatggagtgtcagaagctttgctgctcgggcatcaccagacggcgaagagctactatccgtggataggttgtacgtcttctttcaatcagcaggtctgactgtaggtgtcactatctgtagtgttgtattcctgagctcttttaagatgctcgtccggaagaatgctctatacgcaccattcgcccaggaatggaccggccatgccttggttttgatgggaatactcaatgagctaaccgcgccccaagatcaagacctccggacctttctcgtattggtctttggtgaaagtctcagaattttctggttagtcatgtcggtattttgcggcgtgggtgctctggtctatctgctatatgcttggaagcaggcgactgaccctgtgaggaaacgagaagctcaatccggcagcttcagctcgtcccgttccg

SEQ ID NO: 34472 - DNA, 1449 bp, Muscodor strobelii
  misc_feature: SGI cDNA ID NO. 571916
  misc_feature: Encodes the peptide sequence at SEQ ID NO 34473
atgatccggaaccttcgaattgaggattggattcgatcaatccaacaagagtcctctccgacgtctgtcgacgagcgaccaacgaaacgaagacgcctgtgtagcggcaaagattacccggcgcttgggacgcctcccctgacagaccctagcgacgcgatgtctagcatgaagaggagccatggggagactgaagaccaggaccttgaggaggaacgggagaatgtcctaagtagatctgtcgatcccgaacgcaccccaaagcccttccgcgcctctcttcctccaaacaaacaatcccgaccaaggtcgaaaagccccaagaaatccagggccatcttccctctcctcgaaaagccgatcaagttcgccgaggcaacgtccgacaatttgccgaccgacgtggcgggtttgtttacaaacattgaaaatgccgtggtgtataggcaggcaatcgtgccttacgaagtaaagccatttttcgacagtcgaaccccgccgacctacttctcgttgccatcaccggatcctgagactcaagcggcgaaccacacaaaagcgacacgggcacattccgcactctgtcgtatcaagagagcagctacgaaatcggcacgttaccagcgccacgagcaggcatggaacaacaaggtccatacgccgctcttagagctgctttgtcgacgggagaatgatacagaacatgcggagctactgcgtgatgccgtcgtagaatgggaacctatgatgtccgccactatcgcgggcgactcgattcctcggttatccattcagggcgataccatggcatgtaccgtctcgatgagcagcacgggccagtcaagccagagcgaggcccaaaatccaggccaggtgcatagcagcagcgatagtaagaagatcgactacgcccttgtcttggagcttcctgacgattctgcgttgtcctgccgggttcgtgctctcgtgaatgagatagcagcccatgatctgaaacctgctccccatctcaaccaaactacatatcctcctgtgcagtatgcaccaatagcagtttcaatcgagaccaagtccccgttttcgtctcaggaccctctggtgcaacttgggatctggaccgctgcgtggcacaaaaggatgtccttcttgagaaatcagctgaactggggcaaagcctcccacaccgaacaagcccagcggctcgtgtcgttacctttgatccaagcggttggccaccaatggcatttattctttgcttgcgactctgacgggtccaagtcaatcacgatttacggccctgtgacactcggctcgacggatgacatgatatctctctataccttgttgacatcattgacagcaatcaaggcatgggtcgagacggaattttacacgggcatgaagaaatggctcaaggttgagcaatcatcttctgaagtcaagccataa

SEQ ID NO: 34473 - protein, 482 aa, Muscodor strobelii
  misc_feature: SGI Peptide ID NO. 571916
  misc_feature (107)..(481): NCBI GI: 116194203 Blast Desc: CHGG_06819 [Chaetomium globosum CBS 148.51] gi|88182732|gb|EAQ90200.1| CHGG_06819 [Chaetomium globosum CBS 148.51]
  misc_feature (97)..(463): NCBI GI: 116194328 Blast Desc: CHGG_03762 [Chaetomium globosum CBS 148.51] gi|88179675|gb|EAQ87143.1| CHGG_03762 [Chaetomium globosum CBS 148.51]
  misc_feature (99)..(463): NCBI GI: 256721214 Blast Desc: NECHADRAFT_82331 [Nectria haematococca mpVI 77-13-4]
  misc_feature (99)..(467): NCBI GI: 149209015 Blast Desc: MGCH7_ch7g3 [Magnaporthe grisea 70-15] gi|86195958|gb|EAQ70596.1| MGCH7_ch7g3 [Magnaporthe grisea 70-15]
  misc_feature (99)..(420): NCBI GI: 145604607 Blast Desc: MGG_07826 [Magnaporthe grisea 70-15] gi|145012600|gb|EDJ97254.1| MGG_07826 [Magnaporthe grisea 70-15]
  misc_feature (101)..(470): NCBI GI: 256719922 Blast Desc: NECHADRAFT_4538 [Nectria haematococca mpVI 77-13-4]
  misc_feature (179)..(450): NCBI GI: 116197324 Blast Desc: CHGG_05260 [Chaetomium globosum CBS 148.51] gi|88181173|gb|EAQ88641.1| CHGG_05260 [Chaetomium globosum CBS 148.51]
  misc_feature (75)..(421): NCBI GI: 116191515 Blast Desc: CHGG_05475 [Chaetomium globosum CBS 148.51] gi|88181388|gb|EAQ88856.1| CHGG_05475 [Chaetomium globosum CBS 148.51]
  misc_feature (339)..(471): NCBI GI: 39963832 Blast Desc: [Magnaporthe grisea 70-15] gi|145015428|gb|EDJ99964.1| [Magnaporthe grisea 70-15]
  misc_feature (337)..(472): NCBI GI: 256722137 Blast Desc: NECHADRAFT_55546 [Nectria haematococca mpVI 77-13-4]
MIRNLRIEDWIRSIQQESSPTSVDERPTKRRRLCSGKDYPALGTPPLTDPSDAMSSMKRSHGETEDQDLEEERENVLSRSVDPERTPKPFRASLPPNKQSRPRSKSPKKSRAIFPLLEKPIKFAEATSDNLPTDVAGLFTNIENAVVYRQAIVPYEVKPFFDSRTPPTYFSLPSPDPETQAANHTKATRAHSALCRIKRAATKSARYQRHEQAWNNKVHTPLLELLCRRENDTEHAELLRDAVVEWEPMMSATIAGDSIPRLSIQGDTMACTVSMSSTGQSSQSEAQNPGQVHSSSDSKKIDYALVLELPDDSALSCRVRALVNEIAAHDLKPAPHLNQTTYPPVQYAPIAVSIETKSPFSSQDPLVQLGIWTAAWHKRMSFLRNQLNWGKASHTEQAQRLVSLPLIQAVGHQWHLFFACDSDGSKSITIYGPVTLGSTDDMISLYTLLTSLTAIKAWVETEFYTGMKKWLKVEQSSSEVKP

SEQ ID NO: 34474 - DNA, 2785 bp, Muscodor strobelii
  misc_feature: SGI EST ID NO. CUFF.82011.1
  misc_feature: Variant of the nucleotide sequence at SEQ ID NO 34472
gcgcatgtggctattgaaattaggtaggcacagccccgcactgtcttacctatggcaacaacaccgacaaccccgttgttttgtaaacaactaggcactggctgttatccagtgtcgttttcctctccagcccccgacgcttttattatgatccggaaccttcgaattgaggattggattcgatcaatccaacaagagtcctctccgacgtctgtcgacgagcgaccaacgaaacgaagacgcctgtgtagcggcaaagattacccggcgcttgggacgcctcccctgacagaccctagcgacgcgatgtctagcatgaagaggagccatggggagactgaagaccaggaccttgaggaggaacgggagaatgtcctaagtagatctgtcgatcccgaacgcaccccaaagcccttccgcgcctctcttcctccaaacaaacaatcccgaccaaggtcgaaaagccccaagaaatccagggccatcttccctctcctcgaaaagccgatcaagttcgccgaggcaacgtccgacaatttgccgaccgacgtggcgggtttgtttacaaacattgaaaatgccgtggtgtataggcaggcaatcgtgccttacgaagtaaagccatttttcgacagtcgaaccccgccgacctacttctcgttgccatcaccggatcctgagactcaagcggcgaaccacacaaaagcgacacgggcacattccgcactctgtcgtatcaagagagcagctacgaaatcggcacgttaccagcgccacgagcaggcatggaacaacaaggtccatacgccgctcttagagctgctttgtcgacgggagaatgatacagaacatgcggagctactgcgtgatgccgtcgtagaatgggaacctatgatgtccgccactatcgcgggcgactcgattcctcggttatccattcagggcgataccatggcatgtaccgtctcgatgagcagcacgggccagtcaagccagagcgaggcccaaaatccaggccaggtgcatagcagcagcgatagtaagaagatcgactacgcccttgtcttggagcttcctgacgattctgcgttgtcctgccgggttcgtgctctcgtgaatgagatagcagcccatgatctgaaacctgctccccatctcaaccaaactacatatcctcctgtgcagtatgcaccaatagcagtttcaatcgagaccaagtccccgttttcgtctcaggaccctctggtgcaacttgggatctggaccgctgcgtggcacaaaaggatgtccttcttgagaaatcagctgaactggggcaaagcctcccacaccgaacaagcccagcggctcgtgtcgttacctttgatccaagcggttggccaccaatggcatttattctttgcttgcgactctgacgggtccaagtcaatcacgatttacggccctgtgacactcggctcgacggatgacatgatatctctctataccttgttgacatcattgacagcaatcaaggcatgggtcgagacggaattttacacgggcatgaagaaatggctcaaggttgagcaatcatcttctgaagtcaagccataataactgtttgctatggtctgcttgagcgtataaatgaatatattccctgactgctgctggctttactgcctactccatgtctggaaacgatgcggacgcgggggacgcggactccgaacttgcgatgccgagtgacaccgactcgatcgatagccaggagtggcgtgttgcgacggctccgcgctgtaagtttggccgcttagacatcgctgatgaggtcattgcgataatcgagttcttcaacatggctgacgaggtcggttatcgcacatttgataacgaaagcaagaataaaacttgcatggtcgatatcggcgacaccatttgggcttcgacggtacagagtgccagatcggctgtgaggacggttgtgtattgaggttcaaggcgcatggcagcctttgcgtttcgccatacgcttgggcaaaatccgctgctttggtcgagtcggacaatttcttatagcatgcaccactgtagttcgtttgaggctgcacgccactattgctgtgacaaggattttaattgtgctacatctccgaatcatcggactgtacagtagagttcaggttcagcgtccgcaggtcggagctagagaatttctggaataagtcacgagtggggcgcagagacaatgcttacctagcgtaccaattactcgggagcttagacgccagcagcgaaaactagctgaccatgttaggtcattacagcatttcacacacattcaccaccctctaatcaaatacagtaataatacaacttaaccctcacttactttacaatcttgcaagtaaaacattaacatgctcgaacaacccatcaacagcaacgaatcgtacgcggccacctagacgaccccttttgcgatgacatgctggtgccggcacacatccatccagccaagtgtcacgatggcaacacgccacgagacacaccaactcttgacaatgaattatgctaccaggatcaaactgtagtataagcagtagctctattagacctgaacatcacttgtcataggccatctaccaatgggccagcacttttgttatcgccgcccgctgcttatataagaaacaatggcagctttctgagtccagagttatgggatacctcacaagctggacagatagagcacaccaataccagtgcgcacaacaacgctgcgtataacctctcgatccat

SEQ ID NO: 34475 - DNA, 1050 bp, Muscodor strobelii
  misc_feature: SGI cDNA ID NO. 571917
  misc_feature: Encodes the peptide sequence at SEQ ID NO 34476
atgttcaccccctcgcacccagttcatcgggctcgtcgacttcctctcaatcccttcttctcgcgtgccaagatcttatcttctgcctctcagactctgcttttccatcacattgagaagctgatctaccagatctcaaggcatatcagtgaaaagagtggccagatcaatattggagcggcgttaaatgcgtttacgagagatgtcgcgaatgattttatcattgagcgagactgtgatagtttgtctaaggaggaatttgacttcgaggcgagtatcaatccagggccagaaaccgtagtagcccttcaacaactaatggcaaaggcaaaagaagaccccaacgcgtcaagcgaaaataacatcgtgcaagcgattctatcttcaaagctgcctgactctgacaagacattcgagcgcatcttcgaagatctctcaaccattatgggtgcaggcgttgagacaaccgccggtgtgctacgcatggtgttattccacacttacactaaccccaccatcctctctgagctacgtaccgagcttgccacacttccaccctctaccaccgacaatctttcactcaggacgttggaaaagctaccctacctaacagcagtgcttactgaaggccttcgcttgagtcccgctgtagcgacgaggatgagcaggattgcgccggatagagatttattctatcaaaagctgcgcataccagccggtacaccggtgggcatgacgacgctccttatgcataccgacgagagcgtgttccccgatccattccgattcgatcctgggagatggttggaagacggtgacctgataaagacaatgccgaatgctttcgcgccatttgcgaagggcactaggatttgtgctggcatgcatcttgcatgggcagagttatatctcgtaaccgctacgctgatccgcgggttcgatttcgacttcgagggcaccactgctgaggatttgagagcagtcagtgatcagtttattatcggaacgaaacatggcggcaatctgaacgcgattgcttctgtgtgctga

SEQ ID NO: 34476 - protein, 349 aa, Muscodor strobelii
  misc_feature: SGI Peptide ID NO. 571917
  misc_feature (4)..(345): Pfam Id: PF00067 Pfam Desc: Cytochrome P450
  misc_feature (145)..(324): Pfam Id: PF00067 Pfam Desc: Cytochrome P450
  misc_feature (1)..(348): NCBI GI: 171683471 Blast Desc: protein product [Podospora anserina] gi|170941695|emb|CAP67349.1| protein product [Podospora anserina]
  misc_feature (20)..(344): NCBI GI: 238839890 Blast Desc: cytochrome P450 [Microsporum canis CBS 113480]
  misc_feature (1)..(344): NCBI GI: 238841488 Blast Desc: cytochrome P450 [Microsporum canis CBS 113480]
  misc_feature (1)..(296): NCBI GI: 116206024 Blast Desc: CHGG_02305 [Chaetomium globosum CBS 148.51] gi|88182902|gb|EAQ90370.1| CHGG_02305 [Chaetomium globosum CBS 148.51]
  misc_feature (3)..(325): NCBI GI: 169774759 Blast Desc: [Aspergillus oryzae RIB40] gi|238496643|ref|XP_002379557.1| cytochrome P450, [Aspergillus flavus NRRL3357] gi|83769710|dbj|BAE59845.1| protein product
  misc_feature (6)..(333): NCBI GI: 259480381 Blast Desc: TPA: cytochrome P450, (Eurofung) [Aspergillus nidulans FGSC A4]
  misc_feature (3)..(340): NCBI GI: 67536942 Blast Desc: AN4641.2 [Aspergillus nidulans FGSC A4] gi|40741253|gb|EAA60443.1| AN4641.2 [Aspergillus nidulans FGSC A4]
  misc_feature (6)..(332): NCBI GI: 255938474 Blast Desc: Pc14g00120 [Penicillium chrysogenum Wisconsin 54-1255] gi|211584628|emb|CAP74153.1| Pc14g00120 [Penicillium chrysogenum Wisconsin 54-1255]
  misc_feature (3)..(333): NCBI GI: 70985400 Blast Desc: cytochrome P450 [Aspergillus fumigatus Af293] gi|66845834|gb|EAL86168.1| cytochrome P450, [Aspergillus fumigatus Af293] gi|159125869|gb|EDP50985.1| cytochrome P450,
  misc_feature (3)..(333): NCBI GI: 119499275 Blast Desc: cytochrome P450, [Neosartorya fischeri NRRL 181] gi|119414559|gb|EAW24498.1| cytochrome P450, [Neosartorya fischeri NRRL 181]
  misc_feature (103)..(316): SWISSPROT Homolog: EC 1.14.99.9 Steroid 17-alpha-monooxygenase
MFTPSHPVHRARRLPLNPFFSRAKILSSASQTLLFHHIEKLIYQISRHISEKSGQINIGAALNAFTRDVANDFIIERDCDSLSKEEFDFEASINPGPETVVALQQLMAKAKEDPNASSENNIVQAILSSKLPDSDKTFERIFEDLSTIMGAGVETTAGVLRMVLFHTYTNPTILSELRTELATLPPSTTDNLSLRTLEKLPYLTAVLTEGLRLSPAVATRMSRIAPDRDLFYQKLRIPAGTPVGMTTLLMHTDESVFPDPFRFDPGRWLEDGDLIKTMPNAFAPFAKGTRICAGMHLAWAELYLVTATLIRGFDFDFEGTTAEDLRAVSDQFIIGTKHGGNLNAIASVC

SEQ ID NO: 34477 - DNA, 2646 bp, Muscodor strobelii
  misc_feature: SGI EST ID NO. CUFF.81969.0
  misc_feature: Variant of the nucleotide sequence at SEQ ID NO 34475
catggccccaatgccacaacttgggccaccgctaactagtataccgagcacgagtactaataagcaactactcactacatctactactttcggcaacaacctacaacagacaccatacatcaccctcacttatctacatacgcatgctcggcatcacgaacatactgagagaagacccaggccacacgcctcgtccttaggggcccgtcatcacggttcgctagcctcaccccgactgcgtcacagtttcagccgaagctgcctccgcgaagaatccatctcacactctgcaatagcatggcattcgaaccaaccgtcatcataccaagctcggcattcacagcgcagttgctcgcccgcgatacgcaaacgtaggtcattcaatagtcgcgcacgggtcaagccacaaagttcaggctcaagctcaggattattcgcgtcgcgcagcggcgaaatgagatttgtcaatcttacgcttgacgatgagcatgtgttaatggcgggcgtggcgccgagcggatcgaatcaagagacggtgcacaaaattatgcaatgactgcaatgccgactttgacgctgatcttccgattgagtatgcgcgtcttcgtacgatacctgtgctattggtagcatttgttgcaagcacagtgggttggggatggtgtattgagaagggagtttcagtagcaggcccaaggaccacgtaggagaaacgatcaatgagatggacgttctgaaatccatcatcgcgacgtggccacgggcgctgacgacggccgtcgtgattactccggactcgcattctatcgtctattcttccacccacttgcgcggttccctggaccaaagttggcggcggtttcgagatggtatgaggcgtattatgatgttgtgaaggaagggcagtatactttcaagattaaggaactgcacaagaaatacggcccaataatccgcatctctccgttcgaactgcacgtctcggatcctgatttctactctgaaatttacaggcaggacgggatatgggataaatatgactgggcagtagacgcgatcgtcgcgcccggtgcgacaatgttcaccccctcgcacccagttcatcgggctcgtcgacttcctctcaatcccttcttctcgcgtgccaagatcttatcttctgcctctcagactctgcttttccatcacattgagaagctgatctaccagatctcaaggcatatcagtgaaaagagtggccagatcaatattggagcggcgttaaatgcgtttacgagagatgtcgcgaatgattttatcattgagcgagactgtgatagtttgtctaaggaggaatttgacttcgaggcgagtatcaatccagggccagtttgaagattgacgaagcacgtgaggtggttcaatcgagcgttaagatcgctaccgagtttcatctttcagcgaattgccggggatggtttgagggcgttttatcggcatcttggtgaaaccgtagtagcccttcaacaactaatggcaaaggcaaaagaagaccccaacgcgtcaagcgaaaataacatcgtgcaagcgattctatcttcaaagctgcctgactctgacaagacattcgagcgcatcttcgaagatctctcaaccattatgggtgcaggcgttgagacaaccgccggtgtgctacgcatggtgttattccacacttacactaaccccaccatcctctctgagctacgtaccgagcttgccacacttccaccctctaccaccgacaatctttcactcaggacgttggaaaagctaccctacctaacagcagtgcttactgaaggccttcgcttgagtcccgctgtagcgacgaggatgagcaggattgcgccggatagagatttattctatcaaaagctgcgcataccagccggtacaccggtgggcatgacgacgctccttatgcataccgacgagagcgtgttccccgatccattccgattcgatcctgggagatggttggaagacggtgacctgataaagacaatgccgaatgctttcgcgccatttgcgaagggcactaggatttgtgctggcatgcatcttgcatgggcagagttatatctcgtaaccgctacgctgatccgcgggttcgatttcgacttcgagggcaccactgctgaggatttgagagcagtcagtgatcagtttattatcggaacgaaacatggcggcaatctgaacgcgattgcttctgtgtgctgaggaaataggtatcgtgcggtttgtcttcaggcgttctaggcgggatcgaaaatctctactcaattctagcatgttaagcaaagcgtttaagcgttcacgggatgtcatttcgttgatttgagatggtgatcttagatttgcgcgggcaagggcacaggcactgatgtgaaggttgagtgtaaactagtacaggccaagtgtacagtacgaaatagaaatatccccactcaaagttttgtaagttctcttcttctatagctcgtctgatgaggaagctggctaccgaggtgaacgatcagctgtcgattggcaagtccaagccgagcctctatgcacctggcgaggacctgtgggagaataggatctactcctgcctcgttgtttcgccagctggccgtgtca

SEQ ID NO: 34478 - DNA, 3507 bp, Muscodor strobelii
  misc_feature: SGI cDNA ID NO. 571918
  misc_feature: Encodes the peptide sequence at SEQ ID NO 34479
atgcgccttttacatattaacgatggcggtaccgtctcgcttaccaaagatcttcaacgggacatccctccttatgccatcttatcgcacacttggggggaagatggccaagaagtcgggtttgacgacatagggcgagaaaccgcgcaaaagaaagcagggtaccaaaaaatacagttctgccaaaagcaagcggttcgggatggcttacgatatttctggatcgatacttgttgtatcaagcacaatagtgatgttgaactcaccagatcgatcaactcgatgtttcgatggtatcgcaacgctaagaaatgctatgcatatctttcagatgtgtctgtaaagggcgacggattgcttgggacatgggaggaagcattccgacgatgccgatggtttacccgaggctggacgttgcaggaattggtcgcctcgcaagtgctgggatttttctcgtccgagggtcagttccttggtgacaaatcatcactagagcgacaattacatgaaatcaccaagattccagttgctgtcctacggggcatgacgctgtctaagttcagtatcgacgagcgaatgtcgtggtccaagaaccgcgagaccaaattgccagaggacaaagcatactgccttctaggcatatttaatatacacatgcctctcatctacggcgaaggggaggaacacgcgtgcgctcggcttcgaaaggagctagaaggataccagaggcgacccagcgctttctccactgtcccttttgcgcgagaccccaactttatccatcgtcccgatatcttggcatggattgatacgaaatgtgacgcgccaggcactcgcgctgcacttgtcggcctcggcggaattgggaaatcgcaggcagtcatcgagtatgcctaccgagtgcgcgatgaacggccgcagacatgggtgttctgggtacacgcgagcacgaccctccgcgtcgaagaagcgtataggggtattgctgatagccttcatctgccggggcggcacaatccaaatgtcaatgtctgtcaactcgtcagccattggctttgcgacgaagtaaacggtcggtggattctcatactagacaatgctgacaatgccgagactttcttccccgagcaaaaaccggagatgtcaacaccacttgggagttttctgccacaaagccagaacggctcgatcctcgtcacttcgcgaagcaaagatgccgcgtcgaggattgtgggggatcccaggaatgtgatggaagtgcacgcgatgagtgaaagccaagcacaccagctgctccggaataaactgcacgctgctccggataaggatggaatgatcgagctagcaaacgctcttgatcgcataccgctggctatcacacaggccgctgcctatatcaaccggcgatcccgtatgacagttcccggctacctcgatgagttccgtagaagtacgtcccggaaggcaagtctcctggaccgggacatgggagaccttcgtcgagatgggagtatctccaactctataaagactacgtggcgcttatcgttcagaggcatatacgatcagcgatcatctgctgccgatctattatctctcatgagcttcttccatccccaaggaattccgaagtgggtgcttcgacaatacagcaaagcacaaagactgacagaggacgatagtgccgatgatgagttagaggatgatctcgaatcgttagacggattctcttttgtcacaagaaccatcgacggtgatacatacgagatgcacgctcttgtacagttttgcacaagagcgtggctctccgcgcttggccaagagaagaaatggaaacaacgctatctttatttgatgtccatggctttccccccaggagattttcgcaatcgtactacatgccagcagttaatgcctcatcttgagcatatacacaatcaggaacccgacgacgaggaagacgcaaaacaatgggctaatctgataaccaacgtagcgtggtacatgtggcacgaaggcaactataataccgcggaggctgcggctgcaaaagcattcgccgcaagggaaagaattttaggagacgacgacatgtctacgttgagtacaatggcagtattggcgtcggtcctccgaggcggcgggaaatacgtagaggcggaaaagatccatcgacaggcactcggtggctatgaaaaggccttgggccaacgacatcccgatacgctaacgagcatgagcaatctcgcgttggttctacgagatcaagggaaatacgacgaggcagagaaaatgcaccggcaagctctcgagggaagagaaaccgagctgggcacacaacatcccgatactttggcaagcatgggcaacttggcattgatttttcgggaccagggaaactatcccgaggcggaaacattgaatcgtcgcgcactacaaggcagagaagagctgctggggaagaagcatccgagctcgctgacaagcgcgagtaatttagccttggtgctttacgagcaaggtaaatacgacgaatcggaggcattaaatcaagaaacattaaaagtgcgagaggaagagctgggcaaaaaacatcctcataccctgattagcctaggcaatctggcgatggtgcttcaagatcgtggaaaatatagggagtcagagacgatgagccggtatctactaggcatttatgagcaggacttagggatgcaaaaccccaaagttctcacgagtgcaagcaatctggcgtcagtgcttcaagatcaggggaaatatgaagaggcagaggagcggaatcgtcgatcgctggagggtagagaaagagtgttgggaaaacagcaccctgattcactcacgagcctgagcaaccttgcatatacattacgatgtcgggagaaattcagcgagtcggaagcactaaatcggcaagctctggtaggaagggagcatcaattaggaccacgccatcccgatacactgaccagcatgaataatctcgcactggtgctacgagatcaacaaaaatatacagaagcagaaaaactgagccggcgggcggcacacgagtaccgtactaaattaggcgcgcgacatcctcacacgctgacaagtcttaataatctagcttccatactgcaagaccagaagaaatacaacgaggcagagatggtcaatcggagggtgctcgaagcatatgaaaaggagcttggcacgcgacatcccgatacactcaaaagcttgagtaatctcgctactataatgcatggtcgagagaaatatgacgcggccgagagactgcatcgtcgcacgttagagggaagagagcaacagctagggttacatcatgctgatacaatcaaaagcgtgagcgatttggcttccgtacttcgtgaccaaggtaaatatgacgaagcggggagattgaaccaccatacacaggccgcaggagaggaaatggagaagaaagaccattgcgaatcgcaagcatgtcatagcggttag

SEQ ID NO: 34479 - protein, 1168 aa, Muscodor strobelii
  misc_feature: SGI Peptide ID NO. 571918
  misc_feature (25)..(141): Pfam Id: PF06985 Pfam Desc: Heterokaryon incompatibility protein (HET)
  misc_feature (25)..(118): Pfam Id: PF06985 Pfam Desc: Heterokaryon incompatibility protein (HET)
  misc_feature (121)..(141): Pfam Id: PF06985 Pfam Desc: Heterokaryon incompatibility protein (HET)
  misc_feature (245)..(1143): NCBI GI: 242761252 Blast Desc: TPR domain protein [Talaromyces stipitatus ATCC 10500] gi|218723340|gb|EED22757.1| TPR domain protein [Talaromyces stipitatus ATCC 10500]
  misc_feature (251)..(1162): NCBI GI: 171693841 Blast Desc: protein product [Podospora anserina] gi|170946869|emb|CAP73673.1| protein product [Podospora anserina]
  misc_feature (244)..(1083): NCBI GI: 255934965 Blast Desc: Pc13g00600 [Penicillium chrysogenum Wisconsin 54-1255] gi|211583129|emb|CAP91129.1| Pc13g00600 [Penicillium chrysogenum Wisconsin 54-1255]
  misc_feature (244)..(1159): NCBI GI: 255934897 Blast Desc: Pc13g00220 [Penicillium chrysogenum Wisconsin 54-1255] gi|211583095|emb|CAP91091.1| Pc13g00220 [Penicillium chrysogenum Wisconsin 54-1255]
  misc_feature (253)..(1145): NCBI GI: 212541564 Blast Desc: TPR domain protein [Penicillium marneffei ATCC 18224] gi|210068236|gb|EEA22328.1| TPR domain protein [Penicillium marneffei ATCC 18224]
  misc_feature (200)..(1151): NCBI GI: 115443450 Blast Desc: [Aspergillus terreus NIH2624] gi|114188401|gb|EAU30101.1| [Aspergillus terreus NIH2624]
  misc_feature (242)..(1103): NCBI GI: 255934967 Blast Desc: Pc13g00620 [Penicillium chrysogenum Wisconsin 54-1255] gi|211583130|emb|CAP91131.1| Pc13g00620 [Penicillium chrysogenum Wisconsin 54-1255]
  misc_feature (1)..(1143): NCBI GI: 189210760 Blast Desc: kinesin light chain 3 [Pyrenophora tritici-repentis Pt-1C-BFP] gi|187977804|gb|EDU44430.1| kinesin light chain 3 [Pyrenophora tritici-repentis Pt-1C-BFP]
  misc_feature (250)..(1143): NCBI GI: 242795697 Blast Desc: kinesin, [Talaromyces stipitatus ATCC 10500] gi|218719233|gb|EED18653.1| kinesin, [Talaromyces stipitatus ATCC 10500]
  misc_feature (228)..(1153): NCBI GI: 115443454 Blast Desc: [Aspergillus terreus NIH2624] gi|114188403|gb|EAU30103.1| [Aspergillus terreus NIH2624]
MRLLHINDGGTVSLTKDLQRDIPPYAILSHTWGEDGQEVGFDDIGRETAQKKAGYQKIQFCQKQAVRDGLRYFWIDTCCIKHNSDVELTRSINSMFRWYRNAKKCYAYLSDVSVKGDGLLGTWEEAFRRCRWFTRGWTLQELVASQVLGFFSSEGQFLGDKSSLERQLHEITKIPVAVLRGMTLSKFSIDERMSWSKNRETKLPEDKAYCLLGIFNIHMPLIYGEGEEHACARLRKELEGYQRRPSAFSTVPFARDPNFIHRPDILAWIDTKCDAPGTRAALVGLGGIGKSQAVIEYAYRVRDERPQTWVFWVHASTTLRVEEAYRGIADSLHLPGRHNPNVNVCQLVSHWLCDEVNGRWILILDNADNAETFFPEQKPEMSTPLGSFLPQSQNGSILVTSRSKDAASRIVGDPRNVMEVHAMSESQAHQLLRNKLHAAPDKDGMIELANALDRIPLAITQAAAYINRRSRMTVPGYLDEFRRSTSRKASLLDRDMGDLRRDGSISNSIKTTWRLSFRGIYDQRSSAADLLSLMSFFHPQGIPKWVLRQYSKAQRLTEDDSADDELEDDLESLDGFSFVTRTIDGDTYEMHALVQFCTRAWLSALGQEKKWKQRYLYLMSMAFPPGDFRNRTTCQQLMPHLEHIHNQEPDDEEDAKQWANLITNVAWYMWHEGNYNTAEAAAAKAFAARERILGDDDMSTLSTMAVLASVLRGGGKYVEAEKIHRQALGGYEKALGQRHPDTLTSMSNLALVLRDQGKYDEAEKMHRQALEGRETELGTQHPDTLASMGNLALIFRDQGNYPEAETLNRRALQGREELLGKKHPSSLTSASNLALVLYEQGKYDESEALNQETLKVREEELGKKHPHTLISLGNLAMVLQDRGKYRESETMSRYLLGIYEQDLGMQNPKVLTSASNLASVLQDQGKYEEAEERNRRSLEGRERVLGKQHPDSLTSLSNLAYTLRCREKFSESEALNRQALVGREHQLGPRHPDTLTSMNNLALVLRDQQKYTEAEKLSRRAAHEYRTKLGARHPHTLTSLNNLASILQDQKKYNEAEMVNRRVLEAYEKELGTRHPDTLKSLSNLATIMHGREKYDAAERLHRRTLEGREQQLGLHHADTIKSVSDLASVLRDQGKYDEAGRLNHHTQAAGEEMEKKDHCESQACHSG

SEQ ID NO: 34480 - DNA, 1749 bp, Muscodor strobelii
  misc_feature: SGI cDNA ID NO. 571919
  misc_feature: Encodes the peptide sequence at SEQ ID NO 34481
atgaataaatttgcacctcttctagagaggaaaggagccacgagtttcaagcaacggagtatccaagcccctactactcactctactggggccttggtctctccagcaaacgacaaggttcctgtcgataagaaccccctagccgtgcatcctgatcttaggacggaacaaagatctatcatcagagactctttatatgtagcgctcgtgaaatttcgcgcacccgagaaggtgagcgatacgatacttgacggagtagctaagactctcagccagcttaggaagcttggccttatcagcatcgttgtggtcgagtgtgatggccaggccgaagatgggatatcacaaaggcagcttgaagccgctcaagcgagtcgcattgcatctgccattgatagtcatgattttccaggcgctcgggtgattgactcgccaatatcgataatgcagcagggtgcatctctgccatcgcccttcacctcgcacgaactatttattgggaatccgactgagctcatgagtgtattgcaagatgatcacattgccataatgtcctcttttggatatacatcagatacgtacaccatcagatctgtagccgcggactctgccattcttgccctcactaggcaactgtctgggctacaattcgtgcaacagcctaaccaggattccgagtctgccatcactaggttgctcagagctgctgaaatatacagaatcatcgtactggatcctttgggaggtattccagccagaaacagagcaacaggcagacacttatttctaaatctcgagcaagagttcgatgaagttcaagttgatctggaagaactggcgaaggacagtgccacaaataccaattctgaccatactcgccacatggagaacgctcgattagcaaaggatgcgctttcgttgcttcctccgacttcgtctgtaatcatcacaacaccgcaggaggcagcaagagaaaccgctccggaagacgagttgatggacttggcacttgttggcactagacgtgggcagaatcctcttatacatagtctcctcacagacaaacccacgcaatcaccgtccttaccaacggaacgcttcacgccggtcacgttatctacgggagcctgccggaaagggtcattgacgactttggcgaagcgtggcatgcccctgaccatatttccggaccccaagactgccccgtggaagccgccgcaaccgggacaaagtaatcttcggttgaccgatccttgcatcgatcttcctcgtctaattaatctcatcgaagactcatttggccgagaacttgacgtcgagcactaccttcggcgcatcagcggtaatctggcggggatcatcattgcaggcgagtacgagggaggtgcactcctgacgtgggaaaatccgtcgggtggtacggaccccaagcggctggtgccgtacctagacaagtttgcggtgctccgaaggagccagggcgcaggaggggtggcagacatcgtgttcaatgccatggtgcgggattgcttcccggacggcgtgtgctggaggagccgaaagaacaatcctgtgaacaaatggtattttgaacggtcaagggggacgttcaagataaaggatatgaattggactatgttttggacaacgccaaagttggcgatggacgaagagaagtttgaggactacgaggctgtatgccggaacgtggaaccctcgtgggcagacaagaaacacattgtggattaa

SEQ ID NO: 34481 - protein, 582 aa, Muscodor strobelii
  misc_feature: SGI Peptide ID NO. 571919
  misc_feature (371)..(570): Pfam Id: PF04768 Pfam Desc: Domain of function (DUF619)
  misc_feature (382)..(570): Pfam Id: PF04768 Pfam Desc: Domain of function (DUF619)
  misc_feature (66)..(582): NCBI GI: 1679882 Blast Desc: acetylglutamate synthase [Neurospora crassa]
  misc_feature (66)..(582): NCBI GI: 164423836 Blast Desc: NCU07682 [Neurospora crassa OR74A] gi|229891185|sp|Q1K8F6.1|NAGS_NEUCR RecName: Full=Amino-acid acetyltransferase, mitochondrial; AltName: Full=N-acetylglutamate
  misc_feature (65)..(582): NCBI GI: 154298642 Blast Desc: BC1G_11576 [Botryotinia fuckeliana B05.10] gi|229891130|sp|A6SG85.1|NAGS_BOTFB RecName: Full=Amino-acid acetyltransferase, mitochondrial; AltName: Full=N-acetylglutamate
  misc_feature (63)..(582): NCBI GI: 121715660 Blast Desc: acetylglutamate synthase [Aspergillus clavatus NRRL 1] gi|229891126|sp|A1C6J2.1|NAGS_ASPCL RecName: Full=Amino-acid acetyltransferase, mitochondrial; AltName: Full=N-acetylglutamate
  misc_feature (61)..(582): NCBI GI: 255938929 Blast Desc: Pc15g00060 [Penicillium chrysogenum Wisconsin 54-1255] gi|229891186|sp|B6H6F3.1|NAGS_PENCW RecName: Full=Amino-acid acetyltransferase, mitochondrial; AltName: Full=N-acetylglutamate
  misc_feature (63)..(582): NCBI GI: 146322930 Blast Desc: acetylglutamate synthase [Aspergillus fumigatus Af293] gi|229891127|sp|B0XSH8.1|NAGS_ASPFC RecName: Full=Amino-acid acetyltransferase, mitochondrial; AltName: Full=N-acetylglutamate
  misc_feature (65)..(582): NCBI GI: 238496429 Blast Desc: acetylglutamate synthase [Aspergillus flavus NRRL3357] gi|229891128|sp|B8NG97.1|NAGS_ASPFN RecName: Full=Amino-acid acetyltransferase, mitochondrial; AltName: Full=N-acetylglutamate
  misc_feature (65)..(582): NCBI GI: 169774941 Blast Desc: [Aspergillus oryzae RIB40] gi|121802243|sp|Q2UES9.1|NAGS_ASPOR RecName: Full=Amino-acid acetyltransferase, mitochondrial; AltName: Full=N-acetylglutamate
  misc_feature (67)..(578): NCBI GI: 171690402 Blast Desc: protein product [Podospora anserina] gi|229891171|sp|B2B2C5.1|NAGS_PODAN RecName: Full=Amino-acid acetyltransferase, mitochondrial; AltName: Full=N-acetylglutamate
  misc_feature (1)..(582): NCBI GI: 261355811 Blast Desc: amino-acid N-acetyltransferase [Verticillium albo-atrum VaMs.102]
  misc_feature (66)..(582): SWISSPROT Homolog: EC 2.3.1.1 Amino-acid N-acetyltransferase
MNKFAPLLERKGATSFKQRSIQAPTTHSTGALVSPANDKVPVDKNPLAVHPDLRTEQRSIIRDSLYVALVKFRAPEKVSDTILDGVAKTLSQLRKLGLISIVVVECDGQAEDGISQRQLEAAQASRIASAIDSHDFPGARVIDSPISIMQQGASLPSPFTSHELFIGNPTELMSVLQDDHIAIMSSFGYTSDTYTIRSVAADSAILALTRQLSGLQFVQQPNQDSESAITRLLRAAEIYRIIVLDPLGGIPARNRATGRHLFLNLEQEFDEVQVDLEELAKDSATNTNSDHTRHMENARLAKDALSLLPPTSSVIITTPQEAARETAPEDELMDLALVGTRRGQNPLIHSLLTDKPTQSPSLPTERFTPVTLSTGACRKGSLTTLAKRGMPLTIFPDPKTAPWKPPQPGQSNLRLTDPCIDLPRLINLIEDSFGRELDVEHYLRRISGNLAGIIIAGEYEGGALLTWENPSGGTDPKRLVPYLDKFAVLRRSQGAGGVADIVFNAMVRDCFPDGVCWRSRKNNPVNKWYFERSRGTFKIKDMNWTMFWTTPKLAMDEEKFEDYEAVCRNVEPSWADKKHIVD

SEQ ID NO: 34482 - DNA, 2766 bp, Muscodor strobelii
  misc_feature: SGI EST ID NO. CUFF.82008.0
  misc_feature: Variant of the nucleotide sequence at SEQ ID NO 34480
tctttgcaaaagtgtctctttatttatgcaattgctatatatattctcgcgcaataccgtagacgacgttagccgtcatgagcaccggtctcaattcgctatttgagatgcacccgccgtcatgatcgtgcgaccaacagcccggaaacgggcttattccagctggaacacatctttgccgaggcaattcggccataagccacctgattgcatatatcagagcagcagggcatctgcatctctaccaccaaattcacgcacgttgctgtctataagtaaaagcggagtctcaccgccattggcatcgtcttatgcttcaatttccgaatctcaaaaactgaagaaaagtcaggaaagggattttctggtttcagttctcgaaacatctgtgactaaacgagatgctaaagcatatatgaataaatttgcacctcttctagagaggaaaggagccacgagtttcaagcaacggagtatccaagcccctactactcactctactggggccttggtctctccagcaaacgacaaggttcctgtcgataagaaccccctagccgtgcatcctgatcttaggacggaacaaagatctatcatcagagactctttatatgtagcgctcgtgaaatttcgcgcacccgagaaggtgagcgatacgatacttgacggagtagctaagactctcagccagcttaggaagcttggccttatcagcatcgttgtggtcgagtgtgatggccaggccgaagatgggatatcacaaaggcagcttgaagccgctcaagcgagtcgcattgcatctgccattgatagtcatgattttccaggcgctcgggtgattgactcgccaatatcgataatgcagcagggtgcatctctgccatcgcccttcacctcgcacgaactatttattgggaatccgactgagctcatgagtgtattgcaagatgatcacattgccataatgtcctcttttggatatacatcagatacgtacaccatcagatctgtagccgcggactctgccattcttgccctcactaggcaactgtctgggctacaattcgtgcaacagcctaaccaggattccgagtctgccatcactaggttgctcagagctgctgaaatatacagaatcatcgtactggatcctttgggaggtattccagccagaaacagagcaacaggcagacacttatttctaaatctcgagcaagagttcgatgaagttcaagttgatctggaagaactggcgaaggacagtgccacaaataccaattctgaccatactcgccacatggagaacgctcgattagcaaaggatgcgctttcgttgcttcctccgacttcgtctgtaatcatcacaacaccgcaggaggcagcaagagaaaccgctccggaagacgagttgatggacttggcacttgttggcactagacgtgggcagaatcctcttatacatagtctcctcacagacaaacccacgcaatcaccgtccttaccaacggaacgcttcacgccggtcacgttatctacgggagcctgccggaaagggtcattgacgactttggcgaagcgtggcatgcccctgaccatatttccggaccccaagactgccccgtggaagccgccgcaaccgggacaaagtaatcttcggttgaccgatccttgcatcgatcttcctcgtctaattaatctcatcgaagactcatttggccgagaacttgacgtcgagcactaccttcggcgcatcagcggtaatctggcggggatcatcattgcaggcgagtacgagggaggtgcactcctgacgtgggaaaatccgtcgggtggtacggaccccaagcggctggtgccgtacctagacaagtttgcggtgctccgaaggagccagggcgcaggaggggtggcagacatcgtgttcaatgccatggtgcgggattgcttcccggacggcgtgtgctggaggagccgaaagaacaatcctgtgaacaaatggtattttgaacggtcaagggggacgttcaagataaaggatatgaattggactatgttttggacaacgccaaagttggcgatggacgaagagaagtttgaggactacgaggctgtatgccggaacgtggaaccctcgtgggcagacaagaaacacattgtggattaattgtgttgacatgacttgtttcatttactcgtctatagacaatgctatgaggatgtgggtatcatatcagaactgtcgacaccatatatcccagcctacgtcctggctttaattaaattgaatttttttgatcaaacacacacatgtgagcctatatatacatgttacctattgtccatagtgtagattatatgaagcatccaccgtctttcaagcgctgggcttaagagatacctatgccatctccatagcccaatatgatggtcatgtcagcccgcctggttcttggctggtatgcaggaacatttgtatggatgtgcagactgcacaggtggtgtggatttctgataagttttaatagaggtattcaatgacgtggggaggacgtgccttgttggttaacggggcgatactgtagaacgaaaacggaagggttaatacatgtcaatgttgaaagggtgggggctacaatacttaaagttaggaattgaagggtgcatctagaacaggtgctcatactgctgcataggagccacagcgaccgtacctttctcttgtaactgctacaatttgcacgacttagatcattagtttcaattttc

SEQ ID NO: 34483 - DNA, 2160 bp, Muscodor strobelii
  misc_feature: SGI cDNA ID NO. 571920
  misc_feature: Reduced expression when VOC is produced
  misc_feature: Encodes the peptide sequence at SEQ ID NO 34484
atgagcgtcgtcggtgtcgatttcggaacgctcaacacggccattgccgttgcgagaaatcgcggtgttgatgttatcaccaatgaagtttccaaccgccagactccatccttagttggcttcggccccaaggcccgctacctcggcgaggcagccaaaacacaagagatctccaacctcaagaacactgtttcctgcctgaagcgccttgccggacgtgctctcaaagatcccgacgtccagatcgaggcccaatatgtcacggccgctcttgtcgactgtggcggtgaggttggcgccgaggtgaactatcagggctccaaacagaagttcaccgccacccagctagtcgccatgttcctcagcaagatcaagcagaccgccgccaacgagctcaagctgcctgtctccgacattgtcatgagcgtgcctccgtggttcaccgattcccagcgacgaagcatcctagacgccgctgagattgctggactcaagcctcttagaatcatgaatgataccactgccgccgctctgggttacggtatcaccaaacttgacctgcccgccgccgaggagaagccccgacgcgttgttttcatcgatatcggccacagcaactactctgcctcggttgtcgagttcaagaagggtgagctcacggtcaagtcgactgccttcgaccgtcatttcggcggccgcgacttcaacattgcgctgctcaaccattttgccaaggaattcaagggcaaatatcacatcgatatcctctccaaccccaaggctctggcccgtgtcgaggctgcagctgagaagctgaagaagatcctgtctgccaaccagcaggccccgctcaacattgagtccctcatgaatgatgttgacgttgctgctatggtcacacgtcaagaatttgaggcgctcgtcgagcccctgttgagcaaggtgacgggcccccttgagcgtgctctcgccgatgctaagctcactaaggaagatgtcgactacatcgagcttgttggtggaagcacacgcgtgccagctattaaggagagaattcaggctttcttcggcaagcccctctccttcaccctgaaccaggatgaggctattgcacgaggctgcgcatttggctgcgctattctttcgcccgtgttcaaggttcgcgacttcgccgttgtggatatcgtcaactatcctatcgagttctcgtgggagaaagatgttgacatccctgacgaggacacctgcttgaccgtctttaacaaaggcaacatcttgccctcgacaaagatcctcaccttctaccggaaacagccctttgatctggaggcccggtactccaagccggacgagctgcccggcaaagtggctccatttatcggccgtttctcagtcaagggtgtcaaggctgaccccaagacggagttcatgatctgcaaattgaaggcccgagttaacatccacggtgtcttgaacgtagaaagcggttactatgttgaagaccaggaggtcgaagaggagatcaaagaggaaaagaaggaagatggcgagaagaaggaccctgacgccatggagacggatgagaaaaaggacgacaacaagcccaagactcgcaaagttaagaagcaagtgcgaaagggcgacttgcctatcgtttcaggcactactgcgctcgatcctaacaacaagaacgccctttacgagaaggaagcagccatgattatggaagacaagctggttgccgacacggaggagaaaaagaacgagcttgagacgtacatctacgatatgcgcaacaagcttgacgatcagtacgcagactttgccagtgaagaggagaaggacaaactgaggtccaagctcacagacagcgaggactggctgtacgaggatggggaggacgcgactaaggctatctacgtagccaagatggacgagatccgatcaatggcgggccccatcacgcagagatacttcgacaaggtggaggcagaccgtcaggcgctacagaccaagctggacgccgaggccgctgctaagaaggcagccgatgaggaggcccgcaaggcggcggaagcggagaagggcgaaggcaaggcggatgaggagatgacggacgccgagggtacgaaacccgagacggaggagccccagacctag

SEQ ID NO: 34484 - protein, 719 aa, Muscodor strobelii
  misc_feature: SGI Peptide ID NO. 571920
  misc_feature (3)..(660): Pfam Id: PF00012 Pfam Desc: Hsp70 protein
  misc_feature (3)..(404): Pfam Id: PF00012 Pfam Desc: Hsp70 protein
  misc_feature (484)..(660): Pfam Id: PF00012 Pfam Desc: Hsp70 protein
  misc_feature (2)..(658): NCBI GI: 58261746 Blast Desc: heat shock protein [Cryptococcus neoformans var. neoformans JEC21] gi|134118525|ref|XP_772036.1| CNBM1940 [Cryptococcus neoformans var. neoformans B-3501A] CNBM1940 var.
  misc_feature (2)..(657): NCBI GI: 71023671 Blast Desc: UM05918.1 [Ustilago maydis 521] gi|46101499|gb|EAK86732.1| UM05918.1 [Ustilago maydis 521]
  misc_feature (2)..(672): NCBI GI: 28564467 Blast Desc: heat shock protein [Malassezia sympodialis]
  misc_feature (2)..(672): NCBI GI: 164662609 Blast Desc: MGL_0201 [Malassezia globosa CBS 7966] gi|159106329|gb|EDP45212.1| MGL_0201 [Malassezia globosa CBS 7966]
  misc_feature (1)..(658): NCBI GI: 170092729 Blast Desc: [Laccaria bicolor S238N-H82] gi|164647445|gb|EDR11689.1| [Laccaria bicolor S238N-H82]
  misc_feature (2)..(698): NCBI GI: 162312422 Blast Desc: heat shock protein Pss1 [Schizosaccharomyces pombe] gi|12230134|sp|O59838.2|HSP7F_SCHPO RecName: Full=Heat shock protein homolog pss1 gi|159883938|emb|CAC08562.2| heat shock Pss1
  misc_feature (2)..(698): NCBI GI: 3090716 Blast Desc: Pss1 [Schizosaccharomyces pombe]
  misc_feature (1)..(679): NCBI GI: 238034205 Blast Desc: Heat shock protein [Pichia pastoris]
  misc_feature (1)..(717): NCBI GI: 169848592 Blast Desc: CC1G_09266 [Coprinopsis cinerea okayama7#130] gi|116507894|gb|EAU90789.1| CC1G_09266 [Coprinopsis cinerea okayama7#130]
  misc_feature (1)..(703): NCBI GI: 57012815 Blast Desc: HSP7F_SACKL RecName: Full=Heat shock protein homolog SSE1 gi|28565006|gb|AAO32586.1| SSE1 [Lachancea kluyveri]
  misc_feature (2)..(433): SWISSPROT Homolog: EC 3.6.1.3 Adenosinetriphosphatase
  misc_feature: Useful for introducing or modulating the production of volatile compounds
MSVVGVDFGTLNTAIAVARNRGVDVITNEVSNRQTPSLVGFGPKARYLGEAAKTQEISNLKNTVSCLKRLAGRALKDPDVQIEAQYVTAALVDCGGEVGAEVNYQGSKQKFTATQLVAMFLSKIKQTAANELKLPVSDIVMSVPPWFTDSQRRSILDAAEIAGLKPLRIMNDTTAAALGYGITKLDLPAAEEKPRRVVFIDIGHSNYSASVVEFKKGELTVKSTAFDRHFGGRDFNIALLNHFAKEFKGKYHIDILSNPKALARVEAAAEKLKKILSANQQAPLNIESLMNDVDVAAMVTRQEFEALVEPLLSKVTGPLERALADAKLTKEDVDYIELVGGSTRVPAIKERIQAFFGKPLSFTLNQDEAIARGCAFGCAILSPVFKVRDFAVVDIVNYPIEFSWEKDVDIPDEDTCLTVFNKGNILPSTKILTFYRKQPFDLEARYSKPDELPGKVAPFIGRFSVKGVKADPKTEFMICKLKARVNIHGVLNVESGYYVEDQEVEEEIKEEKKEDGEKKDPDAMETDEKKDDNKPKTRKVKKQVRKGDLPIVSGTTALDPNNKNALYEKEAAMIMEDKLVADTEEKKNELETYIYDMRNKLDDQYADFASEEEKDKLRSKLTDSEDWLYEDGEDATKAIYVAKMDEIRSMAGPITQRYFDKVEADRQALQTKLDAEAAAKKAADEEARKAAEAEKGEGKADEEMTDAEGTKPETEEPQT

SEQ ID NO: 34485 - DNA, 2981 bp, Muscodor strobelii
  misc_feature: SGI EST ID NO. CUFF.83909.1
  misc_feature: Variant of the nucleotide sequence at SEQ ID NO 34483
ccgcatgtcgtccctcctacctctcgcccgcctcaatctcagtttcgggcagcttttttttttctttgcgacttttgacaacagccccctgccctggtgaaagagtgtttttgatcgtcccaacggccaaaatcccagactcgtccgccgttcttgtgcataccacaggacactctcatctagcattgtttcctcccatcttcgacctgactgcgtgcgctggcaaacccctccttcccgcccacaccgacattcgcccataaacacatcaccattaccagtctgccttgacattccgacaagatgagcgtcgtcggtgtcgatttcggaacgctcaacacggccattgccgttgcgagaaatcgcggtgttgatgttgtgcgtactacctctctgccctctctgccctctccatctgcgtcctgttttcatcgctgtcctccgcaactctcgaccacactagctatttacgaagctgacccgaccacttttcagatcaccaatgaagtttccaaccgccagactccgtaagtcatccctcgacccagccttgcctcttcatccggattttaatatttcgtcgcactacagatccttagttggcttcggccccaaggcccgctacctcggcgaggcagccaaaacacaagagatctccaacctcaagaacactgtttcctgcctgaagcgccttgccggacgtgctctcaaagatcccgacgtccagatcgaggcccaatatgtcacggccgctcttgtcgactgtggcggtgaggttggcgccgaggtgaactatcagggctccaaacagaagttcaccgccacccagctagtcgccatgttcctcagcaagatcaagcagaccgccgccaacgagctcaagctgcctgtctccgacattgtcatgagcgtgcctccgtggttcaccgattcccagcgacgaagcatcctagacgccgctgagattgctggactcaagcctcttagaatcatgaatgataccactgccgccgctctgggttacggtatcaccaaacttgacctgcccgccgccgaggagaagccccgacgcgttgttttcatcgatatcggccacagcaactactctgcctcggttgtcgagttcaagaagggtgagctcacggtcaagtcgactgccttcgaccgtcatttcggcggccgcgacttcaacattgcgctgctcaaccattttgccaaggaattcaagggcaaatatcacatcgatatcctctccaaccccaaggctctggcccgtgtcgaggctgcagctgagaagctgaagaagatcctgtctgccaaccagcaggccccgctcaacattgagtccctcatgaatgatgttgacgttgctgctatggtcacacgtcaagaatttgaggcgctcgtcgagcccctgttgagcaaggtgacgggcccccttgagcgtgctctcgccgatgctaagctcactaaggaagatgtcgactacatcgagcttgttggtggaagcacacgcgtgccagctattaaggagagaattcaggctttcttcggcaagcccctctccttcaccctgaaccaggatgaggctattgcacgaggctgcgcatttggctgcgctattctttcgcccgtgttcaaggttcgcgacttcgccgttgtggatatcgtcaactatcctatcgagttctcgtgggagaaagatgttgacatccctgacgaggacacctgcttgaccgtctttaacaaaggcaacatcttgccctcgacaaagatcctcaccttctaccggaaacagccctttgatctggaggcccggtactccaagccggacgagctgcccggcaaagtggctccatttatcggccgtttctcagtcaagggtgtcaaggctgaccccaagacggagttcatgatctgcaaattgaaggcccgagttaacatccacggtgtcttgaacgtagaaagcggttactatgttgaagaccaggaggtcgaagaggagatcaaagaggaaaagaaggaagatggcgagaagaaggaccctgacgccatggagacggatgagaaaaaggacgacaacaagcccaagactcgcaaagttaagaagcaagtgcgaaagggcgacttgcctatcgtttcaggcactactgcgctcgatcctaacaacaagaacgccctttacgagaaggaagcagccatgattatggaagacaagctggttgccgacacggaggagaaaaagaacgagcttgagacgtacatctacgatatgcgcaacaagcttgacgatcagtacgcagactttgccagtgaagaggagaaggacaaactgaggtccaagctcacagacagcgaggactggctgtacgaggatggggaggacgcgactaaggctatctacgtagccaagatggacgagatccgatcaatggcgggccccatcacgcagagatacttcgacaaggtggaggcagaccgtcaggcgctacagaccaagctggacgccgaggccgctgctaagaaggcagccgatgaggaggcccgcaaggcggcggaagcggagaagggcgaaggcaaggcggatgaggagatgacggacgccgagggtacgaaacccgagacggaggagccccagacctagaggaggtggatcaagagagttttgaagaaaactctttcatcacggtggctgagaaatcaagtatgaagctatgacttggcatgagggtaaaagaaaaggtcatggacggcagcatctgttcggacttgtttaggagttttaagtgagggaagtatcgctccgaaggttggccaagataggggctttgttagaaatagactacgaccaccgggcgagcacacaggacaggctcccaaagatgggaagatagataacctgaatacggaaacattgtttacgaccattcactacacatactaggtgcatgtctttcggtattacaatgtttagacctctc

SEQ ID NO: 34486 - DNA, 3177 bp, Muscodor strobelii
  misc_feature: SGI cDNA ID NO. 571921
  misc_feature: Reduced expression when VOC is produced
  misc_feature: Encodes the peptide sequence at SEQ ID NO 34487
atggcacccaagaagaagggcggaaagaaggccgcagacgattgggaagccgacctgggtgagtccatcgccccaaccaacggcgatgctgccgccccggccgatgctgtcgacgacaagcccgaggaagaagaggatgctcccgtcggtggcctcatggccatgatgaaaaagaaccgagagaagcgcaagaagaagggtctgtcagagaacttcgtcgatggcgagtcccccgatggcgcccctgacacccctgctccccaggcgcccgaggaggccaccatggacgacgagttcgcgctcccagagaagaagggcaagggaggaaagcagaacaagaaccagcccgcatcagcacccgctccggcagacgacgaaactggtgagggtggcaaaatcctgacaaaggccgagaaagagaagctgaagaaggagcgggagaagcagagaaaaaaggagcaggctgcaaagaagaaaaccacagcgcccgcgccagccgcaaaggccgccgaacccgcgaagcctgcagtcgaagagaagacagacgaacccgccccagtcgcagaggcacccggcaaaaagggcaaaaagcttccggcacatctcgcagccatccagaagcaacaagaagagttgcggcggaaacgcgaagaagcggagcaggctgcagcagctgaaaaggctcggatagccgagctagagcaacgcgatgccgaagagctcaagcgcagagaggaagagagggcgcgtaagaagcagaaggagaaggagaagatagagcagctgaaaaaggaaggaaaattccttaccaaggcgcagaaagaggagaaggcccgaaatgagagaaagctccagcagatgattgccgccggccttcaggtcggcccatcagaggatggcgaggaaaagaaggaaaagaagaataaggcagacacccagaaacggtccaagaaagccagccagaaggtggatgaagagaaagctctcgctgaagccgccgagcgagccaggctccaagcggaagctttgatcaaggagaaggaagagaagactgctaaggaagctgctgccgcccaagctgccaagaaagcccaggagtctgacgtcgaggaggattgggaagctgctgcagcttcagaagaggacgtcaaggattcttgggacgctgacacagaggacgaagccgagaagaaagcagcgaaatctctccccgtgcgatcgaaagaagccgaagaagaatctgaggagtctgactcagacgaggactcctccgaagacgaggagcagacggtcaaaaaagcggccgaggcgcagcgaaagcgtgaagctgctgagcgccgagaaaaagcacatcaagaggctctggctgcgcgatcgaaggacaacttgcgcagccccatttgctgtatcttgggccacgtcgatacgggaaagacgaagctgctcgacaagatccgacagacaaatgttcaagagggcgaagcaggcggtattacacagcagattggtgctacatatttcccaggtgaggctatcaagcagaagacagccgtggtgaatgcggatggcaaatttgaactgaaagttcccggtctgcttatcatcgacacccctggccacgagtctttctccaatctgcgttcgcgaggttcttccctttgtaacatcgccattttggtcgtcgatatcatgcacggtctcgagccgcaaaccctcgagtcgatgaagctgcttcgtgaccgcaagaccccttttatcgtcgccctcaacaagatcgatcgtctatacggttggaagaaggtggacaacaacgggtttcaagagagtctggctctgcagagccgcggtgtgcagaacgagttcaagaaccgtttggagcaaaccaagcttgcttttagcgagcaaggtttcaactcggagctatactacgagaacaagtccatggcgcgaaatgtgtccctcgtaccaacctctgcccatacgggagagggtattccggacatgttgaaactgattctccagttgacccaggagagaatgactgagtcgctcatgtatctctctgaaacgcaagccactgttcttgaagttaaggccattgaaggtttcggtatgaccatcgacgtcatcctgtcaaacggtatcctgcgggagggcgatcgtatagtggtgtgtggcgtagaaggtgccatcgtgacgaatatccgagctctcctcactcctgggaccatgaaagagttgcgtgtcaaatcacagtacgtacacaacaaggaggtcaaggcagccatgggtgtgaagatcagtgcacctggtctcgaaggtgccattgctggttcccgattgctcgtggttggccccaacgacgacgaggatgatcttatcgatgaggtcgaagcggatctgaacaagctgtttagccgcgtttccactactggaagaggtgtcagcgtccaagcctcgacgttgggttcgctcgaggctcttcttgatttcttgaaggactctaagattcctgtcgcaaacgtgggtatcggtcctgtctttaaacgtgatgtgatgcagtgtggtacgatgttggagaaaagccctgatttcgccgtcatgctttgtttcgatgtcaaagtcgacaaggaagcgcaagcgtacgccgatgaacaaggtatcaagatcttcacagccgatatcatttatcatcttttcgattctttcaccaaacatatggaggagcagcttgagaagaagaaggaagagtcaaagttgttggcagtattcccatgcgtactgaatactgttgcggtgttcaacaagaccaaccctatcgttgtgggtgttgatgtagtagacggtagtctccgagtcaacacaccgatagcagcggtcaagcaaaacccaacgacaggtcaaagagaagtaatcagcttgggtagagtctcttctatcgaaagagaccacaagcaaattccagtttgcaagaagggtcaaccttctgttgccgtcaaaatcgagatgggtggtcatcagcccacctatggtcgccagctcgaggaaaccgataccctgtacagcttggtctcacgtgccagcattgactgtctcaaggaattttacagaaaagaagttacgaacgatgaatggcagcttatcattaagctcaaacccctcttcgacatcaattag

SEQ ID NO: 34487 - protein, 1058 aa, Muscodor strobelii
  misc_feature: SGI Peptide ID NO. 571921
  misc_feature (463)..(678): Pfam Id: PF00009 Pfam Desc: Elongation factor Tu GTP binding domain
  misc_feature (1)..(1057): NCBI GI: 116196470 Blast Desc: CHGG_04833 [Chaetomium globosum CBS 148.51] gi|88180746|gb|EAQ88214.1| CHGG_04833 [Chaetomium globosum CBS 148.51]
  misc_feature (13)..(1057): NCBI GI: 46110138 Blast Desc: FG01951.1 [Gibberella zeae PH-1]
  misc_feature (13)..(1058): NCBI GI: 256720748 Blast Desc: NECHADRAFT_64056 [Nectria haematococca mpVI 77-13-4]
  misc_feature (1)..(1058): NCBI GI: 154302195 Blast Desc: BC1G_09778 [Botryotinia fuckeliana B05.10] gi|150855552|gb|EDN30744.1| BC1G_09778 [Botryotinia fuckeliana B05.10]
  misc_feature (192)..(1058): NCBI GI: 145603416 Blast Desc: MGG_06066 [Magnaporthe grisea 70-15] gi|145011651|gb|EDJ96307.1| MGG_06066 [Magnaporthe grisea 70-15]
  misc_feature (184)..(1057): NCBI GI: 85104371 Blast Desc: NCU05270 [Neurospora crassa OR74A] gi|28923282|gb|EAA32491.1| NCU05270 [Neurospora crassa OR74A]
  misc_feature (269)..(1057): NCBI GI: 171688566 Blast Desc: protein product [Podospora anserina] gi|170944245|emb|CAP70355.1| protein product [Podospora anserina]
  misc_feature (1)..(1057): NCBI GI: 154275118 Blast Desc: HCAG_06015 [Ajellomyces capsulatus NAm1] gi|150414850|gb|EDN10212.1| HCAG_06015 [Ajellomyces capsulatus NAm1]
  misc_feature (1)..(1057): NCBI GI: 212540314 Blast Desc: mitochondrial translation initiation factor IF-2, [Penicillium marneffei ATCC 18224] gi|210067611|gb|EEA21703.1| mitochondrial translation initiation factor IF-2, [Penicillium
  misc_feature (1)..(1057): NCBI GI: 242802352 Blast Desc: mitochondrial translation initiation factor IF-2, [Talaromyces stipitatus ATCC 10500] gi|218717299|gb|EED16720.1| mitochondrial translation initiation factor IF-2, [Talaromyces
  misc_feature: Useful for introducing or modulating the production of volatile compounds
MAPKKKGGKKAADDWEADLGESIAPTNGDAAAPADAVDDKPEEEEDAPVGGLMAMMKKNREKRKKKGLSENFVDGESPDGAPDTPAPQAPEEATMDDEFALPEKKGKGGKQNKNQPASAPAPADDETGEGGKILTKAEKEKLKKEREKQRKKEQAAKKKTTAPAPAAKAAEPAKPAVEEKTDEPAPVAEAPGKKGKKLPAHLAAIQKQQEELRRKREEAEQAAAAEKARIAELEQRDAEELKRREEERARKKQKEKEKIEQLKKEGKFLTKAQKEEKARNERKLQQMIAAGLQVGPSEDGEEKKEKKNKADTQKRSKKASQKVDEEKALAEAAERARLQAEALIKEKEEKTAKEAAAAQAAKKAQESDVEEDWEAAAASEEDVKDSWDADTEDEAEKKAAKSLPVRSKEAEEESEESDSDEDSSEDEEQTVKKAAEAQRKREAAERREKAHQEALAARSKDNLRSPICCILGHVDTGKTKLLDKIRQTNVQEGEAGGITQQIGATYFPGEAIKQKTAVVNADGKFELKVPGLLIIDTPGHESFSNLRSRGSSLCNIAILVVDIMHGLEPQTLESMKLLRDRKTPFIVALNKIDRLYGWKKVDNNGFQESLALQSRGVQNEFKNRLEQTKLAFSEQGFNSELYYENKSMARNVSLVPTSAHTGEGIPDMLKLILQLTQERMTESLMYLSETQATVLEVKAIEGFGMTIDVILSNGILREGDRIVVCGVEGAIVTNIRALLTPGTMKELRVKSQYVHNKEVKAAMGVKISAPGLEGAIAGSRLLVVGPNDDEDDLIDEVEADLNKLFSRVSTTGRGVSVQASTLGSLEALLDFLKDSKIPVANVGIGPVFKRDVMQCGTMLEKSPDFAVMLCFDVKVDKEAQAYADEQGIKIFTADIIYHLFDSFTKHMEEQLEKKKEESKLLAVFPCVLNTVAVFNKTNPIVVGVDVVDGSLRVNTPIAAVKQNPTTGQREVISLGRVSSIERDHKQIPVCKKGQPSVAVKIEMGGHQPTYGRQLEETDTLYSLVSRASIDCLKEFYRKEVTNDEWQLIIKLKPLFDIN

SEQ ID NO: 34488 - DNA, 3836 bp, Muscodor strobelii
  misc_feature: SGI EST ID NO. CUFF.82026.0
  misc_feature: Variant of the nucleotide sequence at SEQ ID NO 34486
cggggtactgcgactcagcgacacccccccaagcactgaattctggctggagaaggtcggcaaaatctcacgacacagaacaaggctctaggagcgtagcagcaaacaacaaaaaactgacacatatcctgttgcctttgtgaatgttgcagaatcctatgcattcccgttcgaggttcctctcctcctggtctccatcatcgtcccctccaccccaccctctgccgttcctgtcccaatcgtgacagccccagcagcccacccactgttcatccgccgactctcattacctacacgccccctttttctgcactctctcctcgactctcgtcgattgtagtccaccctcctagagcgccaatcccacaccacctctgtgaccatggcacccaagaagaagggcggaaagaaggccgcagacgattgggaagccgacctgggtgagtccatcgccccaaccaacggcgatgctgccgccccggccgatgctgtcgacgacaagcccgaggaagaagaggatgctcccgtcggtggcctcatggccatgatgaaaaagaaccgagagaagcgcaagaagaagggtctgtcagagaacttcgtcgatggcgagtcccccgatggcgcccctgacacccctgctccccaggcgcccgaggaggccaccatggacgacgagttcgcgctcccagagaagaagggcaagggaggaaagcagaacaagaaccagcccgcatcagcacccgctccggcagacgacgaaactggtgagggtggcaaaatcctgacaaaggccgagaaagagaagctgaagaaggagcgggagaagcagagaaaaaaggagcaggctgcaaagaagaaaaccacagcgcccgcgccagccgcaaaggccgccgaacccgcgaagcctgcagtcgaagagaagacagacgaacccgccccagtcgcagaggcacccggcaaaaagggcaaaaagcttccggcacatctcgcagccatccagaagcaacaagaagagttgcggcggaaacgcgaagaagcggagcaggctgcagcagctgaaaaggctcggatagccgagctagagcaacgcgatgccgaagagctcaagcgcagagaggaagagagggcgcgtaagaagcagaaggagaaggagaagatagagcagctgaaaaaggaaggaaaattccttaccaaggcgcagaaagaggagaaggcccgaaatgagagaaagctccagcagatgattgccgccggccttcaggtcggcccatcagaggatggcgaggaaaagaaggaaaagaagaataaggcagacacccagaaacggtccaagaaagccagccagaaggtggatgaagagaaagctctcgctgaagccgccgagcgagccaggctccaagcggaagctttgatcaaggagaaggaagagaagactgctaaggaagctgctgccgcccaagctgccaagaaagcccaggagtctgacgtcgaggaggattgggaagctgctgcagcttcagaagaggacgtcaaggattcttgggacgctgacacagaggacgaagccgagaagaaagcagcgaaatctctccccgtgcgatcgaaagaagccgaagaagaatctgaggagtctgactcagacgaggactcctccgaagacgaggagcagacggtcaaaaaagcggccgaggcgcagcgaaagcgtgaagctgctgagcgccgagaaaaagcacatcaagaggctctggctgcgcgatcgaaggacaacttgcgcagccccatttgctgtatcttgggccacgtcgatacgggaaagacgaagctgctcgacaagatccgacagacaaatgttcaagagggcgaagcaggcggtattacacagcagattggtgctacatatttcccaggtgaggctatcaagcagaagacagccgtggtgaatgcggatggcaaatttgaactgaaagttcccggtctgcttatcatcgacacccctggccacgagtctttctccaatctgcgttcgcgaggttcttccctttgtaacatcgccattttggtcgtcgatatcatgcacggtctcgagccgcaaaccctcgagtcgatgaagctgcttcgtgaccgcaagaccccttttatcgtcgccctcaacaagatcgatcgtctatacggttggaagaaggtggacaacaacgggtttcaagagagtctggctctgcagagccgcggtgtgcagaacgagttcaagaaccgtttggagcaaaccaagcttgcttttagcgagcaaggtttcaactcggagctatactacgagaacaagtccatggcgcgaaatgtgtccctcgtaccaacctctgcccatacgggagagggtattccggacatgttgaaactgattctccagttgacccaggagagaatgactgagtcgctcatgtatctctctgaaacgcaagccactgttcttgaagttaaggccattgaaggtttcggtatgaccatcgacgtcatcctgtcaaacggtatcctgcgggagggcgatcgtatagtggtgtgtggcgtagaaggtgccatcgtgacgaatatccgagctctcctcactcctgggaccatgaaagagttgcgtgtcaaatcacagtacgtacacaacaaggaggtcaaggcagccatgggtgtgaagatcagtgcacctggtctcgaaggtgccattgctggttcccgattgctcgtggttggccccaacgacgacgaggatgatcttatcgatgaggtcgaagcggatctgaacaagctgtttagccgcgtttccactactggaagaggtgtcagcgtccaagcctcgacgttgggttcgctcgaggctcttcttgatttcttgaaggactctaagattcctgtcgcaaacgtgggtatcggtcctgtctttaaacgtgatgtgatgcagtgtggtacgatgttggagaaaagccctgatttcgccgtcatgctttgtttcgatgtcaaagtcgacaaggaagcgcaagcgtacgccgatgaacaaggtatcaagatcttcacagccgatatcatttatcatcttttcgattctttcaccaaacatatggaggagcagcttgagaagaagaaggaagagtcaaagttgttggcagtattcccatgcgtactgaatactgttgcggtgttcaacaagaccaaccctatcgttgtgggtgttgatgtagtagacggtagtctccgagtcaacacaccgatagcagcggtcaagcaaaacccaacgacaggtcaaagagaagtaatcagcttgggtagagtctcttctatcgaaagagaccacaagcaaattccagtttgcaagaagggtcaaccttctgttgccgtcaaaatcgagatgggtggtcatcagcccacctatggtcgccagctcgaggaaaccgataccctgtacagcttggtctcacgtgccagcattgactgtctcaaggaattttacagaaaagaagttacgaacgatgaatggcagcttatcattaagctcaaacccctcttcgacatcaattagatgttggttcctggctagtcatcacgtggtgctccgacaccgagcgcaatcggtggaactctcagggtttcaatagcatagcctgtgtaggtaggtattgatttgctatgaaatgggaaacggctaaaaggggaaaacggatttgtatttgatcgatcatcaggtaacgtgacatgtgaaacaaaagaatatacgttttacggttaagcatcatgagacgacttattgccgtgatgtctcgctattgcgtgagtttgaagactcttatttccatgta

SEQ ID NO: 34489 - DNA, 1212 bp, Muscodor strobelii
  misc_feature: SGI cDNA ID NO. 571922
  misc_feature: Encodes the peptide sequence at SEQ ID NO 34490
atgtctcaacacttccggctcgcggctccgcacgctggccgggccctggggtggtgttgcgaactggagtgtatcttcttcaacgatacactaggagacaggagttggggagaccagctcctgtctcttctcgtcgtcccagttacttcacgttccgaaggtcccttctcggaggctgtatctcgggtcaagacaagtgcaccacaacatagcctacaccatactaccgccattaccacatctcatacatcctccgcggcccttgcatcccccatatcccccgggatcatcggtctggcctcccttccgacagaaattcacctcatcattttgtctatgctcgaagatgatgttatagacctcatgtccctctgcctcgttaatagccacttccgttcgatgatattcgagtgcctgaacaactatttcacgaagcgctttggaaaatgggccggcaaaaacatcatctgtgctggcgagtatttggaagcaggcgatgttcctcctggagatctattgtctaccaaggatgtcgatgccttcatccgtgaatttttcattaaccgtttccacgattggcataatcatctgcagaatgagagcttgtgtccaggcttcaagattgatgaaggactagacgaatgggccgatgacttaaacttttctaacaaagttgagctctttcgatgcgctggcggattagatcttgacccggcatttcctctcataccatggcaccaattctacagtctccgtggctactttcccgaggacgagccatgggttctgcggaaccttactaccaaggaaattgtccgtgccgatgctgttgctatatcgccagattacattcgcggaccgaagattgctaagctgggctttgaacaggtggttttgtcgcgtatatgctggtcaacctcgtcttcccacctcgacctgtacgagcttgaggagcattttagcaaaatcacacgcgggaaatgggccggacatgcttttgacgttacgacgctctccagacatatgagacagacgggtgggaaagggtggaccgatgtcagcgacgaagtcatgcaagacgttgcgcagatctgggaggcccattacggtcccgactggcgtgaggaattgctagaaatgccaatgccgggttactggagcctatggcccaacccagtcgcggaaagagatttaaatacaagccagacctaa

SEQ ID NO: 34490 - protein, 403 aa, Muscodor strobelii
  misc_feature: SGI Peptide ID NO. 571922
  misc_feature (1)..(378): NCBI GI: 240280946 Blast Desc: conserved [Ajellomyces capsulatus H143]
  misc_feature (1)..(378): NCBI GI: 225557266 Blast Desc: conserved [Ajellomyces capsulatus G186AR]
  misc_feature (1)..(386): NCBI GI: 238843779 Blast Desc: conserved [Microsporum canis CBS 113480]
  misc_feature (1)..(379): NCBI GI: 261196163 Blast Desc: conserved [Ajellomyces dermatitidis SLH14081] gi|239587618|gb|EEQ70261.1| conserved [Ajellomyces dermatitidis SLH14081]
  misc_feature (1)..(379): NCBI GI: 239614574 Blast Desc: conserved [Ajellomyces dermatitidis ER-3]
  misc_feature (1)..(378): NCBI GI: 225554923 Blast Desc: conserved [Ajellomyces capsulatus G186AR]
  misc_feature (76)..(330): NCBI GI: 171693581 Blast Desc: protein product [Podospora anserina] gi|170946739|emb|CAP73543.1| protein product [Podospora anserina]
  misc_feature (88)..(378): NCBI GI: 119177310 Blast Desc: [Coccidioides immitis RS]
  misc_feature (90)..(378): NCBI GI: 119174833 Blast Desc: [Coccidioides immitis RS]
  misc_feature (92)..(380): NCBI GI: 238838296 Blast Desc: conserved [Microsporum canis CBS 113480]
MSQHFRLAAPHAGRALGWCCELECIFFNDTLGDRSWGDQLLSLLVVPVTSRSEGPFSEAVSRVKTSAPQHSLHHTTAITTSHTSSAALASPISPGIIGLASLPTEIHLIILSMLEDDVIDLMSLCLVNSHFRSMIFECLNNYFTKRFGKWAGKNIICAGEYLEAGDVPPGDLLSTKDVDAFIREFFINRFHDWHNHLQNESLCPGFKIDEGLDEWADDLNFSNKVELFRCAGGLDLDPAFPLIPWHQFYSLRGYFPEDEPWVLRNLTTKEIVRADAVAISPDYIRGPKIAKLGFEQVVLSRICWSTSSSHLDLYELEEHFSKITRGKWAGHAFDVTTLSRHMRQTGGKGWTDVSDEVMQDVAQIWEAHYGPDWREELLEMPMPGYWSLWPNPVAERDLNTSQT

SEQ ID NO: 34491 - DNA, 4062 bp, Muscodor strobelii
  misc_feature: SGI cDNA ID NO. 571923
  misc_feature: Encodes the peptide sequence at SEQ ID NO 34492
atggaagacctacagcgttatgtaatgcgggatggccgatatgtcttggaaaatgtgtctgcacaacagctcctcgagacgagggcacctggttcacagggacatgcgccgcttgagcctgagccgccctatggtttactcaccaggacagttatcgaaagtccagtcgttttctgggcgctacctgcgcagctacgttctgcgtcctttaacgacattgccttagtctctgaaagatctgtccaagtttgtgaagtctgcccggactatcagcttcgaaacgtagtagcaaagagagacttcggctccaaaatccaaaattgccttgttatgggagaccatgcatatttggaaagggcagaagagaagttgaaggcatcactcgtgcgacctaaaaacgacgacatagagatgccagatgccgctttaccggacgatccctcgtctatacatgggagtgacatatttcagcaattattagtgcttgtcctcgaagatggcaacgtggtgttccttggttgtgtgccagatggcgttggaggttggcaattcctctcgcgttctaggaaccttacacgacctactaagttgttcgacttcagggtccaccacatggcgattagctcgtcgtgggactatttgactcttgcttgccacgacactctgcttattgctaaattgcggccaatgacggagatccaacaccagttcagtgcaaatgatcaaagcgatgatcctattctggattttagagctcattcattcaaagggtctattcatcaaattgagttccttcatccgggttcggacaagataactcaaatcatcttgctcgcaattgtggtcaaccacggtgtttctaagatgattatcgttgaatgggacgccgcagatcctttgcaggctatcgggatcgacgactttccaggctatagacttgaagaagactttaatctaccgctgctcgtcatacctctgaaagtcgattgccaatttttgtttatcaccgaagacaaaatagtaattggttcggatgtccttagtggcccaccgaacttcatgagttttgcgcttgcggttcgtgagaacaccgcagaacatcacggccctcatgcacctttgtggacggcttggacgaggccgatgcgtaatattgattactttaatggcttcagtggtactctattcgatggcaaggaggcaacatacgcacctaaagacgcagtgtacctggcccgagaagatgggtggatgttcttcattgaaattacggctgattctggcatcgagtcagccgttagtatgggccccatggtttgcaacatcaacacagcatttacttccattggtattggtgcaatgccaattgacggccgcacaacgaattatacgggtgacctcataataaccggtagcatgagtggtcctggcgctatctacatggtagagccaagaaaacagccccaggaagtaggaccgttacttagctggtctccaacggtggatttcgctgttacaggagacgtctcttctagccaacaaacactggcaaataaggcataccagcaccgtcaaacgccagacaaagtgttcatgtgctcgggaagaggtacatcgggctcaatattggaaatgcggtatggagtccaagcaaaaatcgggttcgacctagagtatccttcaccaatcagacatggttgggtaatatccaaattcgagccggtaccagaagatggattttggatactccttgcacttccagatcactctgtacttttacagatctcacatgacttctctgaagtctctgaaaaggaggctgatacaacgggctttgatctctcttctgttacactcgcagtgcacgttgcaacagatctcgtggttcaagtcacaaccacctgtatcacagtcatatcctcaagtaatatgaaccggaagtctatccaagagatgataaaggcacccttctcgaccgtagcgaatgcagctatcaccgacaatatcatcgctttagccatgttctcatcttcagaatccgcaattgctattcttcatttttctccagatggattgtcattaacgcgctctatacccgtggaaggagaaatcacttgcctttgtatctgcaaagcttcgggaggactgtttgttctcgctggtatctggaggaacaattcttcaacactggttgtttatactatcgaatcggaagcttcttctttggtatcagatgagggacgatcattgcagatcgagaaagcttgtggagatcagtatctgaataacgcaaacagtcaagggaattggggccctttgactagcatcgtatctacgcacagcgaatacgaaaagcaactgtttgtcattggcactcgaaatggcgacgtgctcacagttcaaatcgacctcacgagtcaaacgctggattgtgagactgaccggcgtcgatttggagtggcgacttcacaggtcttcgccggtccttcatatctcgatgcgacaactgttttagtctgtaatgactctggtcttgcagtgctaaacggattcgatcgccagagaagatgtcgcttgcatgagaatattttccgtgtctggtttactgatgcaaaacgacaagacatggcgtctcccgtgataaattcggtggtgacaatggatcaatcgactaatcaacgtgaccctgtcgccatcatgattgctgggtcgcgaatattgatagtggaaatgcaattcagaccagcccccgttccacgaattatccccgttggaggaacaccattgaagatcatgtactcggaatgcctaaatactattgtcaccatcgtatcaaaaaatggcgttccttcgttacacttcctggatccattgaccggggcagatatttcgctaccagtcatgaagaacgcaaaagcggacaaagtcgactacattggaggacttggtgtaaggaatactaagatcgctgcactttcggaatggagccgggtgacgagtagcggccgcgtcgagaggtgtctggttatcctggttaattcgcaagatcgaactcgtgttctcatagtcggagcggaccatgggagaagtgctacaaccaaagaatcgccacgcaagatacggttttggcagtcacatattatgaaaattgactccggtccgccaagggctctgaccacttgcaaagatggcatctttttcagtatcgaaaatactgtttactacctcggtctcgacgctggggatgggagaacggccctaagaattcacagaaagcatgaactcccatcaactatcttaacgatggaattagtcggcgacaacctgcacgtcctcacagcctggcactcacttgcaatactaaacgcaaagttcttccctctaaacaatcgggcgccgctcaatatacgttcagacatcacccgcagacctgggttacaatccatagtcgtggacacatacagcgaaagcggcgagcaacggcacatcgctttgctctctgatccaaagtgctgcatatttggcttgggactaactggatcaaggatcacacctttgaatttgaacttccgcgcgctacctgggggatcgattcgcaagtttgcacaagcccgtacccgtccggtctgggttcagaaccgaactccgtacagactcttagagtgcagtgtaccagaatcttgcattctcggactcacaatagacggctcactgatacagttatcacttctcaatgaagccgaatggagatttttgagatccattcaaaatgtagcggttcgccatccggatatctgtccttggggtccaaccaagctaatggacgacttaagcttgggcccgtgtcctaagacaaatatgcagatcaatgggaatattctgggaaaaattgtagagaaacgctttctagaagagttgttagcaacaccggagcacatggatgaggtgtgggatttacttcagcagcttcggcggccaataggtgctgagatagaaagtttggccccttcgttcgacgcactgtatgaggttcttctgtattacatatcatctgctttgtga

SEQ ID NO: 34492 - protein, 1353 aa, Muscodor strobelii
  misc_feature: SGI Peptide ID NO. 571923
  misc_feature (4)..(1330): NCBI GI: 46110140 Blast Desc: FG01952.1 [Gibberella zeae PH-1]
  misc_feature (4)..(1314): NCBI GI: 256720747 Blast Desc: NECHADRAFT_49862 [Nectria haematococca mpVI 77-13-4]
  misc_feature (4)..(1350): NCBI GI: 261352223 Blast Desc: thermotolerance protein [Verticillium albo-atrum VaMs.102]
  misc_feature (4)..(1353): NCBI GI: 171688564 Blast Desc: protein product [Podospora anserina] gi|170944244|emb|CAP70354.1| protein product [Podospora anserina]
  misc_feature (1)..(1349): NCBI GI: 164429236 Blast Desc: NCU05271 [Neurospora crassa OR74A] gi|157072993|gb|EAA32672.2| [Neurospora crassa OR74A]
  misc_feature (4)..(1307): NCBI GI: 156063518 Blast Desc: SS1G_01877 [Sclerotinia sclerotiorum 1980] gi|154697211|gb|EDN96949.1| SS1G_01877 [Sclerotinia sclerotiorum 1980]
  misc_feature (4)..(1308): NCBI GI: 154302197 Blast Desc: BC1G_09779 [Botryotinia fuckeliana B05.10] gi|150855553|gb|EDN30745.1| BC1G_09779 [Botryotinia fuckeliana B05.10]
  misc_feature (4)..(1079): NCBI GI: 39976103 Blast Desc: MGG_06022 [Magnaporthe grisea 70-15] gi|145011702|gb|EDJ96358.1| MGG_06022 [Magnaporthe grisea 70-15]
  misc_feature (262)..(1122): NCBI GI: 116196468 Blast Desc: CHGG_04832 [Chaetomium globosum CBS 148.51] gi|88180745|gb|EAQ88213.1| CHGG_04832 [Chaetomium globosum CBS 148.51]
  misc_feature (4)..(1307): NCBI GI: 240111050 Blast Desc: CPC735_068850 [Coccidioides posadasii C735 delta SOWgp]
MEDLQRYVMRDGRYVLENVSAQQLLETRAPGSQGHAPLEPEPPYGLLTRTVIESPVVFWALPAQLRSASFNDIALVSERSVQVCEVCPDYQLRNVVAKRDFGSKIQNCLVMGDHAYLERAEEKLKASLVRPKNDDIEMPDAALPDDPSSIHGSDIFQQLLVLVLEDGNVVFLGCVPDGVGGWQFLSRSRNLTRPTKLFDFRVHHMAISSSWDYLTLACHDTLLIAKLRPMTEIQHQFSANDQSDDPILDFRAHSFKGSIHQIEFLHPGSDKITQIILLAIVVNHGVSKMIIVEWDAADPLQAIGIDDFPGYRLEEDFNLPLLVIPLKVDCQFLFITEDKIVIGSDVLSGPPNFMSFALAVRENTAEHHGPHAPLWTAWTRPMRNIDYFNGFSGTLFDGKEATYAPKDAVYLAREDGWMFFIEITADSGIESAVSMGPMVCNINTAFTSIGIGAMPIDGRTTNYTGDLIITGSMSGPGAIYMVEPRKQPQEVGPLLSWSPTVDFAVTGDVSSSQQTLANKAYQHRQTPDKVFMCSGRGTSGSILEMRYGVQAKIGFDLEYPSPIRHGWVISKFEPVPEDGFWILLALPDHSVLLQISHDFSEVSEKEADTTGFDLSSVTLAVHVATDLVVQVTTTCITVISSSNMNRKSIQEMIKAPFSTVANAAITDNIIALAMFSSSESAIAILHFSPDGLSLTRSIPVEGEITCLCICKASGGLFVLAGIWRNNSSTLVVYTIESEASSLVSDEGRSLQIEKACGDQYLNNANSQGNWGPLTSIVSTHSEYEKQLFVIGTRNGDVLTVQIDLTSQTLDCETDRRRFGVATSQVFAGPSYLDATTVLVCNDSGLAVLNGFDRQRRCRLHENIFRVWFTDAKRQDMASPVINSVVTMDQSTNQRDPVAIMIAGSRILIVEMQFRPAPVPRIIPVGGTPLKIMYSECLNTIVTIVSKNGVPSLHFLDPLTGADISLPVMKNAKADKVDYIGGLGVRNTKIAALSEWSRVTSSGRVERCLVILVNSQDRTRVLIVGADHGRSATTKESPRKIRFWQSHIMKIDSGPPRALTTCKDGIFFSIENTVYYLGLDAGDGRTALRIHRKHELPSTILTMELVGDNLHVLTAWHSLAILNAKFFPLNNRAPLNIRSDITRRPGLQSIVVDTYSESGEQRHIALLSDPKCCIFGLGLTGSRITPLNLNFRALPGGSIRKFAQARTRPVWVQNRTPYRLLECSVPESCILGLTIDGSLIQLSLLNEAEWRFLRSIQNVAVRHPDICPWGPTKLMDDLSLGPCPKTNMQINGNILGKIVEKRFLEELLATPEHMDEVWDLLQQLRRPIGAEIESLAPSFDALYEVLLYYISSAL

SEQ ID NO: 34493 - DNA, 2304 bp, Muscodor strobelii
  misc_feature: SGI EST ID NO. CUFF.82021.0
  misc_feature: Variant of the nucleotide sequence at SEQ ID NO 34491
caagagatgataaaggcacccttctcgaccgtagcgaatgcagctatcaccgacaatatcatcgctttagccatgttctcatcttcagaatccgcaattgctattcttcatttttctccagatggattgtcattaacgcgctctatacccgtggaaggagaaatcacttgcctttgtatctgcaaagcttcgggaggactgtttgttctcgctggtatctggaggaacaattcttcaacactggttgtttatactatcgaatcggaagcttcttctttggtatcagatgagggacgatcattgcagatcgagaaagcttgtggagatcagtatctgaataacgcaaacagtcaagggaattggggccctttgactagcatcgtatctacgcacagcgaatacgaaaagcaactgtttgtcattggcactcgaaatggcgacgtgctcacagttcaaatcgacctcacgagtcaaacgctggattgtgagactgaccggcgtcgatttggagtggcgacttcacaggtcttcgccggtccttcatatctcgatgcgacaactgttttagtctgtaatgactctggtcttgcagtgctaaacggattcgatcgccagagaagatgtcgcttgcatgagaatattttccgtgtctggtttactgatgcaaaacgacaagacatggcgtctcccgtgataaattcggtggtgacaatggatcaatcgactaatcaacgtgaccctgtcgccatcatgattgctgggtcgcgaatattgatagtggaaatgcaattcagaccagcccccgttccacgaattatccccgttggaggaacaccattgaagatcatgtactcggaatgcctaaatactattgtcaccatcgtatcaaaaaatggcgttccttcgttacacttcctggatccattgaccggggcagatatttcgctaccagtcatgaagaacgcaaaagcggacaaagtcgactacattggaggacttggtgtaaggaatactaagatcgctgcactttcggaatggagccgggtgacgagtagcggccgcgtcgagaggtgtctggttatcctggttaattcgcaagatcgaactcgtgttctcatagtcggagcggaccatgggagaagtgctacaaccaaagaatcgccacgcaagatacggttttggcagtcacatattatgaaaattgactccggtccgccaagggctctgaccacttgcaaagatggcatctttttcagtatcgaaaatactgtttactacctcggtctcgacgctggggatgggagaacggccctaagaattcacagaaagcatgaactcccatcaactatcttaacgatggaattagtcggcgacaacctgcacgtcctcacagcctggcactcacttgcaatactaaacgcaaagttcttccctctaaacaatcgggcgccgctcaatatacgttcagacatcacccgcagacctgggttacaatccatagtcgtggacacatacagcgaaagcggcgagcaacggcacatcgctttgctctctgatccaaagtgctgcatatttggcttgggactaactggatcaaggatcacacctttgaatttgaacttccgcgcgctacctgggggatcgattcgcaagtttgcacaagcccgtacccgtccggtctgggttcagaaccgaactccgtacagactcttagagtgcagtgtaccagaatcttgcattctcggactcacaatagacggctcactgatacagttatcacttctcaatgaagccgaatggagatttttgagatccattcaaaatgtagcggttcgccatccggatatctgtccttggggtccaaccaagctaatggacgacttaagcttgggcccgtgtcctaagacaaatatgcagatcaatgggaatattctgggaaaaattgtagagaaacgctttctagaagagttgttagcaacaccggagcacatggatgaggtgtgggatttacttcagcagcttcggcggccaataggtgctgagatagaaagtttggccccttcgttcgacgcactgtatgaggttcttctgtattacatatcatctgctttgtgagctgggtcgggagtactctgataaggacagaactaacctagagtcctcggaggaactcgctgcatgcaggaatagtaggcttatcacgaagttagagaactattacgagacactgaattaattctcgagtgctcggatataaggcagtctcatcagatttggttgctagcatggcataagtgaatgctg

SEQ ID NO: 34494 - DNA, 1173 bp, Muscodor strobelii
  misc_feature: SGI cDNA ID NO. 571924
  misc_feature: Encodes the peptide sequence at SEQ ID NO 34495
atggctaccgaagaaaagagtcaggatgtcggcacctccagagacttattaccacccactcatgtaccaccaagtccacgagaaacaagcatcatagatgcatgtgaaaggacagacatcgacgaactcaagaaaatagcaattacgccgggtggcttcttatcagacgggctacgcagccgggcgtggccggtattactcggctttagtgccaaagatgaggtcatgagtcctgatatctcatggatacagctcgaacgacatcgagatgaggatcaagtgaaactagacgttgacagaagcttcgtctactatcccaatgataactctcaagctgagctagacaagaaaaagggcgagctgctagatctcatcaccgaagtcctgcgccgacagcctcatctatgctattttcaaggctatcacgacatctgccaggtcctactccttgtcctaccacccgcctcgcgagcacgcgccgtatcaaggctctccgtgcttcgcatcagagatttcatgctccccacactctccccagcaatagcacacctccgtctcatcccagatcttctccaagccgtggatccaaaactatgtcgccacctatcccagaacgagccctacttcgcgctctcagacacactaacgatgttcgcgcacaacatccaacgatacagcgacatcgcgcgactgttcgatgtgctgatcgcgcgcgagcaagtcttcagtatctacatattcacccaaatcgtaataatgcgacgtgacgagctcttagaacacgaagaaccagatatgctacatttcttcttatcaaaattacctccagatctcgacctcgagaccgtgatcacggacgcatcgatattattcgataaacacccccctaactccctacgcgcgtggcgcaggatatcgagcgcaagcgtcttgaagacgacgatggatgcgaaagcgctggccagccaaagtctgcaggacggacgaatcttcttcgagaaacaagctcgcgagctgatgtgggcggataggaggcaaaaggcgcttcataccgcgtacaagaacaggacggtgctttttgccgttctggtcggtgttggtgctatctacttgcgtaacgcaggcgcatggcgcgggttcgtgatgtttgcggcgagatggtggaggagttga

SEQ ID NO: 34495 - protein, 390 aa, Muscodor strobelii
  misc_feature: SGI Peptide ID NO. 571924
  misc_feature (7)..(372): NCBI GI: 46110142 Blast Desc: FG01953.1 [Gibberella zeae PH-1]
  misc_feature (24)..(366): NCBI GI: 154302199 Blast Desc: BC1G_09780 [Botryotinia fuckeliana B05.10] gi|150855554|gb|EDN30746.1| BC1G_09780 [Botryotinia fuckeliana B05.10]
  misc_feature (26)..(376): NCBI GI: 256720958 Blast Desc: NECHADRAFT_96773 [Nectria haematococca mpVI 77-13-4]
  misc_feature (30)..(389): NCBI GI: 145603488 Blast Desc: MGG_06021 [Magnaporthe grisea 70-15] gi|145011704|gb|EDJ96360.1| MGG_06021 [Magnaporthe grisea 70-15]
  misc_feature (27)..(388): NCBI GI: 85105198 Blast Desc: NCU05272 [Neurospora crassa OR74A] gi|28923494|gb|EAA32673.1| [Neurospora crassa OR74A]
  misc_feature (27)..(366): NCBI GI: 119189905 Blast Desc: CIMG_05000 [Coccidioides immitis RS]
  misc_feature (27)..(378): NCBI GI: 240111051 Blast Desc: CPC735_068860 [Coccidioides posadasii C735 delta SOWgp]
  misc_feature (25)..(383): NCBI GI: 169771191 Blast Desc: [Aspergillus oryzae RIB40] gi|83767924|dbj|BAE58063.1| protein product [Aspergillus oryzae]
  misc_feature (26)..(387): NCBI GI: 225678068 Blast Desc: GTPase-activating protein gyp10 [Paracoccidioides brasiliensis Pb03]
  misc_feature (26)..(387): NCBI GI: 226287560 Blast Desc: conserved [Paracoccidioides brasiliensis Pb18]
MATEEKSQDVGTSRDLLPPTHVPPSPRETSIIDACERTDIDELKKIAITPGGFLSDGLRSRAWPVLLGFSAKDEVMSPDISWIQLERHRDEDQVKLDVDRSFVYYPNDNSQAELDKKKGELLDLITEVLRRQPHLCYFQGYHDICQVLLLVLPPASRARAVSRLSVLRIRDFMLPTLSPAIAHLRLIPDLLQAVDPKLCRHLSQNEPYFALSDTLTMFAHNIQRYSDIARLFDVLIAREQVFSIYIFTQIVIMRRDELLEHEEPDMLHFFLSKLPPDLDLETVITDASILFDKHPPNSLRAWRRISSASVLKTTMDAKALASQSLQDGRIFFEKQARELMWADRRQKALHTAYKNRTVLFAVLVGVGAIYLRNAGAWRGFVMFAARWWRS

SEQ ID NO: 34496 - DNA, 4634 bp, Muscodor strobelii
  misc_feature: SGI EST ID NO. CUFF.82029.0
  misc_feature: Variant of the nucleotide sequence at SEQ ID NO 34494
gctagatttcaggcacctttggcctgtcgattattcagtttctccagctccgtgatagagaagttcatcgccagatccactcagtcgcaaatagtttagctcccagagcgagaggaatttcaagagtaccttgctttaaatcttgtccaacatccatacttgatcaaagtcaatttgaatgctgtgtttgggctgggttggatcgactctcaatgtgatgcgtttaaaaatatgcgccaaaagcatttatggcattaacgagctctgatcaggaggcctgggcgcagaggaaggcatccatggaatccagccatctgtcatgaaagcgtgtctttctcctctcaacaagcaaagcatacatgtatttttcaattattcatacatagaaagacttttgttttcattgagttgcatgacgttcatgtatgagcagggtgtcaagaggtacctaaacaagctctcataaacctcaaaggaaggaagagcacaggcgaaatattgcgactgcacggtgcattaatcatgaccagataatggtacttcattccactttaataagccaaagctcacataaatttcctcagcactcgtcactcagaatttgatccaacagattccagtcttgcatattattgtcggtcaacgcgttgataaacagatttggaatgtaagatcattgtaccgcgcgatcgctggtatccatccatcaacgtcttgagcgatgatcttggtttctagacgatattgaactgcaaacaatatacgaaaggctatcattccaaatggctaccgaagaaaagagtcaggatgtcggcacctccagagacttattaccacccactcatgtaccaccaagtccacgagaaacaagcatcatagatgcatgtgaaaggacagacatcgacgaactcaagaaaatagcaattacgccgggtggcttcttatcagacgggctacgcagccgggcgtggccggtattactcggctttagtgccaaagatgaggtcatgagtcctgatatctcatggatacagctcgaacgacatcgagatgaggatcaagtgaaactagacgttgacagaagcttcgtctactatcccaatgataactctcaagctgagctagacaagaaaaagggcgagctgctagatctcatcaccgaagtcctgcgccgacagcctcatctatgctattttcaaggctatcacgacatctgccaggtcctactccttgtcctaccacccgcctcgcgagcacgcgccgtatcaaggctctccgtgcttcgcatcagagatttcatgctccccacactctccccagcaatagcacacctccgtctcatcccagatcttctccaagccgtggatccaaaactatgtcgccacctatcccagaacgagccctacttcgcgctctcagacacactaacgatgttcgcgcacaacatccaacgatacagcgacatcgcgcgactgttcgatgtgctgatcgcgcgcgagcaagtcttcagtatctacatattcacccaaatcgtaataatgcgacgtgacgagctcttagaacacgaagaaccagatatgctacatttcttcttatcaaaattacctccagatctcgacctcgagaccgtgatcacggacgcatcgatattattcgataaacacccccctaactccctacgcgcgtggcgcaggatatcgagcgcaagcgtcttgaagacgacgatggatgcgaaagcgctggccagccaaagtctgcaggacggacgaatcttcttcgagaaacaagctcgcgagctgatgtgggcggataggaggcaaaaggcgcttcataccgcgtacaagaacaggacggtgctttttgccgttctggtcggtgttggtgctatctacttgcgtaacgcaggcgcatggcgcgggttcgtgatgtttgcggcgagatggtggaggagttgatagtctctcaagtagactcgcttggagaattgcgtaggcgctaattgtgcatgctcagattgtctgccgcatagattcgatagatagaagtttggggcccattctatgcctgggtgtacaatacttggtgataattcgacaggcggggaaaaagattgtaaaattcgacgaagacatgtttatgtcctcaaggcgttgtcaatagatattgttcaaaagcagtagggtgcttgcatggattgcaagacaaaaaaagacacaggctagaaccgagatacgcgcccatttcaatgcgagaatggtatctataaacacgtcgtaaaatgcacctaaaatgtgactgctacgctaatgctgaacaaaatagatacacttttatatcaatcctcacgatcaggcggcctcctggaatgccgctttcagcccttcgaaatgctcttgttcctcctctgctaatttaccactcgcatcgctgatgattgtcaagatcaggctatagtttgtatacaagaatctctcgcgtttccttttatcagcgccgaatagagtgctatactttgtcaaaaaggcttccatttcacttctaagtcgccgcaggctcgtgaccactggttcatcgtcaccggcctcggcacttagcgcaagcacaccttgcagcaactgtccgaatcgttgtgttacgacatgtggtgctgcagagagcttggcttgttcggctttcgaaggggtacgccccgaaattgcagtgctaagcgctctgacagactcgcaatgtgcgttcataacagattgcaaccgcggccacaggagcatagcagtaccgttgatatagccatcagcagctgggactttgcgcctctgtagctcgaattggaagtgttgatttaggcggatggcaaggagaaggccaatggcatcataagtatcagtcacgagagactttgtcgaagactgtcccagctgcaatgtggggtcaaagatgtatgcgaagtggcgggatatggtggagtaactgagcgcaggcgagaagaatgaggcgaggaaggtatattctgctgtgacattatcgacaagtgcaagattgaagttgcggaatggcacttcaagataatgcgtggactgatcttcctctgctagataggaggaaatagcggctgtgttgttcgtgcgtagaatgtcgacgcgatggccaagattgaacgcatcgtgaggcggaccggcaatcttggaactggaaagcgccgcgcctctacgcgatgtatcctcgtttccaagcacgtctagcctatccaatacatgcaatttgatctttttcaatgcagtttcgtagcgtgtaaactggtttaagtaataccacctcatcgtgttcatgtatgcttggcagatctcattagccaatgtgggatgatgtttatgtaagaacgagaacaagtccttgaatttcaaaaagctttgctgttgtataatctgagcattgatgtgaggcgaccgcagggccttgatctgtgctacgaggaagtctctgatacgctcgattgctttctgtatcagtttctccagcaatggaccgaggtcttggaagcctttgttatgctccgaggctgacgcattctttttgtgggcagtggctctcttgtcgatctcattgagcgttttgacccaagcgtcatcaacatggccatcggctatcttagctactaccacaggggatacgctgagctcctcgacgacaggagccagccccttttcaacggctttccggttctcgagacgaacattgagagcggctgatcgcgcctgtagcgtctcgatatccgcggcaactgtggccaggtcgttgcggaagcttgccaggtttgtctcaactgaactcagaatctcgtcgcacgcttgtatggaatggtgaagatcctcgaacttggccttctcgcgcgcgtactcctccggcgactgttgaggagactcggtggcattttcaggccgagggtcttccgacaaggcgagcgactgcaacgacaagccgcggaaatcgaacgaggcttcgagatcttgggaggtcagggaggaggctggatatccatcggtcgtagggacgggcgcagcagtctcttgagtgctgtctcgtagtagatcggcaaggacgacgttggggtctgggccggcaaaagcggtcgtggattgcttgagggcggaacctgcggcgcggcgcgaagaggctagcaaggacgaggtggaagagtcggcggaggcgagggagagagacgaggacctcggtgtaagacccggacgttggtgagaggtcacgtaggggccaagcccgctagccgtcctccggggcgcgggagagtatgcgcgactgcctggctgtgaggacgccggggatgtcgactgtccagccaggcgatcgagccacatggtcctcgacgttctatgctccgagtaatggtgctaagtaaacgacgtttgcgctcatcgcaggatcccgtccgttctcgtgtcgattgattcgagctgaggcagagaccgtgtagtctgtcgaaacaaaaggcagtcttgagaggtggcggctcaatggactctctctgaggtaagtgtttcctccacagaacctgtccaccttggtccctgttctgtcactactcgtgatcggttccgatgttcagaaacgcagggacggca

SEQ ID NO: 34497 - DNA, 495 bp, Muscodor strobelii
  misc_feature: SGI cDNA ID NO. 571926
  misc_feature: Encodes the peptide sequence at SEQ ID NO 34498
atggctgacgacgagcaccaacacgacttcagctcggccagcgccgatgcctcggccaccttccccatgcagtgctcggccctccgaaagaacggcttcgtctgcatcaagaaccgtccctgcaagatcgtcgacatgtccacctccaagactggcaagcacggtcacgccaaggtccacttggtcggcattgacatcttcacttccaagaagtacgaagagctttgcccctccacccacaacatgaacgtccccaacatcaagaccaccacccacaccgtccttatgattgaggatgacttcatgcagctcatggacgacaagaccggcgacatcactcagcacatcaaggtccccgagggcgagcttggtaatgccattcgcaccaaggtcgaggaagccgacgacggcactgaagttcacgttaccaccaaggcttccatgggcgaggagcactgtgtccagcttgaaggctggaacgccaacaacaactaa

SEQ ID NO: 34498 - protein, 164 aa, Muscodor strobelii
  misc_feature: SGI Peptide ID NO. 571926
  misc_feature (86)..(157): Pfam Id: PF01287 Pfam Desc: Eukaryotic initiation factor 5A hypusine, DNA-binding OB fold
  misc_feature (1)..(157): NCBI GI: 67527196 Blast Desc: AN4015.2 [Aspergillus nidulans FGSC A4] gi|40740296|gb|EAA59486.1| AN4015.2 [Aspergillus nidulans FGSC A4] gi|259481400|tpe|CBF74882.1| TPA: eukaryotic translation 5A-2
  misc_feature (1)..(159): NCBI GI: 52345614 Blast Desc: eukaryotic translation initiation factor 5a [Xenopus (Silurana) tropicalis] gi|49522849|gb|AAH74676.1| MGC69396 protein [Xenopus (Silurana) tropicalis] eukaryotic translation 5A
  misc_feature (9)..(157): NCBI GI: 47085971 Blast Desc: eukaryotic translation initiation factor 5A [Danio rerio] gi|45595729|gb|AAH67190.1| Eukaryotic translation initiation factor 5A [Danio rerio] gi|156230908|gb|AAI52190.1| 5A
  misc_feature (1)..(157): NCBI GI: 124231 Blast Desc: eukaryotic translation initiation factor 5A [Danio rerio] gi|45595729|gb|AAH67190.1| Eukaryotic translation initiation factor 5A [Danio rerio] gi|156230908|gb|AAI52190.1| 5A
  misc_feature (1)..(154): NCBI GI: 169605687 Blast Desc: SNOG_05868 [Phaeosphaeria nodorum SN15] gi|111065812|gb|EAT86932.1| SNOG_05868 [Phaeosphaeria nodorum SN15]
  misc_feature (1)..(159): NCBI GI: 109113285 Blast Desc: : similar to eukaryotic translation initiation factor 5A, partial [Macaca mulatta]
  misc_feature (1)..(159): NCBI GI: 114666486 Blast Desc: : similar to eukaryotic initiation factor 5A isoform I variant A [Pan troglodytes]
  misc_feature (1)..(159): NCBI GI: 148680533 Blast Desc: eukaryotic translation initiation factor 5A, isoform CRA_d [Mus musculus]
  misc_feature (1)..(159): NCBI GI: 194217601 Blast Desc: : similar to eukaryotic initiation factor 5A [Equus caballus]
  misc_feature (1)..(159): NCBI GI: 281352188 Blast Desc: PANDA_013848 [Ailuropoda melanoleuca]
MADDEHQHDFSSASADASATFPMQCSALRKNGFVCIKNRPCKIVDMSTSKTGKHGHAKVHLVGIDIFTSKKYEELCPSTHNMNVPNIKTTTHTVLMIEDDFMQLMDDKTGDITQHIKVPEGELGNAIRTKVEEADDGTEVHVTTKASMGEEHCVQLEGWNANNN

SEQ ID NO: 34499 - DNA, 1105 bp, Muscodor strobelii
  misc_feature: SGI EST ID NO. CUFF.82041.0
  misc_feature: Variant of the nucleotide sequence at SEQ ID NO 34497
gtggaagtgaaaaacaaaccacgagttggacgaatcagggagtggttttttcagagaaagaaaaattgcccacccgcgatcctcttaccccctccttcaacctccagttcctcttctaaaaccacctcccatctcccatcacctttcttccctcactcctgggcatcactcctcaatctcgcatcacacccttcttttctttgcgcttttgcctgcccggactccttcaagatggctgacgacgagcaccaacacgacttcagctcggccagcgccgatgcctcggccaccttccccatgcagtgctcggccctccgaaagaacggcttcgtctgcatcaagaaccgtccctgcaagatcgtcgacatgtccacctccaagactggcaagcacggtcacgccaaggtccacttggtcggcattgacatcttcacttccaagaagtacgaagagctttgcccctccacccacaacatgaacgtccccaacatcaagaccaccacccacaccgtccttatgattgaggatgacttcatgcagctcatggacgacaagaccggcgacatcactcagcacatcaaggtccccgagggcgagcttggtaatgccattcgcaccaaggtcgaggaagccgacgacggcactgaagttcacgttaccaccaaggcttccatgggcgaggagcactgtgtccagcttgaaggctggaacgccaacaacaactaagcagcttacgaggccaggagtcgtgaacaggattttgacctgtaaaaagaagatcttccaccaagttgaaaggatattctgaacaagacaagcaaccgttctaatctgacagctagctcgctttcgcaggaaacacttttcttgtgagcagcctggtgatatagacgcactttgggcgtgggatgaaggaataccaagactctgaaagtcatgagtctacgagatgatcataaatcttacactatagcctatacatgccaattgcaagtgtcaagatcaacaacaatacgtgttttatgttatgagtaatctccatgatgagttacaaaacgtgcgtgtcgaattcctacgatctcaaattcagcaaagtcatttgcac

SEQ ID NO: 34500 - DNA, 2253 bp, Muscodor strobelii
  misc_feature: SGI cDNA ID NO. 571927
  misc_feature: Encodes the peptide sequence at SEQ ID NO 34501
atggcgcaacccaaataccacaaattcaagggcggcgagcggtgtgaagaatgtggcacacggcaatggtacgcccaagatgccctgagatactgtcgcaatggacaccgactagagggctttgcaggtcatgaagaggacgaagatgcatttggaacacatggcaaagtagttcgaaaaaagaaagaggctcgaagaaaagttgctctcaaactgacgggcgacgaaggccgtgagctatacctcgaggctctccaacttattctcattcgccaagtacaatggcttatcgacactcaagcattcccttcagactttcctagtattgtcaaatcactatgggcactacgtgttcgcaacttaccaatacgtgagcggggacagaagcagacaagccgaggagatgactcggatggtcaatccacgaagttgttcagttcacagagtgagccatcttcatctgatgttgatctctctgatacgacacccaaaacatggtcacccgacgagcaaaggcgctggaaactacccaaactcatcgacacactggcactatgctatcttggttgtcttgtccggcgattgcctgttatgacacgagattttcaccattgggcacagaaaggcgagttggaatatctggctgctttcaaccaaatcccccaaaacgtgcgagatcgacttccacccgaatttcaccacgcgctacgagtccaggatcacatacccgtcggacaacttcacgttgctgtgcaacaggcagtcatatcgtataaatccaatttcgacatgatacttccgccattgaatttcattccgccattgattcgatttgtcctggaactgtatttaccaggcgaggtatacgtcactgccaagtgtattgcaaatattctccatctggactttgcatatccagtagggggcgagaagatccgcaccatggacaatcccgaggttttactcgtgacattaattcttgtttccactaagctgctctactctttagatggcatagagcgacgacctaccaatcatgatgatctccgacatacgaaggtcaactgggcagaatggcagaaggtgacagccgaagctccgccgaaagaacacgaccatctcgtacgtggcgaggagtacaagatcataactgacgatgcattggttatcgacaacaccaagcttgatgactatatgaattggtttgagagcatgtggttaggtcaaggacagcccaggacgacagaaaaagtacgagaactctttgggaaagataagaaacacgagcagaagacggaccaaagtctagatagcgagtacattaatcggatgaaggaaaaccaccagacacttaacctttcttcgatgtcaatagaaccagcggcacccaacacctccgagaatgagaggacacaaccaaggaatctctgccccgtgtggaggtttgaggaagacctgccagatgttgcaaaattgttatataagaaggcggcgagcatggcggctatacagcttgcgaccttattaagaggcgcgacgcaggtcgagaaaaaactagaagactggtgtaagcaaagagttgcagagaaaggaaaaggcaaggacaaacagaaggggaagggcaaggaggtagtgcagagatcggcgaataacgctggcatactggagaaggagttgaaacgcaggaaagccccaagggcaagcgaggtcccagcacacccgaccgacacctggctgccagtcccggctgcgcacacaaccgcaacccccaccagcaacatttctcgacctaatcagcatttgcgcatacggacttcaattttactcacaacccaccgaccgacaccacgaaggaacgcagtcaccatgcagatcttcgtcaagaccctcacgggcaagaccatcaccctcgaggtcgagtcctccgacaccatcgacaatgtgaagtccaagatccaggacaaggagggcattccccccgaccaacagcgtctcattttcgctggaaagcaacttgaggatggccgaactctgtccgactacaacatccagaaggagtccactctccacctggttctcagactccgcggtggaatcattgagccctctctgaaggctcttgccggaaagttcaactgcgataagatgatctgccgcaagtgctacgcccgtctgcctccccgtgccaccaactgccgcaagaagaagtgtggccacacgaaccagctccgacccaagaagaagcttaaatag

SEQ ID NO: 34501 - protein, 750 aa, Muscodor strobelii
  misc_feature: SGI Peptide ID NO. 571927
  misc_feature (699)..(750): Pfam Id: PF01020 Pfam Desc: Ribosomal L40e family
  misc_feature (628)..(696): Pfam Id: PF00240 Pfam Desc: Ubiquitin family
  misc_feature (314)..(750): NCBI GI: 154302205 Blast Desc: 60S ribosomal protein L40 [Botryotinia fuckeliana B05.10] gi|150855557|gb|EDN30749.1| 60S ribosomal protein L40 [Botryotinia fuckeliana B05.10]
  misc_feature (581)..(750): NCBI GI: 225678066 Blast Desc: ubiquitin [Paracoccidioides brasiliensis Pb03]
  misc_feature (595)..(750): NCBI GI: 171688578 Blast Desc: protein product [Podospora anserina] gi|170944251|emb|CAP70361.1| protein product [Podospora anserina]
  misc_feature (623)..(750): NCBI GI: 154275126 Blast Desc: ubiquitin [Ajellomyces capsulatus NAm1] gi|150414854|gb|EDN10216.1| ubiquitin [Ajellomyces capsulatus NAm1] gi|239615402|gb|EEQ92389.1| ubiquitin [Ajellomyces ER-3]
  misc_feature (623)..(750): NCBI GI: 226287558 Blast Desc: ubiquitin [Paracoccidioides brasiliensis Pb18]
  misc_feature (623)..(750): NCBI GI: 156063510 Blast Desc: ubiquitin fusion protein [Sclerotinia sclerotiorum 1980] gi|154697207|gb|EDN96945.1| ubiquitin fusion protein [Sclerotinia sclerotiorum 1980]
  misc_feature (617)..(750): NCBI GI: 238486284 Blast Desc: ubiquitin UbiA, [Aspergillus flavus NRRL3357] gi|220699259|gb|EED55598.1| ubiquitin UbiA, [Aspergillus flavus NRRL3357]
  misc_feature (623)..(750): NCBI GI: 213403686 Blast Desc: ribosomal-ubiquitin fusion protein Ubi2 [Schizosaccharomyces japonicus yFS275] gi|213406611|ref|XP_002174077.1| ubiquitin [Schizosaccharomyces
  misc_feature (623)..(750): NCBI GI: 3047314 Blast Desc: ubiquitin fusion protein [Magnaporthe grisea]
  misc_feature (623)..(750): NCBI GI: 145603448 Blast Desc: ubiquitin fusion protein [Magnaporthe grisea 70-15] gi|145011677|gb|EDJ96333.1| ubiquitin fusion protein [Magnaporthe grisea 70-15]
MAQPKYHKFKGGERCEECGTRQWYAQDALRYCRNGHRLEGFAGHEEDEDAFGTHGKVVRKKKEARRKVALKLTGDEGRELYLEALQLILIRQVQWLIDTQAFPSDFPSIVKSLWALRVRNLPIRERGQKQTSRGDDSDGQSTKLFSSQSEPSSSDVDLSDTTPKTWSPDEQRRWKLPKLIDTLALCYLGCLVRRLPVMTRDFHHWAQKGELEYLAAFNQIPQNVRDRLPPEFHHALRVQDHIPVGQLHVAVQQAVISYKSNFDMILPPLNFIPPLIRFVLELYLPGEVYVTAKCIANILHLDFAYPVGGEKIRTMDNPEVLLVTLILVSTKLLYSLDGIERRPTNHDDLRHTKVNWAEWQKVTAEAPPKEHDHLVRGEEYKIITDDALVIDNTKLDDYMNWFESMWLGQGQPRTTEKVRELFGKDKKHEQKTDQSLDSEYINRMKENHQTLNLSSMSIEPAAPNTSENERTQPRNLCPVWRFEEDLPDVAKLLYKKAASMAAIQLATLLRGATQVEKKLEDWCKQRVAEKGKGKDKQKGKGKEVVQRSANNAGILEKELKRRKAPRASEVPAHPTDTWLPVPAAHTTATPTSNISRPNQHLRIRTSILLTTHRPTPRRNAVTMQIFVKTLTGKTITLEVESSDTIDNVKSKIQDKEGIPPDQQRLIFAGKQLEDGRTLSDYNIQKESTLHLVLRLRGGIIEPSLKALAGKFNCDKMICRKCYARLPPRATNCRKKKCGHTNQLRPKKKLK

SEQ ID NO: 34502 - DNA, 2635 bp, Muscodor strobelii
  misc_feature: SGI EST ID NO. CUFF.82038.0
  misc_feature: Variant of the nucleotide sequence at SEQ ID NO 34500
gggcaagcgaggtcccagcacacccgaccgacacctggctgccagtcccggctgcgcacacaaccgcaacccccaccagcaacatttctcgacctaatcagcatttgcgcatacggacttcaattttactcacaacccaccgaccgacaccacgaaggaacgcagtcaccatgcagatcttcgtcaagaccctcacgggcaagaccatcaccctcgaggtcgagtcctccgacaccatcgacaatgtgaagtccaagatccaggacaaggagggcattccccccgaccaacagcgtctcattttcgctggaaagcaacttgaggatggccgaactctgtccgactacaacatccagaaggagtccactctccacctggttctcagactccgcggtggaatcattgagccctctctgaaggctcttgccggaaagttcaactgcgataagatgatctgccgcaagtgctacgcccgtctgcctccccgtgccaccaactgccgcaagaagaagtgtggccacacgaaccagctccgacccaagaagaagcttaaatagacgatttcgcccccggctcgcagtccacgtcacgcgacttggacttgggtggaggatggtgttgattgggacctgcggtgtttaatgagagaggctctcacggttttcctgctcttgctatttctcgagaataaaatgcatggcaatcacgctagggtctacggtattcggaatatgacatgaacaaaaattccaaaaatgcaaagtccatcatgaactgtgactgttgcattcgtatgaattagatgccttcacgcggagtatggactttggctaaaccgatatggctaagcatcgggcatacctcttgtcttagctgtactcaagctcgcattgataagatctccctatcccatgacatcacttctaacatctttggcgcaactcatcttgccgatataccacttggcaatgaagcaacagtctaaagacgcgtagaaagactgggaaaaactaaggtgtcaagtgttcggaccagctcgcgaagaacttaatactgtaaatcatgctattagaggatgtctttctctagtaacacccggtaataatccaccaaccaacaaacgtctgtcgattcctgcatcgcaaaaacgccctgctccgagccatgcaatgcaatataataatacaatgaagtaaacatgtacatctcccagtgccccagatcgagccgctggattgcagtttgtgcataaagggtattgaatatctagagaaaacataggcatgcaacccaatcttagcttttcttccgagtcgacttcgcgcgtccacgagtccgtcctggtggtctaccacgagcagggcggcctgatctcgtagtaggagcctccgtctcttcttcctcgccatcattactatcttcatgttcctcttcctcttcgtccttctcctcctcatccgcctcttcttcctcggcttcttcctccccttcattatcctctttttctgcctcctcctgctcctcctcttcctcgtgttcagactcagcgctctctttagctttcgccttggcagcggctctcttcgagcttctcgcacctctcgtactccggcccacgggactactcgcaacgggcgtatctcggtccgtatcctcgactgtactagctctcgtcttggccgtcgtgctgcccgcgacactggccgcatcagccgtaacggtgtcgcccctcttgcgctttctcgtattcttcttcgtcgactcctctaccacctcattattgccatccgaccaattatcaggctcgttctcgtcagccgcagcacgcgcccacatgaggtcgtggaattcgtcgggcggcaggtcgaagtcgttgtagatctcctcgggcgcctcgtcgccgccgagggacatgacgtagtcgaaggagttatctcgctcgtcgatcatgtccatgtcgtagaactcgcgcagcttcttccatatgcccgggatcctcgtgtgcgtctcgacgtcggggtcgaagccgtggttgcgcaggtgttcggaaatagcgatcacgcggaagtgacggtgcatgcctgagggtttccatcggatgatggctttgaagagggaggagatctggtcttcggtccagaggttgttgaggacctctgcgtcgcttggtagattcggtttgcctgtggtgggtgtgccggcggcacgtggggtgtcggcggctttgggcgtgtcgatgtccatggcgtcttcgtcttgggctggtgttgccgacgccttgggggttgcggcgtcggctgctgctttggatttgcgctttggcggcattgtgttgattgtagttgaagactcgaaggctgaatgaagatagttatgcacaggcttatgatctaagcattgctgtcccagtgagatgtcgttgcaacgtgggttgccacagaccgttgctaatgtcgacgatggcgattgacgattgaccaattggcaacgacaatatagttgattagtatttaccagtagtcgcgatatcgcataatttccaatattatcaattgagcataaagagactggctgtggaacgaaatgtaagaaattgtgatcataaagctcgacaagtgcttgatctgaagcttcc

SEQ ID NO: 34503 - DNA, 1032 bp, Muscodor strobelii
  misc_feature: SGI cDNA ID NO. 571928
  misc_feature: Encodes the peptide sequence at SEQ ID NO 34504
atgccgccaaagcgcaaatccaaagcagcagccgacgccgcaacccccaaggcgtcggcaacaccagcccaagacgaagacgccatggacatcgacacgcccaaagccgccgacaccccacgtgccgccggcacacccaccacaggcaaaccgaatctaccaagcgacgcagaggtcctcaacaacctctggaccgaagaccagatctcctccctcttcaaagccatcatccgatggaaaccctcaggcatgcaccgtcacttccgcgtgatcgctatttccgaacacctgcgcaaccacggcttcgaccccgacgtcgagacgcacacgaggatcccgggcatatggaagaagctgcgcgagttctacgacatggacatgatcgacgagcgagataactccttcgactacgtcatgtccctcggcggcgacgaggcgcccgaggagatctacaacgacttcgacctgccgcccgacgaattccacgacctcatgtgggcgcgtgctgcggctgacgagaacgagcctgataattggtcggatggcaataatgaggtggtagaggagtcgacgaagaagaatacgagaaagcgcaagaggggcgacaccgttacggctgatgcggccagtgtcgcgggcagcacgacggccaagacgagagctagtacagtcgaggatacggaccgagatacgcccgttgcgagtagtcccgtgggccggagtacgagaggtgcgagaagctcgaagagagccgctgccaaggcgaaagctaaagagagcgctgagtctgaacacgaggaagaggaggagcaggaggaggcagaaaaagaggataatgaaggggaggaagaagccgaggaagaagaggcggatgaggaggagaaggacgaagaggaagaggaacatgaagatagtaatgatggcgaggaagaagagacggaggctcctactacgagatcaggccgccctgctcgtggtagaccaccaggacggactcgtggacgcgcgaagtcgactcggaagaaaagctaa

SEQ ID NO: 34504 - protein, 343 aa, Muscodor strobelii
  misc_feature: SGI Peptide ID NO. 571928
  misc_feature (67)..(163): Pfam Id: PF07904 Pfam Desc: CT20 family
  misc_feature (1)..(264): NCBI GI: 154291809 Blast Desc: BC1G_14981 [Botryotinia fuckeliana B05.10] gi|150846589|gb|EDN21782.1| BC1G_14981 [Botryotinia fuckeliana B05.10]
  misc_feature (1)..(256): NCBI GI: 171688570 Blast Desc: protein product [Podospora anserina] gi|170944247|emb|CAP70357.1| protein product [Podospora anserina]
  misc_feature (1)..(264): NCBI GI: 46136553 Blast Desc: FG09792.1 [Gibberella zeae PH-1]
  misc_feature (1)..(257): NCBI GI: 256727543 Blast Desc: NECHADRAFT_66483 [Nectria haematococca mpVI 77-13-4]
  misc_feature (1)..(264): NCBI GI: 156034835 Blast Desc: SS1G_13353 [Sclerotinia sclerotiorum 1980] gi|154698756|gb|EDN98494.1| SS1G_13353 [Sclerotinia sclerotiorum 1980]
  misc_feature (1)..(256): NCBI GI: 85105231 Blast Desc: NCU05281 [Neurospora crassa OR74A] gi|28923503|gb|EAA32682.1| [Neurospora crassa OR74A]
  misc_feature (1)..(256): NCBI GI: 116196446 Blast Desc: CHGG_04821 [Chaetomium globosum CBS 148.51] gi|88180734|gb|EAQ88202.1| CHGG_04821 [Chaetomium globosum CBS 148.51]
  misc_feature (29)..(247): NCBI GI: 261352222 Blast Desc: CT20 family protein [Verticillium albo-atrum VaMs.102]
  misc_feature (1)..(228): NCBI GI: 145612461 Blast Desc: MGG_07142 [Magnaporthe grisea 70-15] gi|145019616|gb|EDK03844.1| MGG_07142 [Magnaporthe grisea 70-15]
  misc_feature (1)..(322): NCBI GI: 242775033 Blast Desc: conserved [Talaromyces stipitatus ATCC 10500] gi|218722182|gb|EED21600.1| conserved [Talaromyces stipitatus ATCC 10500]
MPPKRKSKAAADAATPKASATPAQDEDAMDIDTPKAADTPRAAGTPTTGKPNLPSDAEVLNNLWTEDQISSLFKAIIRWKPSGMHRHFRVIAISEHLRNHGFDPDVETHTRIPGIWKKLREFYDMDMIDERDNSFDYVMSLGGDEAPEEIYNDFDLPPDEFHDLMWARAAADENEPDNWSDGNNEVVEESTKKNTRKRKRGDTVTADAASVAGSTTAKTRASTVEDTDRDTPVASSPVGRSTRGARSSKRAAAKAKAKESAESEHEEEEEQEEAEKEDNEGEEEAEEEEADEEEKDEEEEEHEDSNDGEEEETEAPTTRSGRPARGRPPGRTRGRAKSTRKKS

SEQ ID NO: 34505 - DNA, 2895 bp, Muscodor strobelii
  misc_feature: SGI cDNA ID NO. 571929
  misc_feature: Encodes the peptide sequence at SEQ ID NO 34506
atggctgacagagatcccgccaatgtcttcgcctttcctgatttcgaagagactgcaaaatgggaaacactcgccaacggcaaagattcattgttcaaatccagccttatcaaaaatgctgtcgatcatcgtactgtgagcactggcggccttcgtaaagtaccagacagtttcttcagcattcctacaagtatcgacctaccagatttggacagcaaatacgagcctcttgacgatgactccgagctgtcctcacagtcgattcaaccaattcacgatatctctctgtcagatatagatatatcggatgatgtttggcacagcattggtcagactcgtccccaggcggctccggagcttcaaacctgggatgcttttctcaagaccaacgttcagcatgtcacccccagcaaaccccttttcataacagaagctggccccctggcatacgaggccctaattaagtctcaagataatccccttggatttgattgctcgaatcatattgttgttcaaacccgacactatctcgcagccttgcttgctctaagcctgggacgagggtccgtcttcttcatttgggatgagaagaaagctttctttgacccagttgagaaagaaatgagggtgcttggctactctaccgatgtactccaagaactccaaaatttctgtttggacctaggcacaacaacccgcaaactctcgtcttacgtccagctcacatatcgagagcggtcaaacgctgttagcattgccctggcgaggaccgtcgatgtcttgctgcttgccattcaacgaaagcttggcgagcatggtagacgagcaatgtcgttgctccagttgcaatctacggttgtccctgttggaacattactgacctacttccgtgaactggtcggcaaattgtcccgaataaagtcagaagagcgaatactgtcctatatattccgcgagatgcaattcttggaaaatgacgactcactactacgagttcttatgtgtgaagttctcgcacgagcttccgaaccttggacggacttcgctgaaaagtggataggcgtgaaacctgaagacggttatccattaacgaaggatgggactgggagaagttttgtcaaagtcgaaactgtatctagcgttgatgactctgggttcgaaaccgagcatcgtgactttatcttcgaagcatcgcgtatgccttccttcgttcctgctgatatcggactcattatgtttgagactggcaaaactctccgccttcttcgaactcatcatccgtcccatcccctatgtgatattgctactactaccgcctgcgagccgcctcgtctcagatggttgtttgattggcactctattggaaatttgcagcacggagtaaaggcttatacaacttcgatgctccaaaaaatatcacagagccgccccggaagccagtcgcgcactcatatcaatgtcccagcttcggaagaggcagtgggtggacttaagatattcggcagcgatgtgagcgatttcgagaggcaactcatggcatccatacagcagctcgatcaaccaccagccatctctaccgttgaagataagatatcaacttcactaatgcaaggattgttccatcaagaggagcagccgcaacaatctgcccacaaccttgatccgcactggtctctcctcccactgcattccttcggaccactcgtatgcgctcaagcgcggctcattaacaaggcatacacgaaacttctcttcagtgcgcatggtcttagagagcacatgcgtgtacagagggagtaccaactgatgggaagcgggatgttctgcagccggctctcccacgcgctctttggcgcagacgcagagacagccgagcggcaggccggtgtcgcccttaatggcggcgtcatgggccttcgtatgatcaatcgagaaacctggccacctgcaagctctgagctaagactcgtgttgatgggcgttattaatgagacgtattctccacccacaacgtcagaggctggtccagtggaggtagataccgactctgtgcctggagatctgtctttcactatccgggatctttcgcctgaagaaattgacaattgtatggatccgcactcgctggaggcactcgacttccttcgattatcgtacaaagcacctgcgcctctctcaccaattatgacgccggctgtacttgtaaagtacgacagggtcttcaagcagttactccgaatacttcgactgctatacgtcatgggtcaggtatcgcgagacatgtccaaaatggaacgtctgggacaagatcaagccaatgtgtggctgcggtttcggttcgaggctcagcatttcgtgcagagcgtcaatgcatacttctttgatacagggattgagaaaccttggaagcagttccaaattttcttggacactgtccagtctggtctggacagagccgaaacagagcaggaagaatctcgagttgtcagtcccgatgagataggcgaggagcacgagagcaccttggatcgcatcatgtacgtcatgttgctacgaaagagacagcaacccgtatcggtcctgcttgatgagatattcaccttgatcctcaagttttctaggcagattcaactacaggcaggaggtaaggttgatgatgatgctagcaaagtgctgattgaaggactctataaaagtttcaagaagaaggttgaaatattcattgcagtctgtcacagtcttggagacaagagaagcagttcagccaaagcgaccaaacatgaaaccggggacgatggcatgcgacgaaaggatgattttgagcaggagaacgtatttgaggcgttgttggtcaacctagacatgttgggctattattcgcgcccaaagttttga

SEQ ID NO: 34506 - protein, 964 aa, Muscodor strobelii
  misc_feature: SGI Peptide ID NO. 571929
  misc_feature (176)..(806): Pfam Id: PF04130 Pfam Desc: Spc97 / Spc98 family
  misc_feature (705)..(746): Pfam Id: PF04130 Pfam Desc: Spc97 / Spc98 family
  misc_feature (6)..(961): NCBI GI: 256726970 Blast Desc: NECHADRAFT_91068 [Nectria haematococca mpVI 77-13-4]
  misc_feature (1)..(961): NCBI GI: 116196444 Blast Desc: CHGG_04820 [Chaetomium globosum CBS 148.51] gi|88180733|gb|EAQ88201.1| CHGG_04820 [Chaetomium globosum CBS 148.51]
  misc_feature (5)..(961): NCBI GI: 46136555 Blast Desc: FG09793.1 [Gibberella zeae PH-1]
  misc_feature (104)..(959): NCBI GI: 156034837 Blast Desc: SS1G_13354 [Sclerotinia sclerotiorum 1980] gi|154698757|gb|EDN98495.1| SS1G_13354 [Sclerotinia sclerotiorum 1980]
  misc_feature (1)..(838): NCBI GI: 261352221 Blast Desc: conserved [Verticillium albo-atrum VaMs.102]
  misc_feature (5)..(963): NCBI GI: 171688568 Blast Desc: protein product [Podospora anserina] gi|170944246|emb|CAP70356.1| protein product [Podospora anserina]
  misc_feature (242)..(961): NCBI GI: 145612459 Blast Desc: MGG_07141 [Magnaporthe grisea 70-15] gi|145019615|gb|EDK03843.1| MGG_07141 [Magnaporthe grisea 70-15]
  misc_feature (106)..(695): NCBI GI: 164429245 Blast Desc: NCU05282 [Neurospora crassa OR74A] gi|157072997|gb|EAA32683.2| [Neurospora crassa OR74A]
  misc_feature (65)..(960): NCBI GI: 189198189 Blast Desc: conserved [Pyrenophora tritici-repentis Pt-1C-BFP] gi|187981380|gb|EDU48006.1| conserved [Pyrenophora tritici-repentis Pt-1C-BFP]
  misc_feature (60)..(959): NCBI GI: 261201568 Blast Desc: gamma-tubulin complex component GCP6 [Ajellomyces dermatitidis SLH14081] gi|239590095|gb|EEQ72676.1| gamma-tubulin complex component GCP6 [Ajellomyces dermatitidis SLH14081]
MADRDPANVFAFPDFEETAKWETLANGKDSLFKSSLIKNAVDHRTVSTGGLRKVPDSFFSIPTSIDLPDLDSKYEPLDDDSELSSQSIQPIHDISLSDIDISDDVWHSIGQTRPQAAPELQTWDAFLKTNVQHVTPSKPLFITEAGPLAYEALIKSQDNPLGFDCSNHIVVQTRHYLAALLALSLGRGSVFFIWDEKKAFFDPVEKEMRVLGYSTDVLQELQNFCLDLGTTTRKLSSYVQLTYRERSNAVSIALARTVDVLLLAIQRKLGEHGRRAMSLLQLQSTVVPVGTLLTYFRELVGKLSRIKSEERILSYIFREMQFLENDDSLLRVLMCEVLARASEPWTDFAEKWIGVKPEDGYPLTKDGTGRSFVKVETVSSVDDSGFETEHRDFIFEASRMPSFVPADIGLIMFETGKTLRLLRTHHPSHPLCDIATTTACEPPRLRWLFDWHSIGNLQHGVKAYTTSMLQKISQSRPGSQSRTHINVPASEEAVGGLKIFGSDVSDFERQLMASIQQLDQPPAISTVEDKISTSLMQGLFHQEEQPQQSAHNLDPHWSLLPLHSFGPLVCAQARLINKAYTKLLFSAHGLREHMRVQREYQLMGSGMFCSRLSHALFGADAETAERQAGVALNGGVMGLRMINRETWPPASSELRLVLMGVINETYSPPTTSEAGPVEVDTDSVPGDLSFTIRDLSPEEIDNCMDPHSLEALDFLRLSYKAPAPLSPIMTPAVLVKYDRVFKQLLRILRLLYVMGQVSRDMSKMERLGQDQANVWLRFRFEAQHFVQSVNAYFFDTGIEKPWKQFQIFLDTVQSGLDRAETEQEESRVVSPDEIGEEHESTLDRIMYVMLLRKRQQPVSVLLDEIFTLILKFSRQIQLQAGGKVDDDASKVLIEGLYKSFKKKVEIFIAVCHSLGDKRSSSAKATKHETGDDGMRRKDDFEQENVFEALLVNLDMLGYYSRPKF

SEQ ID NO: 34507 - DNA, 5734 bp, Muscodor strobelii
  misc_feature: SGI EST ID NO. CUFF.82065.0
  misc_feature: Variant of the nucleotide sequence at SEQ ID NO 34505
gtcttgagatgagcgagcaactgttacacgagcgatcaataatcaataaatcattcagtccagactgtgttcaccagatcctccatgtgcttagactcgttggtgacggtgtcaccgagggactatggctgacagagatcccgccaatgtcttcgcctttcctgatttcgaagagactgcaaaatgggaaacactcgccaacggcaaagattcattgttcaaatccagccttatcaaaaatgctgtcgatcatcgtactgtgagcactggcggccttcgtaaagtaccagacagtttcttcagcattcctacaagtatcgacctaccagatttggacagcaaatacgagcctcttgacgatgactccgagctgtcctcacagtcgattcaaccaattcacgatatctctctgtcagatatagatatatcggatgatgtttggcacagcattggtcagactcgtccccaggcggctccggagcttcaaacctgggatgcttttctcaagaccaacgttcagcatgtcacccccagcaaaccccttttcataacagaagctggccccctggcatacgaggccctaattaagtctcaagataatccccttggatttgattgctcgaatcatattgttgttcaaacccgacactatctcgcagccttgcttgctctaagcctgggacgagggtccgtcttcttcatttgggatgagaagaaagctttctttgacccagttgagaaagaaatgagggtgcttggctactctaccgatgtactccaagaactccaaaatttctgtttggacctaggcacaacaacccgcaaactctcgtcttacgtccagctcacatatcgagagcggtcaaacgctgttagcattgccctggcgaggaccgtcgatgtcttgctgcttgccattcaacgaaagcttggcgagcatggtagacgagcaatgtcgttgctccagttgcaatctacggttgtccctgttggaacattactgacctacttccgtgaactggtcggcaaattgtcccgaataaagtcagaagagcgaatactgtcctatatattccgcgagatgcaattcttggaaaatgacgactcactactacgagttcttatgtgtgaagttctcgcacgagcttccgaaccttggacggacttcgctgaaaagtggataggcgtgaaacctgaagacggttatccattaacgaaggatgggactgggagaagttttgtcaaagtcgaaactgtatctagcgttgatgactctgggttcgaaaccgagcatcgtgactttatcttcgaagcatcgcgtatgccttccttcgttcctgctgatatcggactcattatgtttgagactggcaaaactctccgccttcttcgaactcatcatccgtcccatcccctatgtgatattgctactactaccgcctgcgagccgcctcgtctcagatggttgtttgattggcactctattggaaatttgcagcacggagtaaaggcttatacaacttcgatgctccaaaaaatatcacagagccgccccggaagccagtcgcgcactcatatcaatgtcccagcttcggaagaggcagtgggtggacttaagatattcggcagcgatgtgagcgatttcgagaggcaactcatggcatccatacagcagctcgatcaaccaccagccatctctaccgttgaagataagatatcaacttcactaatgcaaggattgttccatcaagaggagcagccgcaacaatctgcccacaaccttgatccgcactggtctctcctcccactgcattccttcggaccactcgtatgcgctcaagcgcggctcattaacaaggcatacacgaaacttctcttcagtgcgcatggtcttagagagcacatgcgtgtacagagggagtaccaactgatgggaagcgggatgttctgcagccggctctcccacgcgctctttggcgcagacgcagagacagccgagcggcaggccggtgtcgcccttaatggcggcgtcatgggccttcgtatgatcaatcgagaaacctggccacctgcaagctctgagctaagactcgtgttgatgggcgttattaatgagacgtattctccacccacaacgtcagaggctggtccagtggaggtagataccgactctgtgcctggagatctgtctttcactatccgggatctttcgcctgaagaaattgacaattgtatggatccgcactcgctggaggcactcgacttccttcgattatcgtacaaagcacctgcgcctctctcaccaattatgacgccggctgtacttgtaaagtacgacagggtcttcaagcagttactccgaatacttcgactgctatacgtcatgggtcaggtatcgcgagacatgtccaaaatggaacgtctgggacaagatcaagccaatgtgtggctgcggtttcggttcgaggctcagcatttcgtgcagagcgtcaatgcatacttctttgatacagggattgagaaaccttggaagcagttccaaattttcttggacactgtccagtctggtctggacagagccgaaacagagcaggaagaatctcgagttgtcagtcccgatgagataggcgaggagcacgagagcaccttggatcgcatcatgtacgtcatgttgctacgaaagagacagcaacccgtatcggtcctgcttgatgagatattcaccttgatcctcaagttttctaggcagattcaactacaggcaggaggtaaggttgatgatgatgctagcaaagtgctgattgaaggactctataaaagtttcaagaagaaggttgaaatattcattgcagtctgtcacagtcttggagacaagagaagcagttcagccaaagcgaccaaacatgaaaccggggacgatggcatgcgacgaaaggatgattttgagcaggagaacgtatttgaggcgttgttggtcaacctagacatgttgggctattattcgcgcccaaagttttgaaatttgatactttttaaagataccccaaaataaatccattcggaatccccgaagctcaatactcggcattgcaatgaatcagcacctgaagatgtgacttacagtagcgcggactgcagaataagtgaagggttcaatacctagtgttcaatttatttgttggacccttattgccccgcatcgcgtctgtaagccccacgacgcgccccgccgaagactgagatggcacaatactatcaacaacctggcccagcatcactacagtctttagcttagcgacattgcaccattgaggcaacactagacaccttcagctcatagcacctgcggcacactctaacgactaaaggtgatgtctcgacccggttcctccctttcaggggccggcgcagggacaaacttgacgctcacacaggagctggagagactggagcagtccatcaccctcacattacaagagatcgatcacaatttcagcaaggcacaccgaatagtcacgaccagcatccttcccttagttgagcaatacggcgaacactccaagaatgtatgggaagcgagcaagttctggaaacagttcttcgaggcatccgcaaatgtttcgctttcggggtacgaggagttagcgggcgaagaagataccacagcagccgacgaaaccacgttagacgagagcacctccgaatacaataacacgacccaaactgaatccgtagccgacccatccgaataccaaagtcaacaccgagtcgtccacgatggcggcgaagacgactcgcttctcgaggacataaccattacgggcagcacgccgcgcgcaactggcagcaaagccaagcctaaaatggcccatttcccttctccatacgacgaattacggcgaaagatgaggcccgatgcagtctataaggatgatttgccatccaccgagtctgacgacgaagccgacaacacgatccagctactttccaccaaacttcccgatatgtccatgacaccgcgttcatcagatttacaagaaaatcaggcacagtcgaaacacaaggatctactactccatcgcgtcctggacaaaaattatcgtctacaagctaccccacaccaaaacgccccgtctccgatacggccgcgagggcgctcgcgttccccgatgaaggcaggggcgcatgaagcggaggaagatagaacgcgtcgcgcgctgtgggccgacagtcccatgagtagtcccgagatggctgttccaaagctgaggagcgacttatattcgccggtcaagccccgagggcgaagtggccctaggactcccggtgttagtgtgcagacacctgctactgccaagaagaaagatatcttcgctgaggtgcgggataaggataaggggaaaggcaaggcaagagatgagattacgtggagtgatgatgatgacgatgatacgggcggtgtgtttaggggcatgagtccgcccaaaactatccaatttgcactaccgccgagtaaacttatgcagactcctgcacgggaagcaagccgtcgtatcgtagacgatatcctcgtcacagcgggtgccataccagaggaatccgaggactttagcccgacaatggtcaagatgaaccacgacatacttgatgatacattctagtctgaggcaatggacttaatgtagtgactcttgctttgtatatatgctgtctctttgctgttgatgtggcgaaacacttggcaagctctactgtagccttgttcagatcttgtgagagtctagtctctccaagtgtatcccgcccagagagttcgagcagtggatgagacatgaaatgctcttattgctaccgcatggatgttttgaccccatggtaaaagtagagagacgggatacccatattagatcgaaaaatgtaaacagaaaacattgtctcgtgcttgtcttataagatcatatcattactgtccctacgctttatcatttgagaactggtaggtaagaggatgctttgagttgatatttgtccgatgtcattgccaccttcacctgctcctattgtcgttctcggtcccatcgtcgagtaatgctttgagattccataggcacgttttctcatgtatggggctcagacttccttccctattactgaaaagtattgccctgaaggcatttttttattgcgaagtcctcattggaatatgacggcgcctgatgaaacaacattcttagaactaacgcacaatacttatttcagtccttttctctctctggaaatcaagcaacgataggatcaaaagtaagatatttgttactgcggtagactaagtattcgtggtcatgacccagagattcttagtaaatcgtggtagctactctcgttcatcttcgagacgcatcgagcatcggcaatggagaagccgtctgccaggtaagatcttgtgccctcctgcaaccaggtgtcgagttcgagcagtcagtagggggaggacgaccaggtatatagctcatttcgtacctatcattccaataatgtacgtctctttggttcagaatttattcatcctcatttggtatgtgctaccaatttgccagcgcaaagcttcgggatcggtgtcagatgacggggggccggaacggacgtagttcaacagaagagcttggccctcggctaggctagcttctgggcatgttcttggagcccgtgtcccccgttccgtgttactcgggag

SEQ ID NO: 34508 - DNA, 1290 bp, Muscodor strobelii
  misc_feature: SGI cDNA ID NO. 571930
  misc_feature: Encodes the peptide sequence at SEQ ID NO 34509
atgtctcgacccggttcctccctttcaggggccggcgcagggacaaacttgacgctcacacaggagctggagagactggagcagtccatcaccctcacattacaagagatcgatcacaatttcagcaaggcacaccgaatagtcacgaccagcatccttcccttagttgagcaatacggcgaacactccaagaatgtatgggaagcgagcaagttctggaaacagttcttcgaggcatccgcaaatgtttcgctttcggggtacgaggagttagcgggcgaagaagataccacagcagccgacgaaaccacgttagacgagagcacctccgaatacaataacacgacccaaactgaatccgtagccgacccatccgaataccaaagtcaacaccgagtcgtccacgatggcggcgaagacgactcgcttctcgaggacataaccattacgggcagcacgccgcgcgcaactggcagcaaagccaagcctaaaatggcccatttcccttctccatacgacgaattacggcgaaagatgaggcccgatgcagtctataaggatgatttgccatccaccgagtctgacgacgaagccgacaacacgatccagctactttccaccaaacttcccgatatgtccatgacaccgcgttcatcagatttacaagaaaatcaggcacagtcgaaacacaaggatctactactccatcgcgtcctggacaaaaattatcgtctacaagctaccccacaccaaaacgccccgtctccgatacggccgcgagggcgctcgcgttccccgatgaaggcaggggcgcatgaagcggaggaagatagaacgcgtcgcgcgctgtgggccgacagtcccatgagtagtcccgagatggctgttccaaagctgaggagcgacttatattcgccggtcaagccccgagggcgaagtggccctaggactcccggtgttagtgtgcagacacctgctactgccaagaagaaagatatcttcgctgaggtgcgggataaggataaggggaaaggcaaggcaagagatgagattacgtggagtgatgatgatgacgatgatacgggcggtgtgtttaggggcatgagtccgcccaaaactatccaatttgcactaccgccgagtaaacttatgcagactcctgcacgggaagcaagccgtcgtatcgtagacgatatcctcgtcacagcgggtgccataccagaggaatccgaggactttagcccgacaatggtcaagatgaaccacgacatacttgatgatacattctag

SEQ ID NO: 34509 - protein, 429 aa, Muscodor strobelii
  misc_feature: SGI Peptide ID NO. 571930
  misc_feature (23)..(88): Pfam Id: PF08655 Pfam Desc: DASH complex subunit Ask1
  misc_feature (13)..(429): NCBI GI: 46136557 Blast Desc: FG09794.1 [Gibberella zeae PH-1]
  misc_feature (11)..(429): NCBI GI: 256726971 Blast Desc: NECHADRAFT_66485 [Nectria haematococca mpVI 77-13-4]
  misc_feature (20)..(429): NCBI GI: 39971655 Blast Desc: MGG_07143 [Magnaporthe grisea 70-15] gi|145019617|gb|EDK03845.1| MGG_07143 [Magnaporthe grisea 70-15]
  misc_feature (7)..(429): NCBI GI: 164429243 Blast Desc: NCU05280 [Neurospora crassa OR74A] gi|157072996|gb|EAA32681.2| conserved [Neurospora crassa OR74A]
  misc_feature (37)..(429): NCBI GI: 261352220 Blast Desc: conserved [Verticillium albo-atrum VaMs.102]
  misc_feature (7)..(429): NCBI GI: 156045293 Blast Desc: SS1G_09835 [Sclerotinia sclerotiorum 1980] gi|154694230|gb|EDN93968.1| SS1G_09835 [Sclerotinia sclerotiorum 1980]
  misc_feature (36)..(429): NCBI GI: 171688572 Blast Desc: protein product [Podospora anserina] gi|170944248|emb|CAP70358.1| protein product [Podospora anserina]
  misc_feature (32)..(429): NCBI GI: 154305110 Blast Desc: BC1G_08645 [Botryotinia fuckeliana B05.10] gi|150853808|gb|EDN29000.1| BC1G_08645 [Botryotinia fuckeliana B05.10]
  misc_feature (32)..(429): NCBI GI: 116196446 Blast Desc: CHGG_04821 [Chaetomium globosum CBS 148.51] gi|88180734|gb|EAQ88202.1| CHGG_04821 [Chaetomium globosum CBS 148.51]
  misc_feature (16)..(429): NCBI GI: 212532239 Blast Desc: conserved [Penicillium marneffei ATCC 18224] gi|210071640|gb|EEA25729.1| conserved [Penicillium marneffei ATCC 18224]
MSRPGSSLSGAGAGTNLTLTQELERLEQSITLTLQEIDHNFSKAHRIVTTSILPLVEQYGEHSKNVWEASKFWKQFFEASANVSLSGYEELAGEEDTTAADETTLDESTSEYNNTTQTESVADPSEYQSQHRVVHDGGEDDSLLEDITITGSTPRATGSKAKPKMAHFPSPYDELRRKMRPDAVYKDDLPSTESDDEADNTIQLLSTKLPDMSMTPRSSDLQENQAQSKHKDLLLHRVLDKNYRLQATPHQNAPSPIRPRGRSRSPMKAGAHEAEEDRTRRALWADSPMSSPEMAVPKLRSDLYSPVKPRGRSGPRTPGVSVQTPATAKKKDIFAEVRDKDKGKGKARDEITWSDDDDDDTGGVFRGMSPPKTIQFALPPSKLMQTPAREASRRIVDDILVTAGAIPEESEDFSPTMVKMNHDILDDTF

SEQ ID NO: 34510 - DNA, 5734 bp, Muscodor strobelii; identical to SEQ ID NO: 34507
  misc_feature: SGI EST ID NO. CUFF.82065.0
  misc_feature: Variant of the nucleotide sequence at SEQ ID NO 34508

SEQ ID NO: 34511 - DNA, 1602 bp, Muscodor strobelii
  misc_feature: SGI cDNA ID NO. 571931
  misc_feature: Encodes the peptide sequence at SEQ ID NO 34512
atggctaccaataccaccttcgcgtcgcctttggccgaattcgtgccatcggctggctcgttcgctccccagatcgaatcggtggttgataccatactgaatgctggtatcattacctggatcgttaccctcctcgcaatggctgccgcttacgaccagatcagttatctttggcaaaaggggaatatcgttgggcctcggttcaaggaaccatttatgggaccgtttctgcagtcgctgaatccgaaattcgaagaatacgttggcaagtggaacagtggtcccctcagctgcgtatccgtattccacaaatttgtcgttatcgcttctacccgggatctcgcacggaagattttcaacgctcctcaatatgtcaagccctgtgttgttgacgtggccacgaagattttgggagaggacagctgggtattcttggacggaaaggagcacgtcgattaccgaaagggtctgaacaaccttttcacccgcaaagcgctccagtcctatcttccgggccaagaagccgagtacaagcgctactttgctggtttcctcaagattaccgaagacgctggaggcaagccggttcccttcatgcatgagttccgcgagctcatgtgcgctgtgtccctacgtgctttcgctggatactacatggccgactctgccattaagaagattgccgatgactactatttggtcaccgccgctctggatctcgtcaacttccctatcatcattccctatacccgaacctggtatggtcagcgtgcagctcgtgagactatggaggaatttgccaagtgtgctgccaagtccaagatccgcatggctgctggtggcgaggttacctgtatcatggacgcctggattaaggagatgattgattccaagaagtgggttgaggctaccgaaaagggacttcccactgaaggcctgacgaagccctctcccgtgattcgcgaattctcggacatggagatcgcccgcactctcttcaccttcttgttcgcttctcaggatgccacgagcagtgctgccacgaatatgttccagatcactgctcagcgacccgatgtcttggaccgtgttcgtgaggagaacctgcgtgtgcgtaacggagacattcatgctcctgtcacggtagagcaactcgagtctatgacttacactcgtgctgtcgtccgtgagcttctccgctggcgccctcctgttatcatggttccctacaaagtcaagaaggcgtttcccattactgaagactacactgtccccaagggcgccatggtcatccccacgacatacatggctctgcgtgatcccgatgtttatgagaacccggatgagttcgaccccgaaaggtattacaccggcgacgcagaagagaagggcaagaagaacttccttgtcttcggcactggaccccactactgccttggacagcactatgcgcaactcaacttgtgccttttccttggaaaggcttccatccttctggactggaagcaccatcccacaccggtttcagaggagatcaaggtgtttgcttgtattttccccaaggacgactgccctctgacgttcgaggagagaaagtggtag

SEQ ID NO: 34512 - protein, 533 aa, Muscodor strobelii
  misc_feature: SGI Peptide ID NO. 571931
  misc_feature (66)..(526): Pfam Id: PF00067 Pfam Desc: Cytochrome P450
  misc_feature (322)..(493): Pfam Id: PF00067 Pfam Desc: Cytochrome P450
  misc_feature (1)..(533): NCBI GI: 85105220 Blast Desc: cytochrome P450 61 [Neurospora crassa OR74A] gi|28923500|gb|EAA32679.1| cytochrome P450 61 [Neurospora crassa OR74A]
  misc_feature (2)..(533): NCBI GI: 46110154 Blast Desc: FG01959.1 [Gibberella zeae PH-1]
  misc_feature (2)..(533): NCBI GI: 256720744 Blast Desc: [Nectria haematococca mpVI 77-13-4]
  misc_feature (2)..(533): NCBI GI: 145243610 Blast Desc: An11g03230 [Aspergillus niger] gi|134079005|emb|CAL00362.1| protein product [Aspergillus niger]
  misc_feature (1)..(533): NCBI GI: 116196454 Blast Desc: conserved [Chaetomium globosum CBS 148.51] gi|88180738|gb|EAQ88206.1| conserved [Chaetomium globosum CBS 148.51]
  misc_feature (1)..(531): NCBI GI: 261352219 Blast Desc: cytochrome P450 61 [Verticillium albo-atrum VaMs.102]
  misc_feature (1)..(533): NCBI GI: 171688574 Blast Desc: protein product [Podospora anserina] gi|170944249|emb|CAP70359.1| protein product [Podospora anserina]
  misc_feature (7)..(533): NCBI GI: 145603444 Blast Desc: MGG_06047 [Magnaporthe grisea 70-15] gi|145011674|gb|EDJ96330.1| MGG_06047 [Magnaporthe grisea 70-15]
  misc_feature (1)..(531): NCBI GI: 156045287 Blast Desc: SS1G_09832 [Sclerotinia sclerotiorum 1980] gi|154694227|gb|EDN93965.1| SS1G_09832 [Sclerotinia sclerotiorum 1980]
  misc_feature (4)..(531): NCBI GI: 154302211 Blast Desc: BC1G_09786 [Botryotinia fuckeliana B05.10] gi|150855560|gb|EDN30752.1| BC1G_09786 [Botryotinia fuckeliana B05.10]
MATNTTFASPLAEFVPSAGSFAPQIESVVDTILNAGIITWIVTLLAMAAAYDQISYLWQKGNIVGPRFKEPFMGPFLQSLNPKFEEYVGKWNSGPLSCVSVFHKFVVIASTRDLARKIFNAPQYVKPCVVDVATKILGEDSWVFLDGKEHVDYRKGLNNLFTRKALQSYLPGQEAEYKRYFAGFLKITEDAGGKPVPFMHEFRELMCAVSLRAFAGYYMADSAIKKIADDYYLVTAALDLVNFPIIIPYTRTWYGQRAARETMEEFAKCAAKSKIRMAAGGEVTCIMDAWIKEMIDSKKWVEATEKGLPTEGLTKPSPVIREFSDMEIARTLFTFLFASQDATSSAATNMFQITAQRPDVLDRVREENLRVRNGDIHAPVTVEQLESMTYTRAVVRELLRWRPPVIMVPYKVKKAFPITEDYTVPKGAMVIPTTYMALRDPDVYENPDEFDPERYYTGDAEEKGKKNFLVFGTGPHYCLGQHYAQLNLCLFLGKASILLDWKHHPTPVSEEIKVFACIFPKDDCPLTFEERKW

SEQ ID NO: 34513 - DNA, 2555 bp, Muscodor strobelii
  misc_feature: SGI EST ID NO. CUFF.82062.0
  misc_feature: Variant of the nucleotide sequence at SEQ ID NO 34511
cggcgagtcacaaagcattcgacagtcgtcgaattcaattactcctccttaatcatgttacgctagaagaagtggcacgggtcttcttccaaattgagaccttcaaattctcgagctactaagctacctctgagacttgtcccctcggcggaaatagtgcgaatactcgcaccgttgttatctgccccttcacctccaagcgctggccctgtaattttttcacctctctcatccattcgcagatctcaagccgcctacctacctggtagctggagggcatagctcaagacttactaaccaacgaagactacaccccaatccctttaaaaacagtcttggccgcttccccttctcacctccaagtacctatacagctcccactcccacgcttcaccttgccaacccacaatataagtgtcatcgtgtcctgggtattgcaaagtcgctcccacgtattgagcgctagctcgcgactccaaacaccatggctaccaataccaccttcgcgtcgcctttggccgaattcgtgccatcggctggctcgttcgctccccagatcgaatcggtggttgataccatactgaatgctggtatcattacctggatcgttaccctcctcgcaatggctgccgcttacgaccagatcagttatctttggcaaaaggggaatatcgttgggcctcggttcaaggaaccatttatgggaccgtttctgcagtcgctgaatccgaaattcgaagaatacgttggcaagtggaacagtggtcccctcagctgcgtatccgtattccacaaatttgtcgttatcgcttctacccgggatctcgcacggaagattttcaacgctcctcaatatgtcaagccctgtgttgttgacgtggccacgaagattttgggagaggacagctgggtattcttggacggaaaggagcacgtcgattaccgaaagggtctgaacaaccttttcacccgcaaagcgctccagtcctatcttccgggccaagaagccgagtacaagcgctactttgctggtttcctcaagattaccgaagacgctggaggcaagccggttcccttcatgcatgagttccgcgagctcatgtgcgctgtgtccctacgtgctttcgctggatactacatggccgactctgccattaagaagattgccgatgactactatttggtcaccgccgctctggatctcgtcaacttccctatcatcattccctatacccgaacctggtatggtcagcgtgcagctcgtgagactatggaggaatttgccaagtgtgctgccaagtccaagatccgcatggctgctggtggcgaggttacctgtatcatggacgcctggattaaggagatgattgattccaagaagtgggttgaggctaccgaaaagggacttcccactgaaggcctgacgaagccctctcccgtgattcgcgaattctcggacatggagatcgcccgcactctcttcaccttcttgttcgcttctcaggatgccacgagcagtgctgccacgaatatgttccagatcactgctcagcgacccgatgtcttggaccgtgttcgtgaggagaacctgcgtgtgcgtaacggagacattcatgctcctgtcacggtagagcaactcgagtctatgacttacactcgtgctgtcgtccgtgagcttctccgctggcgccctcctgttatcatggttccctacaaagtcaagaaggcgtttcccattactgaagactacactgtccccaagggcgccatggtcatccccacgacatacatggctctgcgtgatcccgatgtttatgagaacccggatgagttcgaccccgaaaggtattacaccggcgacgcagaagagaagggcaagaagaacttccttgtcttcggcactggaccccactactgccttggacagcactatgcgcaactcaacttgtgccttttccttggaaaggcttccatccttctggactggaagcaccatcccacaccggtttcagaggagatcaaggtgtttgcttgtattttccccaaggacgactgccctctgacgttcgaggagagaaagtggtagaaaagtttcagcgcgaatgatttcctccgagcatgggtgtagagctgcgcaagcgattatgattataacatggtgcaaatggggcccaagacctgggctcttctaaaggcgtttctcagacggttgttcaataggattaataataatgatggcccgttgtatataggtgggatgggcgccttaaacaataccagagtgcaacactcacctaacgaaattgatagaagaatcaaaaaagcacgataagatacagtctttggtacgccagtactcctggaaggaatgtcagtgatgtgcgaataagagagaatgtgaacgggtgcagagagcacgattcctatagttgcttttgacaatccctggggaaatcatgttctcttcgtagaaaatgagaaattaaaaggtgatatgccctattggttggtatcacaagtcataacttcacgagagcggctgcatgagactcgag

SEQ ID NO: 34514 - DNA, 558 bp, Muscodor strobelii
  misc_feature: SGI cDNA ID NO. 571932
  misc_feature: Encodes the peptide sequence at SEQ ID NO 34515
atggcagctccgcccgcaacacggcgcttgctcctcagcagtgcattgcgcactataccgaggactgcggcagcaggagcatctttcccagtagtttcgagcaccgcgagaagccttgtatctttagcgaagcccgccgcgacgtccagtagccgccatgttcccgcaccgataaagggcgtacgttggttgacaacctcagctactggaagcaagatctggagtttcgaagagatcaaagacctccaagacccgaaaatcacaataatagacgtgcgcgagccaggggagctaaaacaaaccggccatatccccaaagcggttaatataccgatcacgacataccccgatagcttccatatcacacccgaggacttcgaggatagatttgggttcacgcgcccaggacctgaggacgaggtggtgttctattgtaaggcgggtgtcagaagtcgtgctgcggccggtatcgcgaaggaggcgggttggaagaatgttggagagtatcctggatcgtgggtcgagtggagtgggaagggtggtgatattgagcattaa

SEQ ID NO: 34515 - protein, 185 aa, Muscodor strobelii
  misc_feature: SGI Peptide ID NO. 571932
  misc_feature (75)..(179): Pfam Id: PF00581 Pfam Desc: Rhodanese-like domain
  misc_feature (71)..(184): NCBI GI: 171688576 Blast Desc: protein product [Podospora anserina] gi|170944250|emb|CAP70360.1| protein product [Podospora anserina]
  misc_feature (71)..(185): NCBI GI: 85105224 Blast Desc: NCU05279 [Neurospora crassa OR74A] gi|28923501|gb|EAA32680.1| [Neurospora crassa OR74A]
  misc_feature (67)..(184): NCBI GI: 154302209 Blast Desc: BC1G_09785 [Botryotinia fuckeliana B05.10] gi|150855559|gb|EDN30751.1| BC1G_09785 [Botryotinia fuckeliana B05.10]
  misc_feature (66)..(181): NCBI GI: 261352218 Blast Desc: rhodanese domain-containing protein [Verticillium albo-atrum VaMs.102]
  misc_feature (6)..(184): NCBI GI: 46110152 Blast Desc: FG01958.1 [Gibberella zeae PH-1]
  misc_feature (51)..(184): NCBI GI: 156063506 Blast Desc: SS1G_01871 [Sclerotinia sclerotiorum 1980] gi|154697205|gb|EDN96943.1| SS1G_01871 [Sclerotinia sclerotiorum 1980]
  misc_feature (78)..(184): NCBI GI: 145603446 Blast Desc: MGG_06046 [Magnaporthe grisea 70-15] gi|145011675|gb|EDJ96331.1| MGG_06046 [Magnaporthe grisea 70-15]
  misc_feature (74)..(185): NCBI GI: 145228817 Blast Desc: An01g02830 [Aspergillus niger] gi|134054809|emb|CAK43649.1| protein product [Aspergillus niger]
  misc_feature (54)..(181): NCBI GI: 169605751 Blast Desc: SNOG_05902 [Phaeosphaeria nodorum SN15] gi|111065846|gb|EAT86966.1| SNOG_05902 [Phaeosphaeria nodorum SN15]
  misc_feature (12)..(185): NCBI GI: 238486274 Blast Desc: Rhodanese domain protein [Aspergillus flavus NRRL3357] gi|220699254|gb|EED55593.1| Rhodanese domain protein [Aspergillus flavus NRRL3357]
  misc_feature (59)..(182): SWISSPROT Homolog: EC 2.8.1.1 Thiosulfate sulfurtransferase
MAAPPATRRLLLSSALRTIPRTAAAGASFPVVSSTARSLVSLAKPAATSSSRHVPAPIKGVRWLTTSATGSKIWSFEEIKDLQDPKITIIDVREPGELKQTGHIPKAVNIPITTYPDSFHITPEDFEDRFGFTRPGPEDEVVFYCKAGVRSRAAAGIAKEAGWKNVGEYPGSWVEWSGKGGDIEH

SEQ ID NO: 34516 - DNA, 1778 bp, Muscodor strobelii
  misc_feature: SGI EST ID NO. CUFF.82097.0
  misc_feature: Variant of the nucleotide sequence at SEQ ID NO 34514
ggattttggagcttaacaagccttcctacggaaaacacttcgtactgtgatcaattgacagtacttgaccgtgtagtaaatcgatagccggcataccattgcatagctctgcgtcacgtgaaagatacagctcgaaacctctaagcccgcgtcataatggcagctccgcccgcaacacggcgcttgctcctcagcagtgcattgcgcactataccgaggactgcggcagcaggagcatctttcccagtagtttcgagcaccgcgagaagccttgtatctttagcgaagcccgccgcgacgtccagtagccgccatgttcccgcaccgataaagggcgtacgttggttgacaacctcagctactggaagcaagatctggagtttcgaagagatcaaagacctccaagacccgaaaatcacaataatagacgtgcgcgagccaggggagctaaaacaaaccggccatatccccaaagcggttaatataccgatcacgacataccccgatagcttccatatcacacccgaggacttcgaggatagatttgggttcacgcgcccaggacctgaggacgaggtggtgttctattgtaaggcgggtgtcagaagtcgtgctgcggccggtatcgcgaaggaggcgggttggaagaatgttggagagtatcctggatcgtgggtcgagtggagtgggaagggtggtgatattgagcattaaggtggcttgtgtgttgagattatgagatacctggattgttgatggtgctgatgtcaggttggtctcgtgactactgtcacgtgtacatacaagaagagatgtaaatgtactcagatgaggagcatggcgcaggtcgcagacttactggcctgtttgatttcatgggagaaccgactatagctatgaggctacggaattcttgcacacacgcgacgagtcctattaactttaaatgtgaagctcacggtcgaacaatctagagcagggatgaacactaaagtcatgagactggtatgactttgccggccattcggtcaattggtcgtcttacttatatggagagcaggttgagagagatatcacaaccttaagaagtgccctcagtctacctgggtgctgagcgtccaagtaacaaatatactagtagaaccaccactatgtactcgaaatgtgattctaatttcatcgttttgattggttacagtgtgtattgtacaaaatactagataatacacaatctttgtcacagcacccagttcccaaattgcgtcgcattttcgagccgcctttgaaagacccctgagttcgtactccatgtcgtcatgatcgcaacccccattgccattactaggttcttagaagacaaacctggcgggatcatcagcagccggtggagtatcaccagccttgtcgccgggcttgtccgagacggggctgccagcagcaaagaacagaatcttgatagcgatagcaagacccatatgcaggacgacgacaagcacaagtaggattttcgatgtctggcggtcggtggcgctgagtacagggtacagattccgtagcaagaaggcgacggagagagcccagccgacgcctacgaatacccagttgagaatggtgatgggcgaccagctgatgagggcaacggggatccaaatcaggttggcgtatccgtatagcgcccagcattcgaggagattggcggattcggagccgaagtatttgagagcgccgaacagcagaatcgggattacgagggtatacccgtatatcaagccggccgc

SEQ ID NO: 34517 - DNA, 891 bp, Muscodor strobelii
  misc_feature: SGI cDNA ID NO. 571933
  misc_feature: Encodes the peptide sequence at SEQ ID NO 34518
atgtcaggagcaggctacgatgccgtcgtggatgtcgacgacgagggtgacctcggacacacagacctacaagaagacttagaattccacaactcaacattcaacgacccgacgcaaacgacacgcaagggtttcccatcctcctctggctccggcctgccaccacctgcgacatcttcctcaggggcagcgggcgggaactctaagcgctatctctgggctctctcattctacgcacaattcttcgatgtcgacacgagctccgttctgtcgcggtgctgggctgccctctggccgcgggccaacttcctcgacgtcctcgaaggcaaccctgacctgtacggcccgttctggatcgcgacaactgtcattctgattctgttcttgggcggcacgatatcacagtacctcgccaagacaggtgctggccctttcgcctatgactttgagctgttgagtggcgcggccggcttgatatacgggtataccctcgtaatcccgattctgctgttcggcgctctcaaatacttcggctccgaatccgccaatctcctcgaatgctgggcgctatacggatacgccaacctgatttggatccccgttgccctcatcagctggtcgcccatcaccattctcaactgggtattcgtaggcgtcggctgggctctctccgtcgccttcttgctacggaatctgtaccctgtactcagcgccaccgaccgccagacatcgaaaatcctacttgtgcttgtcgtcgtcctgcatatgggtcttgctatcgctatcaagattctgttctttgctgctggcagccccgtctcggacaagcccggcgacaaggctggtgatactccaccggctgctgatgatcccgccaggtttgtcttctaa

SEQ ID NO: 34518 - protein, 296 aa, Muscodor strobelii
  misc_feature: SGI Peptide ID NO. 571933
  misc_feature (82)..(246): Pfam Id: PF04893 Pfam Desc: Yip1 domain
  misc_feature (1)..(296): NCBI GI: 156063508 Blast Desc: SS1G_01872 [Sclerotinia sclerotiorum 1980] gi|154697206|gb|EDN96944.1| SS1G_01872 [Sclerotinia sclerotiorum 1980]
  misc_feature (1)..(296): NCBI GI: 154302207 Blast Desc: BC1G_09784 [Botryotinia fuckeliana B05.10] gi|150855558|gb|EDN30750.1| BC1G_09784 [Botryotinia fuckeliana B05.10]
  misc_feature (1)..(283): NCBI GI: 46110150 Blast Desc: FG01957.1 [Gibberella zeae PH-1]
  misc_feature (1)..(272): NCBI GI: 85105213 Blast Desc: NCU05276 [Neurospora crassa OR74A] gi|28923498|gb|EAA32677.1| NCU05276 [Neurospora crassa OR74A]
  misc_feature (1)..(296): NCBI GI: 116196456 Blast Desc: CHGG_04826 [Chaetomium globosum CBS 148.51] gi|88180739|gb|EAQ88207.1| CHGG_04826 [Chaetomium globosum CBS 148.51]
  misc_feature (1)..(278): NCBI GI: 39976057 Blast Desc: MGG_06045 [Magnaporthe grisea 70-15] gi|145011676|gb|EDJ96332.1| MGG_06045 [Magnaporthe grisea 70-15]
  misc_feature (1)..(258): NCBI GI: 261352217 Blast Desc: YIPF1 [Verticillium albo-atrum VaMs.102]
  misc_feature (1)..(272): NCBI GI: 258565679 Blast Desc: conserved [Uncinocarpus reesii 1704] gi|237907285|gb|EEP81686.1| conserved [Uncinocarpus reesii 1704]
  misc_feature (1)..(272): NCBI GI: 240111057 Blast Desc: Yip1 domain containing protein [Coccidioides posadasii C735 delta SOWgp]
  misc_feature (1)..(272): NCBI GI: 119189893 Blast Desc: CIMG_04994 [Coccidioides immitis RS]
MSGAGYDAVVDVDDEGDLGHTDLQEDLEFHNSTFNDPTQTTRKGFPSSSGSGLPPPATSSSGAAGGNSKRYLWALSFYAQFFDVDTSSVLSRCWAALWPRANFLDVLEGNPDLYGPFWIATTVILILFLGGTISQYLAKTGAGPFAYDFELLSGAAGLIYGYTLVIPILLFGALKYFGSESANLLECWALYGYANLIWIPVALISWSPITILNWVFVGVGWALSVAFLLRNLYPVLSATDRQTSKILLVLVVVLHMGLAIAIKILFFAAGSPVSDKPGDKAGDTPPAADDPARFVF

SEQ ID NO: 34519 - DNA, 2430 bp, Muscodor strobelii
  misc_feature: SGI EST ID NO. CUFF.82098.1
  misc_feature: Variant of the nucleotide sequence at SEQ ID NO 34517
ctcgaagctatcaagccattgcgcccagcctcaaagatagctcaagcttcaagcttaccttcgatttccggttttactagttactgccgaaggatcttaactatttaggaaatcagtcggcatgtcaggagcaggctacgatgccgtcgtggatgtcgacgacgagggtgacctcggacacacagacctacaagaagacttagaattccacaactcaacattcaacgacccgacgcaaacgacacgcaagggtttcccatcctcctctggctccggcctgccaccacctgcgacatcttcctcaggggcagcgggcgggaactctaagcgctatctctgggctctctcattctacgcacaattcttcgatgtcgacacgagctccgttctgtcgcggtgctgggctgccctctggccgcgggccaacttcctcgacgtcctcgaaggcaaccctgacctgtacggcccgttctggatcgcgacaactgtcattctgattctgttcttgggcggcacgatatcacagtacctcgccaagacaggtgctggccctttcgcctatgactttgagctgttgagtggcgcggccggcttgatatacgggtataccctcgtaatcccgattctgctgttcggcgctctcaaatacttcggctccgaatccgccaatctcctcgaatgctgggcgctatacggatacgccaacctgatttggatccccgttgccctcatcagctggtcgcccatcaccattctcaactgggtattcgtaggcgtcggctgggctctctccgtcgccttcttgctacggaatctgtaccctgtactcagcgccaccgaccgccagacatcgaaaatcctacttgtgcttgtcgtcgtcctgcatatgggtcttgctatcgctatcaagattctgttctttgctgctggcagccccgtctcggacaagcccggcgacaaggctggtgatactccaccggctgctgatgatcccgccaggtttgtcttctaagaacctagtaatggcaatgggggttgcgatcatgacgacatggagtacgaactcaggggtctttcaaaggcggctcgaaaatgcgacgcaatttgggaactgggtgctgtgacaaagattgtgtattatctagtattttgtacaatacacactgtaaccaatcaaaacgatgaaattagaatcacatttcgagtacatagtggtggttctactagtatatttgttacttggacgctcagcacccaggtagactgagggcacttcttaaggttgtgatatctctctcaacctgctctccatataagtaagacgaccaattgaccgaatggccggcaaagtcataccagtctcatgactttagtgttcatccctgctctagattgttcgaccgtgagcttcacatttaaagttaataggactcgtcgcgtgtgtgcaagaattccgtagcctcatagctatagtcggttctcccatgaaatcaaacaggccagtaagtctgcgacctgcgccatgctcctcatctgagtacatttacatctcttcttgtatgtacacgtgacagtagtcacgagaccaacctgacatcagcaccatcaacaatccaggtatctcataatctcaacacacaagccaccttaatgctcaatatcaccacccttcccactccactcgacccacgatccaggatactctccaacattcttccaacccgcctccttcgcgataccggccgcagcacgacttctgacacccgccttacaatagaacaccacctcgtcctcaggtcctgggcgcgtgaacccaaatctatcctcgaagtcctcgggtgtgatatggaagctatcggggtatgtcgtgatcggtatattaaccgctttggggatatggccggtttgttttagctcccctggctcgcgcacgtctattattgtgattttcgggtcttggaggtctttgatctgtagttgcatgattagtctttttggccaagccttaagtgtatatgttgtaacaatatgagcacatacctcttcgaaactccagatcttgcttccagtagctgaggttgtcaaccaacgtacgccctttatcggtgcgggaacatggcggctactggacgtcgcggcgggcttcgctaaagatacaaggcttctcgcggtgctcgaaactactgggaaagatgctcctgctgccgcagtcctcggtatagtgcgcaatgcactgctgaggagcaagcgccgtgttgcgggcggagctgccattatgacgcgggcttagaggtttcgagctgtatctttcacgtgacgcagagctatgcaatggtatgccggctatcgatttactacacggtcaagtactgtcaattgatcacagtacgaagtgttttccgtaggaaggcttgttaagctccaaaatcc

SEQ ID NO: 34520 - DNA, 2481 bp, Muscodor strobelii
  misc_feature: SGI cDNA ID NO. 571934
  misc_feature: Elevated expression when VOC is produced
  misc_feature: Encodes the peptide sequence at SEQ ID NO 34521
atgttccacttgaaaacagccgtggcggtggtcgtcacgggctgggcttggctcgttcagggccagcagtcaggatggttaccaaaccaagccaatgcaacgatgtgccagtggggatcacttcgctcggcgcagttgaaggatacgctctacattgacggcggcagtctctactgggtgcccggtatggttgatgggagttacaattcacctgtgtttgatcaaaatccactaggatatatgtacacgttgaatttcagtactccgtttaattccagtaccaatgttagcagcattctcaagacaatatctaaggctccgaatgggtttgctgcaaacaatttcgcgcccaattatgtggacggcgccatgcttgcgaacaacgacgagtttttcttgtacggcggactactagaaaataccaagaggtactctccgccagaagctgacaatgcgctcgagtttcaggcgtcacaatacggtgtgcacaaagatgccttcacgcccggcttcctaaacgccaagctaccagacgggttgactaggtatctcacctacggtggcgctgctaatgctccatctgagaatactgcctggtattttggggggtatcagtcgccatcagggggaccaattttccaaccttcattaaatgtgtcactcaatccgacgaatgtatccgacacgcttgtcagactgaatatgactacgcaaggagatgaaacctggtcaaaaacccctcttccatcaagtgtgccgagtcgagccaatccgtctgtagtttgggtgccggttggcgagcaaggaattcttgtcgtgcttggcggagtcgtataccctcaatacaataatcccaatcaaacgtcccagaacgcggcccaaagcgaaaaagacagtcctttgtttatgtcaaatattgatatttatgatattgctaatgacgtttggtatcaacaaccaacgattgcagggcctggccagctggctatgggatgtgctgtcgttgccccagcccaagatttttcaagctataatatttactattacggcggatttgacggcatacatgctctcgaggactacaatgacgacgtttggattctctcattgccttcgtttatgtggatgaagatatcatcagggacgccaaaccattctcgagctggtcatcaatgtgtcatgccatatcctgatcagatgataacaattggaggagctcgggggtcggctacgggtatcgagtgtcttgatggtggcatactccaggtcttcaacctcaccgctggcaaatggttagactcatacgaccctgacaagtggaacatgtacggtgtaccagaaatgattcatctaatgattggaggtggttattccggaggcgccactatgacgacaccgaccccgaccggatgggcaaccgagggactggcgagtgtctttgcgacaacatatgatgcttccaagatcacaacatactatccatatggctctgcaggaccaggaaatggaacaaggggttcccctggcaagagccatggaggaacaccttcgtgggtcgcaccagtcctaggcgtcgttctgggtctcgtatttctcactgcaattgcggtagcaattctactctaccgaagacgcaaactgtggtggaagaaaaagggcagcagtcaagagtctccagatgagaatgccgatcgcatcgtatcttgggtcaatgggcagccagacaaggcattgacggttacaagtgacgaaccatcatccaagcccgatgacattggtagtcgcaacacaacacccatgataggctatgaatattatcagccttacatggcacaggaactggcagcccctgttgcgccagtcgagctagccgacacaccacgtcggatggaattaaatggtgaaggtctcacccatatcgacgtgatcaacaagcactcgaatctctcccctaccacccaacgttcattcaatcagtcgtcatcattctttacaggatcggtgtcacaagaacaagtgagtagtaacacgtcgacacatgctgttgtgccaccggtagcgccagggacggcctacacgcaagaacgagcagattcgccatctcttgggaaccccagcccgtatcgaccaccgccggatcgaaatgccatcgtcagtgacgtgagccatataagcgagagccatgcggcacatttacgcaacataagcaacacaacggcgagctcaacgggaaacattgcaagcagtcgaccagatacgccacaagccgttcacccatttagttcaggcccaataagccccccattgataagccccccgagtgtcgtagacgggcacgagagcatggactacatgagtgcataccagggaaggactttgacggggttgacgagtcatccgggctccgtccggagcgcaaacacggcaagccgtccgtcgaggaatagcacatttcgcgaggagattgacgatgagaggtga

SEQ ID NO: 34521 - protein, 826 aa, Muscodor strobelii
  misc_feature: SGI Peptide ID NO. 571934
  misc_feature (4)..(824): NCBI GI: 145603270 Blast Desc: MGG_06156 [Magnaporthe grisea 70-15] gi|145011535|gb|EDJ96191.1| MGG_06156 [Magnaporthe grisea 70-15]
  misc_feature (18)..(824): NCBI GI: 156032623 Blast Desc: SS1G_14009 [Sclerotinia sclerotiorum 1980] gi|154699411|gb|EDN99149.1| SS1G_14009 [Sclerotinia sclerotiorum 1980]
  misc_feature (18)..(745): NCBI GI: 154298658 Blast Desc: BC1G_11584 [Botryotinia fuckeliana B05.10] gi|150857756|gb|EDN32948.1| BC1G_11584 [Botryotinia fuckeliana B05.10]
  misc_feature (8)..(792): NCBI GI: 85105046 Blast Desc: NCU08821 [Neurospora crassa OR74A] gi|28923442|gb|EAA32625.1| [Neurospora crassa OR74A]
  misc_feature (41)..(787): NCBI GI: 261352558 Blast Desc: kelch repeat protein [Verticillium albo-atrum VaMs.102]
  misc_feature (112)..(824): NCBI GI: 46121705 Blast Desc: FG05231.1 [Gibberella zeae PH-1]
  misc_feature (103)..(824): NCBI GI: 256726852 Blast Desc: NECHADRAFT_33696 [Nectria haematococca mpVI 77-13-4]
  misc_feature (1)..(581): NCBI GI: 116194482 Blast Desc: CHGG_03839 [Chaetomium globosum CBS 148.51] gi|88179752|gb|EAQ87220.1| CHGG_03839 [Chaetomium globosum CBS 148.51]
  misc_feature (29)..(546): NCBI GI: 212534132 Blast Desc: conserved [Penicillium marneffei ATCC 18224] gi|210069621|gb|EEA23711.1| conserved [Penicillium marneffei ATCC 18224]
  misc_feature (25)..(542): NCBI GI: 242789402 Blast Desc: conserved [Talaromyces stipitatus ATCC 10500] gi|218717940|gb|EED17360.1| conserved [Talaromyces stipitatus ATCC 10500]
  misc_feature: Useful for introducing or modulating the production of volatile compounds
MFHLKTAVAVVVTGWAWLVQGQQSGWLPNQANATMCQWGSLRSAQLKDTLYIDGGSLYWVPGMVDGSYNSPVFDQNPLGYMYTLNFSTPFNSSTNVSSILKTISKAPNGFAANNFAPNYVDGAMLANNDEFFLYGGLLENTKRYSPPEADNALEFQASQYGVHKDAFTPGFLNAKLPDGLTRYLTYGGAANAPSENTAWYFGGYQSPSGGPIFQPSLNVSLNPTNVSDTLVRLNMTTQGDETWSKTPLPSSVPSRANPSVVWVPVGEQGILVVLGGVVYPQYNNPNQTSQNAAQSEKDSPLFMSNIDIYDIANDVWYQQPTIAGPGQLAMGCAVVAPAQDFSSYNIYYYGGFDGIHALEDYNDDVWILSLPSFMWMKISSGTPNHSRAGHQCVMPYPDQMITIGGARGSATGIECLDGGILQVFNLTAGKWLDSYDPDKWNMYGVPEMIHLMIGGGYSGGATMTTPTPTGWATEGLASVFATTYDASKITTYYPYGSAGPGNGTRGSPGKSHGGTPSWVAPVLGVVLGLVFLTAIAVAILLYRRRKLWWKKKGSSQESPDENADRIVSWVNGQPDKALTVTSDEPSSKPDDIGSRNTTPMIGYEYYQPYMAQELAAPVAPVELADTPRRMELNGEGLTHIDVINKHSNLSPTTQRSFNQSSSFFTGSVSQEQVSSNTSTHAVVPPVAPGTAYTQERADSPSLGNPSPYRPPPDRNAIVSDVSHISESHAAHLRNISNTTASSTGNIASSRPDTPQAVHPFSSGPISPPLISPPSVVDGHESMDYMSAYQGRTLTGLTSHPGSVRSANTASRPSRNSTFREEIDDER

SEQ ID NO: 34522 - DNA, 3584 bp, Muscodor strobelii
  misc_feature: SGI EST ID NO. CUFF.82148.3
  misc_feature: Variant of the nucleotide sequence at SEQ ID NO 34520
gtagtagttgatgtagtggtgttcagaatcagacgaattccctatcaaatctagacgtgccctgctacggacaatgagacgatctgctggtatccgaagggctacatgctacgcctcaacgtacttagttctacttgaccagaagagccttgatactcccctacccgcatatagccgacctagggactggccagatagaacaccatacgcgaagatattgatcgggtggttaatccaatttctgtgtggtctaagctaggcgttcagcgatctgcgctgagatgccgaaggccacctccatcacctaattctagatcttgtggactggccacaatttgagtatccctttcggggctccctctcctctttatctgagttcgccacttcattctttgttcgttgctctatcttcgctaattgccacaaagggtggcccgtcgagttgacccaatccgtcttgttctctgctcccgtgagtcaaggaaatgcttgagagtcgcaagtcataaacttcttggccaacaatcgaagagccgttattgaaacgcaatttcaaattctatagtggaagtctttgtctttgaaccattacgcctcccggctgccgagcctcttactggcacaagatcctcaaatggtagaatgaaagtcaaccgcaatcccaccgcttagtttctgtcacgtctctataactcattcctctggaaccaaataattccactttaacgaaaaatgttccacttgaaaacagccgtggcggtggtcgtcacgggctgggcttggctcgttcagggccagcagtcaggatggttaccaaaccaagccaatgcaacgatgtgccagtggggatcacttcgctcggcgcagttgaaggatacgctctacattgacggcggcagtctctactgggtgcccggtatggttgatgggagttacaattcacctgtgtttgatcaaaatccactaggatatatgtacacgttgaatttcagtactccgtttaattccagtaccaatgttagcagcattctcaagacaatatctaaggctccgaatgggtttgctgcaaacaatttcgcgcccaattatgtggacggcgccatgcttgcgaacaacgacgagtttttcttgtacggcggactactagaaaataccaagaggtactctccgccagaagctgacaatgcgctcgagtttcaggcgtcacaatacggtgtgcacaaagatgccttcacgcccggcttcctaaacgccaagctaccagacgggttgactaggtatctcacctacggtggcgctgctaatgctccatctgagaatactgcctggtattttggggggtatcagtcgccatcagggggaccaattttccaaccttcattaaatgtgtcactcaatccgacgaatgtatccgacacgcttgtcagactgaatatgactacgcaaggagatgaaacctggtcaaaaacccctcttccatcaagtgtgccgagtcgagccaatccgtctgtagtttgggtgccggttggcgagcaaggaattcttgtcgtgcttggcggagtcgtataccctcaatacaataatcccaatcaaacgtcccagaacgcggcccaaagcgaaaaagacagtcctttgtttatgtcaaatattgatatttatgatattgctaatgacgtttggtatcaacaaccaacgattgcagggcctggccagctggctatgggatgtgctgtcgttgccccagcccaagatttttcaagctataatatttactattacggcggatttgacggcatacatgctctcgaggactacaatgacgacgtttggattctctcattgccttcgtttatgtggatgaagatatcatcagggacgccaaaccattctcgagctggtcatcaatgtgtcatgccatatcctgatcagatgataacaattggaggagctcgggggtcggctacgggtatcgagtgtcttgatggtggcatactccaggtcttcaacctcaccgctggcaaatggttagactcatacgaccctgacaagtggaacatgtacggtgtaccagaaatgattcatctaatgattggaggtggttattccggaggcgccactatgacgacaccgaccccgaccggatgggcaaccgagggactggcgagtgtctttgcgacaacatatgatgcttccaagatcacaacatactatccatatggctctgcaggaccaggaaatggaacaaggggttcccctggcaagagccatggaggaacaccttcgtgggtcgcaccagtcctaggcgtcgttctgggtctcgtatttctcactgcaattgcggtagcaattctactctaccgaagacgcaaactgtggtggaagaaaaagggcagcagtcaagagtctccagatgagaatgccgatcgcatcgtatcttgggtcaatgggcagccagacaaggcattgacggttacaagtgacgaaccatcatccaagcccgatgacattggtagtcgcaacacaacacccatgataggctatgaatattatcagccttacatggcacaggaactggcagcccctgttgcgccagtcgagctagccgacacaccacgtcggatggaattaaatggtgaaggtctcacccatatcgacgtgatcaacaagcactcgaatctctcccctaccacccaacgttcattcaatcagtcgtcatcattctttacaggatcggtgtcacaagaacaagtgagtagtaacacgtcgacacatgctgttgtgccaccggtagcgccagggacggcctacacgcaagaacgagcagattcgccatctcttgggaaccccagcccgtatcgaccaccgccggatcgaaatgccatcgtcagtgacgtgagccatataagcgagagccatgcggcacatttacgcaacataagcaacacaacggcgagctcaacgggaaacattgcaagcagtcgaccagatacgccacaagccgttcacccatttagttcaggcccaataagccccccattgataagccccccgagtgtcgtagacgggcacgagagcatggactacatgagtgcataccagggaaggactttgacggggttgacgagtcatccgggctccgtccggagcgcaaacacggcaagccgtccgtcgaggaatagcacatttcgcgaggagattgacgatgagaggtgatgatgataatgacaactagttaataggaaagactgtatttctgcgtcttccactttctgttcgcttgggatttataaactggatactgtgataccatagcacatagcgtatatctattacgaggatatcaggatcgatgtactagagaaaggtgcatatggaatgttcgcctggcttgaaggactggttataaacatggtccttgtctctcatttgcatagggaatcagggctaaggcaaaagggacgcttcgcactatgagcaattccataggatatgtcaatgatttgtgtggcaagacgaataaatattgtctgaatagttagcaatagaagatacctgtggacgtgtcagtttaatggtctcccctt

SEQ ID NO: 34523 - DNA, 1776 bp, Muscodor strobelii
  misc_feature: SGI cDNA ID NO. 571935
  misc_feature: Elevated expression when VOC is produced
  misc_feature: Encodes the peptide sequence at SEQ ID NO 34524
atgcctgaaatctatcgaatctgggttttggctgccctcttgctcagccaccccgtgagctgtagcacagcaacggtggaagctgcttgtccttcggctacaccttccaccgtcacagtcacagaatatgcagaatatcccggcgcttcgataataactgtaacggacaccgaatacgagactacaacagaatacggaactattactgtactcgatacggtttatcaatatgtcacagaaattgacgtagaaacgagtataattgaggaagaagtaatcacgactcaagtagtcacacaaatcgttactgatatcctcacctactcacgccctcactactcaaccgcttgttacacaacgacactaccttgtgactgcactgagacaatatggggcgaacactgcatcactgtcactgaatggacaactaccactgaaaccaccacatacacaactgtatcccctacgacgacgacagaaacagatgtgacgacgacgacggagacagatgtgtcgacttacacgacggtgtcaacctacacgacggaaactacagcaacagagactactgttatcacgtcgacgacccttgttcctacaaccgttatatcatccaccactttatacagcacgtcgacttacacgacagtactgacctacaccacaagttatccggtgacagtgacagatacagtaacagacaccactaccactactgatgtctccgtgtcagtctctgtatcgccgaccactgacatttccgtttctgtctcggtgtcacctactactgataccgcaactttaacgaccacctccgtgacaacgtctctagtgaccatcatatcaatcaccacatttacaaccatctcagaaatatccattactgactcaatcacatccacaactactctcaccacgacagaggatgtgacgattgtttcaccaacaacaataactttgttgtctccaacgacggtggttggtcccggagagaccgtcacagctacttcaactgtcacaaccacttcagtaatcacagcagtcactgcatgtcccactccaacaaacacgccaggagctgtggtggcaccttataatgtgaactcgaacttgacttggggatgccccccgacgtatgtctgtgacgtgccgttcaccaacggctgtaacgtttttgcgggctcgcctgataaaacatacgtctgcgagaacccagcatggtgcaaacccgctccaccttttcccattgtcacatggccggagaacagcacagggagctattacccaccaactaagaggtatttcaatctggacccagaagctttcggcctcagcgacgacatttttgctatagagtatataacgacgacaataacctccggatatgtgtcttacgtaacgacgattagcactgcctatcacgtcgagtacttcgtcgtcgtcgtcgtcgtcgtcgtcgtcaacaagctctgtgacacagacttcgccgagcagctccacgacaacgtcatcctcgtcaagcacatcaagcatatcagcatcgaccacgtcagaaacgtctgtaacatccgaaacatcgacgattgcaataacaagtaccactgggcccgtaacgtcgacgcccacaacgaactcaactacgacgccaacgacaacaacatcgtcgattccaactgcgggagctacggcattaacagtcgccttgagttggattactgttcctcttttgtccctcatactcatcttctaagcacctcacataaccataatgtttaa

SEQ ID NO: 34524 - protein, 591 aa, Muscodor strobelii
  misc_feature: SGI Peptide ID NO. 571935
  misc_feature (329)..(587): NCBI GI: 156032617 Blast Desc: SS1G_14006 [Sclerotinia sclerotiorum 1980] gi|154699408|gb|EDN99146.1| SS1G_14006 [Sclerotinia sclerotiorum 1980]
  misc_feature (348)..(550): NCBI GI: 46121707 Blast Desc: FG05232.1 [Gibberella zeae PH-1]
  misc_feature (262)..(451): NCBI GI: 146323559 Blast Desc: conserved [Aspergillus fumigatus Af293] gi|129555250|gb|EAL84368.2| conserved [Aspergillus fumigatus Af293]
  misc_feature (31)..(452): NCBI GI: 225681310 Blast Desc: [Paracoccidioides brasiliensis Pb03]
  misc_feature (31)..(452): NCBI GI: 226295058 Blast Desc: [Paracoccidioides brasiliensis Pb18]
  misc_feature (266)..(545): NCBI GI: 255949730 Blast Desc: Pc22g17190 [Penicillium chrysogenum Wisconsin 54-1255] gi|211592649|emb|CAP99007.1| Pc22g17190 [Penicillium chrysogenum Wisconsin 54-1255]
  misc_feature (185)..(451): NCBI GI: 159121987 Blast Desc: conserved [Aspergillus fumigatus A1163]
  misc_feature (19)..(551): NCBI GI: 115433767 Blast Desc: [Aspergillus terreus NIH2624] gi|114189872|gb|EAU31572.1| [Aspergillus terreus NIH2624]
  misc_feature: Useful for introducing or modulating the production of volatile compounds
MPEIYRIWVLAALLLSHPVSCSTATVEAACPSATPSTVTVTEYAEYPGASIITVTDTEYETTTEYGTITVLDTVYQYVTEIDVETSIIEEEVITTQVVTQIVTDILTYSRPHYSTACYTTTLPCDCTETIWGEHCITVTEWTTTTETTTYTTVSPTTTTETDVTTTTETDVSTYTTVSTYTTETTATETTVITSTTLVPTTVISSTTLYSTSTYTTVLTYTTSYPVTVTDTVTDTTTTTDVSVSVSVSPTTDISVSVSVSPTTDTATLTTTSVTTSLVTIISITTFTTISEISITDSITSTTTLTTTEDVTIVSPTTITLLSPTTVVGPGETVTATSTVTTTSVITAVTACPTPTNTPGAVVAPYNVNSNLTWGCPPTYVCDVPFTNGCNVFAGSPDKTYVCENPAWCKPAPPFPIVTWPENSTGSYYPPTKRYFNLDPEAFGLSDDIFAIEYITTTITSGYVSYVTTISTAYHVEYFVVVVVVVVVNKLCDTDFAEQLHDNVILVKHIKHISIDHVRNVCNIRNIDDCNNKYHWARNVDAHNELNYDANDNNIVDSNCGSYGINSRLELDYCSSFVPHTHLLSTSHNHNV

SEQ ID NO: 34525 - DNA, 3173 bp, Muscodor strobelii
  misc_feature: SGI EST ID NO. CUFF.82078.0
  misc_feature: Variant of the nucleotide sequence at SEQ ID NO 34523
agtatcccgtaaagagttgtcaccttagctggagctagaacttctcggctttgctccgtgtaaggtaggtagtgtttggatgaagctttctgtcagcctcgttgccttaacctcatagtcttccccagagttgtaagtctcctggactccgttctttcgaactaggtcgaacttaacgcgttcagttgcggttgtgatcactacggactttggtcctctcgggtaacacagtctgacctgtatgaaggtgtgagacgaagacagcttggatattctcatgaaccagtttggtttttgacatcgctcacttgcgctagaagtcgtggaactcaatcacaaatcggccacgctccaagtccttattacgatacatttgagacgctctttcgacagctacttagctttccgtctttcgcaatgcctgaaatctatcgaatctgggttttggctgccctcttgctcagccaccccgtgagctgtagcacagcaacggtggaagctgcttgtccttcggctacaccttccaccgtcacagtcacagaatatgcagaatatcccggcgcttcgataataactgtaacggacaccgaatacgagactacaacagaatacggaactattactgtactcgatacggtttatcaatatgtcacagaaattgacgtagaaacgagtataattgaggaagaagtaatcacgactcaagtagtcacacaaatcgttactgatatcctcacctactcacgccctcactactcaaccgcttgttacacaacgacactaccttgtgactgcactgagacaatatggggcgaacactgcatcactgtcactgaatggacaactaccactgaaaccaccacatacacaactgtatcccctacgacgacgacagaaacagatgtgacgacgacgacggagacagatgtgtcgacttacacgacggtgtcaacctacacgacggaaactacagcaacagagactactgttatcacgtcgacgacccttgttcctacaaccgttatatcatccaccactttatacagcacgtcgacttacacgacagtactgacctacaccacaagttatccggtgacagtgacagatacagtaacagacaccactaccactactgatgtctccgtgtcagtctctgtatcgccgaccactgacatttccgtttctgtctcggtgtcacctactactgataccgcaactttaacgaccacctccgtgacaacgtctctagtgaccatcatatcaatcaccacatttacaaccatctcagaaatatccattactgactcaatcacatccacaactactctcaccacgacagaggatgtgacgattgtttcaccaacaacaataactttgttgtctccaacgacggtggttggtcccggagagaccgtcacagctacttcaactgtcacaaccacttcagtaatcacagcagtcactgcatgtcccactccaacaaacacgccaggagctgtggtggcaccttataatgtgaactcgaacttgacttggggatgccccccgacgtatgtctgtgacgtgccgttcaccaacggctgtaacgtttttgcgggctcgcctgataaaacatacgtctgcgagaacccagcatggtgcaaacccgctccaccttttcccattgtcacatggccggagaacagcacagggagctattacccaccaactaagaggtatttcaatctggacccagaagctttcggcctcagcgacgacatttttgctatagagtatataacgacgacaataacctccggatatgtgtcttacgtaacgacgattagcactggtaactgggcttctcagacagacattactcattatccgcctacgtccacaagtacctcctcctctcccactacaacacagtctcagaagcgatggaaactcctctcaaagcgagatagctctataactccgtcggtatgcatgccaagctgcaacaacgcctatatcgaggcccagagtgtagggaaaacacaggcattatgcgcttcggattccattttcgaatcgtattaccaggcatgtctgagttgtataagagtcaatggagacagcgcacaattatcggaccgagcatttgtacctaccgaattttctcaatatctcgacttctgtgaagcgaactacccaactacagtcactagcacgccgggccagggtcaagaatcaactacagcgggaggcaccactattcctggtggacagccagcaacaagtacttcggttgagcctatcacgtcgagtacttcgtcgtcgtcgtcgtcgtcgtcgtcgtcaacaagctctgtgacacagacttcgccgagcagctccacgacaacgtcatcctcgtcaagcacatcaagcatatcagcatcgaccacgtcagaaacgtctgtaacatccgaaacatcgacgattgcaataacaagtaccactgggcccgtaacgtcgacgcccacaacgaactcaactacgacgccaacgacaacaacatcgtcgattccaactgcgggagctacggcattaacagtcgccttgagttggattactgttcctcttttgtccctcatactcatcttctaagcacctcacataaccataatgtttaaactttcaaccgtgttccttgtccatccttaatggtctcatagacattttactattatttaaattttcaaaccattcctttaaggcaagaatgcatctctaccgtgcggggcgttgtataatggtaattgattgggaatggttccgcccgtagcggcttcactcatttatacccttatagattttcggaaaatatcttgatacccaggacattccttttgatccgagcggggccattcgatggtaccatggttgatcaagtatgaagaggagagaaggaggaagcaagagacacttggtgagaacataagggaaggtgtcgggtctaatcatgtgaagctaggatgggacatgagcagtctgaaatcgagtttgatgtcaaatgatttatctggggatgacagacataatggtgtgcgtggaggagcaaggagtatatatgcaatcaaaaggactctaaagtgaaagtggtccacatagcttggcacaaataagtagcaggaccaaattgatgaacatacacaacacgatttaca

SEQ ID NO: 34526 - DNA, 3405 bp, Muscodor strobelii
  misc_feature: SGI cDNA ID NO. 571936
  misc_feature: Reduced expression when VOC is produced
  misc_feature: Encodes the peptide sequence at SEQ ID NO 34527
atggtggggttgcctagcagcagcgaccagccttacctaagcatcgccgacccgactcgcatctttttgtttccctgcctctacgccgtcttctgcccgtcttgtaacgcaacaccacattcccatccccatcgaccacgctctccggcagcccgccgagatctcctcaccccaccatccgtcgtcacaaccgccaagattccctcccacgaacacgacaaggtggggaagcgcaaactctctaacggagatctccccttctcccccaagagaactatgaccgacaccaagatggccgcgggtgataaggtcgacctggtcactcgggtccaggtcgatgactcggtggtctcccatcataccgagatcgacgagtccctctacagccggcagctctacgtcctgggccacgaggccatgaagcgcatgggagcttccaatgtcctcatagttggcctcaagggcctgggcgtcgagatagccaagaacatcgctcttgctggcgtcaagagcctgactctctacgatcccacccccgctgccatcgccgacctctcctcccagttcttcctccaccccgaagacgtcggccagccccgcgacgctgtcactgcgccccgcgttgccgagctcaacgcctatacccccgtccatatccatcagtcctcaagtctcgtcgagaacctctcccagttcgacaagtatcaggtagtagtcctcaccaaccagcccctgcaggatcagctcgtcattggcgactactgccacactaagggcatctatgtcgtatctgccagcacgtacggtctgttcggctccatcttctgcgatttcggcgacaagttcacatgcatcgaccccaccggcgagaaccctctgaatggcatcattgccggtatcgacgaagacggtctggtgtccgccttggatgaaacccgacacggtctgacagatggcgactatgtcaccttctctgaggtcgaaggtatggagggtctcaatggtgctgagccccggaaagtcaccgtcaagggaccttacacattctccattggtgacgtatccggcctgggccaatacaagcgaggcggtctataccagcaggtcaagatgcccgctatcattgacttcaagtctatttcctcatcaatcagagacccggaatttgttttctcagattttgccaaattcgaccggcctcagttactacacgtcgcattcgaggcgcttaacgcatttgtacagtcgcaaggccgtcctcctcgacctatgaataaagaggatgctgccgtgctgattggctccgtaaaggcctttgccgagaaggagaaaattgagatcgagattggcgagaaagaagagaagatcatccaggaattaagtttccaggcgcaaggagacctaaatcccatggccgccctcttcggtggccttgctgcacaagaagtcctcaaggccgtttctggcaagttccaccctatgaagcagtggttctattttgattcattagaatctctgcctactagctgtgccaggacagaagaattgtgtaagcctactgaaacacggtatgacggtcaaattgcagtcttcggtaaggagtaccaagataagattgccaacttgacgcagttcctcgtcggcgctggtgctattggatgcgagatgttgaagaactgggctatgattggtcttggcgttggtcccaaaggcaagatcattatcaccgatatggactccatcgagaagagcaaccttaatcgccagttcttgttcagggccaaggacgttggccaaatgaagagcgattgcgctgccaaggcagttgcggccatgaaccccgagctgaatggtcacatcgagtgcttaaaagatcgcgttagtaacgagactgagcacatcttcaatgaatcgttctgggaaggtttggacggcgtcacaaatgctttggacaatgtggaagccagaacttacgttgatcgacgatgtgtctacttccgcaagcccttactggagagtggcactctgggcactaaaggcaacacgcaagttgtgctcccccatctgaccgagtcttattcctcgtctcaagatccgccggagatttcgttcccgatgtgtactctcagaagcttccccaacaaaatcgagcacaccattgcttgggctcgtgaactttttgagacgtcatttgtcaagtctgcagagactgtcaatctgtacttgacccagcctaactatttggagactactttgaaacaaggtggcaatgaaaagcctacgctggaggttatccgagattaccttgtgacggacaagccactcagcttcgaggactgcattatttgggcccgtatgctattcgagaaacaatacaacaacgccattcaacagctattgtataactttcccaaggattccacatcttcaactggcacgcctttctggtcgggtcccaaacgagcacctgacgcattgaagttcaacccgaaaaatgcgacacacttcggattcatcgtggctgctgctaatcttcatgctttcaactacaacattaatactaaaggagttgataaagagctctatgcgaaggtgttggacaacatgatcgtgcctgacttttctcctgacgccaatgtcaagatccaggccaacgacagcgatcccgatccgaatgccactaagggatcggcctttgatgacaacgacgagttacaaaagattattgacactcttcctgccgctaacacattggccggattcaagttgacgcccgtagaatttgagaaggatgatgatacaaaccaccatattgatttcatcacctttgccagcaacttgcgagctgagaactacaagatcgagcaagccgatagacacaagacgaagttcatcgcaggcaagatcatccccgccatcgccaccactacggctttggtgaccggtttggtaatccttgaactgtataagatcgtggatggcaaagacgatattgagcagtacaagaacggatttatcaaccttgctcttccgttcttcggcttcagcgagccaattgccagcccgaaagtcgagtaccaaggacctgacggtaaagtgactttggacaagatatgggatcgtttcgagatggacaatgtgactctcaatgaactccttgcgactttcgagaagcgcggtctgaccatttccatgcttagctcgggagtaagcttgctttatgccagcttcttcccgccagccaaacgaaaggagaggggaggattaaagttaagcgagcttgtcgagacggtatccaagaagcctatccccgaccaccagaaagaagtcatcttcgagatggtagccgaagacatgaaggaagaggatgtcgaggtgccctatatcaaggtcaaggtccggtga

SEQ ID NO: 34527 - protein, 1134 aa, Muscodor strobelii
  misc_feature: SGI Peptide ID NO. 571936
  misc_feature (540)..(685): Pfam Id: PF00899 Pfam Desc: ThiF family
  misc_feature (144)..(278): Pfam Id: PF00899 Pfam Desc: ThiF family
  misc_feature (1001)..(1129): Pfam Id: PF09358 Pfam Desc: Ubiquitin-activating enzyme e1 C-terminal domain
  misc_feature (927)..(995): Pfam Id: PF02134 Pfam Desc: Repeat in ubiquitin-activating (UBA) protein
  misc_feature (827)..(886): Pfam Id: PF02134 Pfam Desc: Repeat in ubiquitin-activating (UBA) protein
  misc_feature (144)..(177): Pfam Id: PF00899 Pfam Desc: ThiF family
  misc_feature (827)..(876): Pfam Id: PF02134 Pfam Desc: Repeat in ubiquitin-activating (UBA) protein
  misc_feature (102)..(1134): NCBI GI: 171688428 Blast Desc: protein product [Podospora anserina] gi|170944176|emb|CAP70286.1| protein product [Podospora anserina]
  misc_feature (102)..(1134): NCBI GI: 85078281 Blast Desc: ubiquitin-activating enzyme E1 1 [Neurospora crassa OR74A] gi|28917192|gb|EAA26907.1| ubiquitin-activating enzyme E1 1 [Neurospora crassa OR74A] gi|40882254|emb|CAF06079.1| ligase
  misc_feature (93)..(1132): NCBI GI: 261352275 Blast Desc: conserved [Verticillium albo-atrum VaMs.102]
  misc_feature (103)..(1134): NCBI GI: 39951533 Blast Desc: conserved [Magnaporthe grisea 70-15] gi|145020759|gb|EDK04888.1| conserved [Magnaporthe grisea 70-15]
  misc_feature (93)..(1134): NCBI GI: 116196604 Blast Desc: CHGG_04900 [Chaetomium globosum CBS 148.51] gi|88180813|gb|EAQ88281.1| CHGG_04900 [Chaetomium globosum CBS 148.51]
  misc_feature (103)..(1133): NCBI GI: 46136347 Blast Desc: FG09689.1 [Gibberella zeae PH-1]
  misc_feature (93)..(1133): NCBI GI: 256726798 Blast Desc: [Nectria haematococca mpVI 77-13-4]
  misc_feature (105)..(1133): NCBI GI: 156049105 Blast Desc: SS1G_08259 [Sclerotinia sclerotiorum 1980] gi|154692658|gb|EDN92396.1| SS1G_08259 [Sclerotinia sclerotiorum 1980]
  misc_feature (51)..(1127): NCBI GI: 67523437 Blast Desc: AN2174.2 [Aspergillus nidulans FGSC A4] gi|40745062|gb|EAA64218.1| AN2174.2 [Aspergillus nidulans FGSC A4]
  misc_feature (93)..(1134): NCBI GI: 259487554 Blast Desc: TPA: E1 ubiquitin activating enzyme (Eurofung) [Aspergillus nidulans FGSC A4]
  misc_feature: Useful for introducing or modulating the production of volatile compounds
MVGLPSSSDQPYLSIADPTRIFLFPCLYAVFCPSCNATPHSHPHRPRSPAARRDLLTPPSVVTTAKIPSHEHDKVGKRKLSNGDLPFSPKRTMTDTKMAAGDKVDLVTRVQVDDSVVSHHTEIDESLYSRQLYVLGHEAMKRMGASNVLIVGLKGLGVEIAKNIALAGVKSLTLYDPTPAAIADLSSQFFLHPEDVGQPRDAVTAPRVAELNAYTPVHIHQSSSLVENLSQFDKYQVVVLTNQPLQDQLVIGDYCHTKGIYVVSASTYGLFGSIFCDFGDKFTCIDPTGENPLNGIIAGIDEDGLVSALDETRHGLTDGDYVTFSEVEGMEGLNGAEPRKVTVKGPYTFSIGDVSGLGQYKRGGLYQQVKMPAIIDFKSISSSIRDPEFVFSDFAKFDRPQLLHVAFEALNAFVQSQGRPPRPMNKEDAAVLIGSVKAFAEKEKIEIEIGEKEEKIIQELSFQAQGDLNPMAALFGGLAAQEVLKAVSGKFHPMKQWFYFDSLESLPTSCARTEELCKPTETRYDGQIAVFGKEYQDKIANLTQFLVGAGAIGCEMLKNWAMIGLGVGPKGKIIITDMDSIEKSNLNRQFLFRAKDVGQMKSDCAAKAVAAMNPELNGHIECLKDRVSNETEHIFNESFWEGLDGVTNALDNVEARTYVDRRCVYFRKPLLESGTLGTKGNTQVVLPHLTESYSSSQDPPEISFPMCTLRSFPNKIEHTIAWARELFETSFVKSAETVNLYLTQPNYLETTLKQGGNEKPTLEVIRDYLVTDKPLSFEDCIIWARMLFEKQYNNAIQQLLYNFPKDSTSSTGTPFWSGPKRAPDALKFNPKNATHFGFIVAAANLHAFNYNINTKGVDKELYAKVLDNMIVPDFSPDANVKIQANDSDPDPNATKGSAFDDNDELQKIIDTLPAANTLAGFKLTPVEFEKDDDTNHHIDFITFASNLRAENYKIEQADRHKTKFIAGKIIPAIATTTALVTGLVILELYKIVDGKDDIEQYKNGFINLALPFFGFSEPIASPKVEYQGPDGKVTLDKIWDRFEMDNVTLNELLATFEKRGLTISMLSSGVSLLYASFFPPAKRKERGGLKLSELVETVSKKPIPDHQKEVIFEMVAEDMKEEDVEVPYIKVKVR

SEQ ID NO: 34528 - DNA, 3856 bp, Muscodor strobelii
  misc_feature: SGI EST ID NO. CUFF.82621.1
  misc_feature: Variant of the nucleotide sequence at SEQ ID NO 34526
cctcagtcgatggtggggttgcctagcagcagcgaccagccttacctaaggtacaacctggaaggcgggcgcagcaactgacattgtccatgcaccagcatcgccgacccgactcgcatctttttgtttccctgcctctacgccgtcttctgcccgtcttgtaacgcaacaccacattcccatccccatcgaccacgctctccggcagcccgccgagatctcctcaccccaccatccgtcgtcacaaccgccaagattccctcccacgaacacgacaaggtggggaagcgcaaactctctaacggagatctccccttctcccccaagagaactatgaccgacaccaagatggccgcgggtgataaggtcgacctggtcactcgggtccaggtcgatgactcggtggtctcccatcataccgagatcgacgagtccctctacagccggcagctctacgtcctgggccacgaggccatgaagcgcatgggagcttccaatgtcctcatagttggcctcaagggcctgggcgtcgagatagccaagaacatcgctcttgctggcgtcaagagcctgactctctacgatcccacccccgctgccatcgccgacctctcctcccagttcttcctccaccccgaagacgtcggccagccccgcgacgctgtcactgcgccccgcgttgccgagctcaacgcctatacccccgtccatatccatcagtcctcaagtctcgtcgagaacctctcccagttcgacaagtatcaggtagtagtcctcaccaaccagcccctgcaggatcagctcgtcattggcgactactgccacactaagggcatctatgtcgtatctgccagcacgtacggtctgttcggctccatcttctgcgatttcggcgacaagttcacatgcatcgaccccaccggcgagaaccctctgaatggcatcattgccggtatcgacgaagacggtctggtgtccgccttggatgaaacccgacacggtctgacagatggcgactatgtcaccttctctgaggtcgaaggtatggagggtctcaatggtgctgagccccggaaagtcaccgtcaagggaccttacacattctccattggtgacgtatccggcctgggccaatacaagcgaggcggtctataccagcaggtcaagatgcccgctatcattgacttcaagtctatttcctcatcaatcagagacccggaatttgttttctcagattttgccaaattcgaccggcctcagttactacacgtcgcattcgaggcgcttaacgcatttgtacagtcgcaaggccgtcctcctcgacctatgaataaagaggatgctgccgtgctgattggctccgtaaaggcctttgccgagaaggagaaaattgagatcgagattggcgagaaagaagagaagatcatccaggaattaagtttccaggcgcaaggagacctaaatcccatggccgccctcttcggtggccttgctgcacaagaagtcctcaaggccgtttctggcaagttccaccctatgaagcagtggttctattttgattcattagaatctctgcctactagctgtgccaggacagaagaattgtgtaagcctactgaaacacggtatgacggtcaaattgcagtcttcggtaaggagtaccaagataagattgccaacttgacgcagttcctcgtcggcgctggtgctattggatgcgagatgttgaagaactgggctatgattggtcttggcgttggtcccaaaggcaagatcattatcaccgatatggactccatcgagaagagcaaccttaatcgccagttcttgttcagggccaaggacgttggccaaatgaagagcgattgcgctgccaaggcagttgcggccatgaaccccgagctgaatggtcacatcgagtgcttaaaagatcgcgttagtaacgagactgagcacatcttcaatgaatcgttctgggaaggtttggacggcgtcacaaatgctttggacaatgtggaagccagaacttacgttgatcgacgatgtgtctacttccgcaagcccttactggagagtggcactctgggcactaaaggcaacacgcaagttgtgctcccccatctgaccgagtcttattcctcgtctcaagatccgccggagatttcgttcccgatgtgtactctcagaagcttccccaacaaaatcgagcacaccattgcttgggctcgtgaactttttgagacgtcatttgtcaagtctgcagagactgtcaatctgtacttgacccagcctaactatttggagactactttgaaacaaggtggcaatgaaaagcctacgctggaggttatccgagattaccttgtgacggacaagccactcagcttcgaggactgcattatttgggcccgtatgctattcgagaaacaatacaacaacgccattcaacagctattgtataactttcccaaggattccacatcttcaactggcacgcctttctggtcgggtcccaaacgagcacctgacgcattgaagttcaacccgaaaaatgcgacacacttcggattcatcgtggctgctgctaatcttcatgctttcaactacaacattaatactaaaggagttgataaagagctctatgcgaaggtgttggacaacatgatcgtgcctgacttttctcctgacgccaatgtcaagatccaggccaacgacagcgatcccgatccgaatgccactaagggatcggcctttgatgacaacgacgagttacaaaagattattgacactcttcctgccgctaacacattggccggattcaagttgacgcccgtagaatttgagaaggatgatgatacaaaccaccatattgatttcatcacctttgccagcaacttgcgagctgagaactacaagatcgagcaagccgatagacacaagacgaagttcatcgcaggcaagatcatccccgccatcgccaccactacggctttggtgaccggtttggtaatccttgaactgtataagatcgtggatggcaaagacgatattgagcagtacaagaacggatttatcaaccttgctcttccgttcttcggcttcagcgagccaattgccagcccgaaagtcgagtaccaaggacctgacggtaaagtgactttggacaagatatgggatcgtttcgagatggacaatgtgactctcaatgaactccttgcgactttcgagaagcgcggtctgaccatttccatgcttagctcgggagtaagcttgctttatgccagcttcttcccgccagccaaacgaaaggagaggggaggattaaagttaagcgagcttgtcgagacggtatccaagaagcctatccccgaccaccagaaagaagtcatcttcgagatggtagccgaagacatgaaggaagaggatgtcgaggtgccctatatcaaggtcaaggtccggtgagcaaactaccagtcatgaaaggcatcacttggagttattagagctatttgattatgaataaagccgggcaataccgtattctatgctcaagtatgattattatgacttccaaactatgcaaaagcttggagtcaaaagagaatgaaggagtcaagactggggagtgtagtgaacgtttttgtgttattttaggtctggttggctgtaaacctccatgtcgaaaaagcggcgaaagcgatcgagtgaacgcgtgcagaaggcagagttatacaatgactcatacaccaaatcagaagtgatcaggctattacattattccgatggtcatctactgacaagaacaattactgcttcgtcataccaaggctgctgaggtgaaagaaatgatccaacg

SEQ ID NO: 34529 - DNA, 1161 bp, Muscodor strobelii
  misc_feature: SGI cDNA ID NO. 571937
  misc_feature: Encodes the peptide sequence at SEQ ID NO 34530
atgccccgaataacgaatcttcctgctgagttgatggcagcagtactggggaaacttgacagtattcgtcatctcccgccctcgctcctcacgtgcaggcatttctacacttcctacaccgagtgtcctaggattgcagaggacatcataatgaatcagatcacacccgctcttctaccatattcgattgccgtgtttgaagcatctcgcttagcgaagtcatgcactgctgcttctgcccataaaatcatcaacctgctctatgaggagccggcgcaattgacatcccggacaaagaccatgcgcctagctgagcttgtagctatcggacacttacacgacgtaatacatgcatttacaatagatttcatgcgccaggcttggtcgcatctgtctcaagatgatctttcattttccgtttcggagtactctcgagtttgtcgagctttctatcgggttgaactattcttcaacctttttcgtaccaacccaggagctatcagccaagggagcgagaaacgcttgtttgtcaataaacatccgccgtgggtaaacgagcagttaggctgtgttcatgattttctcgaaagagaattgtccaaaggcattttcgattttgtttctcaagatatcgaatttggagaagtgtcagtcgattacatgactaacggcggtgaaaactattggaagcaacagtggggggtgatgttgaaatctgtgttgaattcccctggagccaaacttcacgatgcgctcaatgcagaatatgacaacgatcctttcaacggccttctgcttggagactacagcgacgatgaactaaagctactagccctagacgattacggagacgacatggacactggcccatacacagcctggcatactgctcatgtgcatctccccgcctgtggatgggtagtgttcccggataacagtgggcaacgggaacgtgcctatgtgctttgggattgggatcgcataaagaaatatgatttgctagacaagtttgcggatgcagttgaggctacgggtgctgggcaaggtgatgttgaagcaatgaagcactcgttcaaggaacgatctagaatatggcagcaaggtggaaagggttattggatcaaaggagacaacagcagaatacagtcgtcggcagactga

SEQ ID NO: 34530 - protein, 386 aa, Muscodor strobelii
  misc_feature: SGI Peptide ID NO. 571937
  misc_feature (7)..(382): NCBI GI: 238845280 Blast Desc: conserved [Microsporum canis CBS 113480]
  misc_feature (3)..(204): NCBI GI: 240109431 Blast Desc: CPC735_029360 [Coccidioides posadasii C735 delta SOWgp]
  misc_feature (60)..(334): NCBI GI: 238841616 Blast Desc: conserved [Microsporum canis CBS 113480]
  misc_feature (3)..(334): NCBI GI: 119182895 Blast Desc: [Coccidioides immitis RS]
  misc_feature (7)..(379): NCBI GI: 159123500 Blast Desc: AFUB_080550 [Aspergillus fumigatus A1163]
  misc_feature (7)..(378): NCBI GI: 119485841 Blast Desc: NFIA_100030 [Neosartorya fischeri NRRL 181] gi|119410419|gb|EAW20366.1| conserved [Neosartorya fischeri NRRL 181]
  misc_feature (7)..(379): NCBI GI: 70983990 Blast Desc: AFUA_8G07220 [Aspergillus fumigatus Af293] gi|66845146|gb|EAL85482.1| AFUA_8G07220 [Aspergillus fumigatus Af293]
  misc_feature (2)..(350): NCBI GI: 258571307 Blast Desc: [Uncinocarpus reesii 1704] gi|237904727|gb|EEP79128.1| [Uncinocarpus reesii 1704]
  misc_feature (101)..(222): NCBI GI: 154294559 Blast Desc: [Botryotinia fuckeliana B05.10] gi|150844722|gb|EDN19915.1| [Botryotinia fuckeliana B05.10]
  misc_feature (3)..(220): NCBI GI: 258567816 Blast Desc: [Uncinocarpus reesii 1704] gi|237906098|gb|EEP80499.1| [Uncinocarpus reesii 1704]
MPRITNLPAELMAAVLGKLDSIRHLPPSLLTCRHFYTSYTECPRIAEDIIMNQITPALLPYSIAVFEASRLAKSCTAASAHKIINLLYEEPAQLTSRTKTMRLAELVAIGHLHDVIHAFTIDFMRQAWSHLSQDDLSFSVSEYSRVCRAFYRVELFFNLFRTNPGAISQGSEKRLFVNKHPPWVNEQLGCVHDFLERELSKGIFDFVSQDIEFGEVSVDYMTNGGENYWKQQWGVMLKSVLNSPGAKLHDALNAEYDNDPFNGLLLGDYSDDELKLLALDDYGDDMDTGPYTAWHTAHVHLPACGWVVFPDNSGQRERAYVLWDWDRIKKYDLLDKFADAVEATGAGQGDVEAMKHSFKERSRIWQQGGKGYWIKGDNSRIQSSAD

SEQ ID NO: 34531 - DNA, 772 bp, Muscodor strobelii
  misc_feature: SGI EST ID NO. CUFF.82090.0
  misc_feature: Variant of the nucleotide sequence at SEQ ID NO 34529
gaagcaacagtggttgtcgcaagggctttttttcatagaccgtgtgctacatcaaagctcgattgatgctcagggggtgatgttgaaatctgtgttgaattcccctggagccaaacttcacgatgcgctcaatgcagaatatgacaacgatcctttcaacggccttctgcttggagactacagcgacgatgaactaaagctactagccctagacgattacggagacgacatggacactggcccatacacagcctggcatactgctcatgtgcatctccccgcctgtggatgggtagtgttcccggataacagtgggcaacgggaacgtgcctatgtgctttgggattgggatcgcataaagaaatatgatttgctagacaagtttgcggatgcagttgaggctacgggtgctgggcaaggtgatgttgaagcaatgaagcactcgttcaaggaacgatctagaatatggcagcaaggtggaaagggttattggatcaaaggagacaacagcagaatacagtcgtcggcagactgatttgtagaatttccacagattcgagcattagacaaattgatattgagtataggtcatagtgtgttcgtccttatccgaaatacgtacgaaatgcgtgcgcatccgaccctcctctcgcatacagtagttgatactaagtataggttggtagtgcttcctttcgtattaataggacaattacagagagagaaaatggaaatattagtgttcgcaaatcttttcgccgatatttttttc

SEQ ID NO: 34532 - DNA, 1131 bp, Muscodor strobelii
  misc_feature: SGI cDNA ID NO. 571938
  misc_feature: Reduced expression when VOC is produced
  misc_feature: Encodes the peptide sequence at SEQ ID NO 34533
atggtgagtttcgttgacattatggcctttcccccatcatttccgcattatcctacacgcatcatctcatttacttgttctactctccaccaaatctctcaaagatgtgtcagacgattactgatcaggcaacaggcatcgaaaatcacagaatgggtcaagccagacgataaatcaggcgaatttaagcgccaaagtagcacgttccgggactggatctgcgatgagccggactccaagtatccgcctgagaagggacggtatcatttgtttgttagctatgcttgtccttgggcccatcgaactctcatcgctaggaagctgaagggtcttgaggaatatatctcatttactgttgtgcattggcacatgggagagaaaggatggcgttttgacttgggggggactgatgaagttggccctgacccgttgcccggtcacgaatcatacacccacctacgagatctctacttcgcagtcgaaccagactacagcggtcgtttcacggttccagtgctgttcgacaaaaagaccaacacaatcatcaacaacgaatccagcgagatcctccgcatgttaggtacggtgttcaacaaacacctgcccgaacagtacgccaaggtcgacctatatcccgaggcactaagaccgcagatcgacgaagctggtgaatggacgtacgacaagatcaacaacggagtgtataagagcgggttcgctacgacgcaggaggcgtatgagaagaatgtccaggcgctgtttgagagtttggatagggctgagaaggtattgagtgaaagtaaaggggatttcttctttggtgatgttttgacggagactgatgtcaggctatacgtaacgatgatccgcttcgaccctgtctacgtccagcacttcaagtgcaacatcaaagatgttcgttctggatacccacacatccacaaatggttgcgaaacctctactggaattatcctgcgttcaaggatacgacgaacttcttgcatattaagaatcactataccaagagccacccacaaatcaacccgcatgcaatcacacctgttggaccgttgccgaatatcttgccccttgatgaggaggttactgctgctcaggttgcgaagttgtag

SEQ ID NO: 34533 - protein, 376 aa, Muscodor strobelii
  misc_feature: SGI Peptide ID NO. 571938
  misc_feature (43)..(375): NCBI GI: 39951535 Blast Desc: MGG_01410 [Magnaporthe grisea 70-15] gi|145020758|gb|EDK04887.1| MGG_01410 [Magnaporthe grisea 70-15]
  misc_feature (49)..(374): NCBI GI: 256726799 Blast Desc: [Nectria haematococca mpVI 77-13-4]
  misc_feature (40)..(364): NCBI GI: 46136345 Blast Desc: FG09688.1 [Gibberella zeae PH-1]
  misc_feature (36)..(372): NCBI GI: 67523437 Blast Desc: AN2174.2 [Aspergillus nidulans FGSC A4] gi|40745062|gb|EAA64218.1| AN2174.2 [Aspergillus nidulans FGSC A4]
  misc_feature (46)..(372): NCBI GI: 259487553 Blast Desc: TPA: glutathione S-transferase (Eurofung) [Aspergillus nidulans FGSC A4]
  misc_feature (45)..(374): NCBI GI: 145251237 Blast Desc: An15g06030 [Aspergillus niger] gi|134082662|emb|CAK42556.1| protein product [Aspergillus niger]
  misc_feature (49)..(375): NCBI GI: 255953109 Blast Desc: Pc21g02430 [Penicillium chrysogenum Wisconsin 54-1255] gi|211589018|emb|CAP95140.1| Pc21g02430 [Penicillium chrysogenum Wisconsin 54-1255]
  misc_feature (47)..(375): NCBI GI: 121716621 Blast Desc: conserved [Aspergillus clavatus NRRL 1] gi|119404018|gb|EAW14435.1| conserved [Aspergillus clavatus NRRL 1]
  misc_feature (47)..(375): NCBI GI: 115388251 Blast Desc: ATEG_02453 [Aspergillus terreus NIH2624] gi|114195715|gb|EAU37415.1| ATEG_02453 [Aspergillus terreus NIH2624]
  misc_feature (39)..(375): NCBI GI: 238488609 Blast Desc: cell wall biogenesis protein/glutathione transferase (Gto1), [Aspergillus flavus NRRL3357] gi|220697930|gb|EED54270.1| cell wall biogenesis protein/glutathione transferase (Gto1),
  misc_feature (47)..(361): SWISSPROT Homolog: EC 2.5.1.18 Glutathione transferase
  misc_feature: Useful for introducing or modulating the production of volatile compounds
MVSFVDIMAFPPSFPHYPTRIISFTCSTLHQISQRCVRRLLIRQQASKITEWVKPDDKSGEFKRQSSTFRDWICDEPDSKYPPEKGRYHLFVSYACPWAHRTLIARKLKGLEEYISFTVVHWHMGEKGWRFDLGGTDEVGPDPLPGHESYTHLRDLYFAVEPDYSGRFTVPVLFDKKTNTIINNESSEILRMLGTVFNKHLPEQYAKVDLYPEALRPQIDEAGEWTYDKINNGVYKSGFATTQEAYEKNVQALFESLDRAEKVLSESKGDFFFGDVLTETDVRLYVTMIRFDPVYVQHFKCNIKDVRSGYPHIHKWLRNLYWNYPAFKDTTNFLHIKNHYTKSHPQINPHAITPVGPLPNILPLDEEVTAAQVAKL

SEQ ID NO: 34534 - DNA, 4852 bp, Muscodor strobelii
  misc_feature: SGI EST ID NO. CUFF.82556.2
  misc_feature: Variant of the nucleotide sequence at SEQ ID NO 34532
ttacgacctctaaataagggagtttgcaagaattagagtaaaacaattactgttctgattggccgtaatttgtaggcttacatacacatatgtactcagtgatccagattctagaccgtgatagaggatagagtcggagagtcgtactgacgccacgatactacggtgctagcttgcatgtagtactatattaaccgcttctccccgcctacgaggggtatcgcaagttcgcatgtcaaacagagctattgccagagcttcgacttttcgtctgtcggcaaagagtttcaattcaagcagaggattctgtcgagcgccgaacagctattctgtcagtggtccacgcacatatataccatccgcacggagtatagttggagtttctcgatttcacacgcagacgaaaatggcatcgaaaatcacagaatgggtcaagccagacgataaatcaggcgaatttaagcgccaaagtagcacgttccgggactggatctgcgatgagccggactccaagtatccgcctgagaagggacggtatcatttgtttgttagctatgcttgtccttgggcccatcgaactctcatcgctaggaagctgaagggtcttgaggaatatatctcatttactgttgtgcattggcacatgggagagaaaggatggcgttttgacttgggggggactgatgaagttggccctgacccgttgcccggtcacgaatcatacacccacctacgagatctctacttcgcagtcgaaccagactacagcggtcgtttcacggttccagtgctgttcgacaaaaagaccaacacaatcatcaacaacgaatccagcgagatcctccgcatgttaggtacggtgttcaacaaacacctgcccgaacagtacgccaaggtcgacctatatcccgaggcactaagaccgcagatcgacgaagctggtgaatggacgtacgacaagatcaacaacggagtgtataagagcgggttcgctacgacgcaggaggcgtatgagaagaatgtccaggcgctgtttgagagtttggatagggctgagaaggtattgagtgaaagtaaaggggatttcttctttggtgatgttttgacggagactgatgtcaggctatacgtaacgatgatccgcttcgaccctgtctacgtccagcacttcaagtgcaacatcaaagatgttcgttctggatacccacacatccacaaatggttgcgaaacctctactggaattatcctgcgttcaaggatacgacgaacttcttgcatattaagaatcactataccaagagccacccacaaatcaacccgcatgcaatcacacctgttggaccgttgccgaatatcttgccccttgatgaggaggttactgctgctcaggttgcgaagttgtagagaaataagcaagaacttgctgatacttctgtaatcattctgctaaatctagtagtattcataatctgtactcacttaatgaatcgttacgtcttgttgggtattcagatagactgaatcacagagtgacgttccaatgcatgattcatgaaatttggttcattcatttttcctaatttcaaaatcgcgatatctttatacattcaccgcctctagtcccgttctatctcctcctcttcccaccaccgccctccgcgtcacctttcctcttcctaccctcacgcttccagtactcttgtttctcgcgtttctccctagcctccttcttctcaccagcatctgccatcttcttcctaaactcaacacgtttctcttccttcttcgcccgacgcttcgcaacagtatcctttcgaatggtggtgagcttttgcatgagatccctggcgcgcttctcctcgccaccaaggacaactgcgcgcttctgcatgtacgtagtcttcttctgaggtttggtgcgtacaatctgtgatttgaatggaagatctgctgcaagttgccgaggtacgcggagaggattgaagtggcgtgtagcgcgctcaatgggccgatatttgctgtctgccagttgtggcgttgcgatgccctgttcgcggcgtacttctcccgtaagacgcatgggctgccagtctccaagtaagtccgtcacagggttgtagaaccggcgtggcttgacagggtaccaggctcgtaagaagaccagatctcccatgagaatcttgtcctcaaacgttgcacggaaatgaccctctggcttggaaagagcacgtttgatttgacccctgatgccactcacggttttgatggaagccccttcaaattttgcgatctcaaggctggtattgaacatatccttgatgaaagcagtgtttttatacaccttggccggtgtaccggtcagtttcagtttcttgacaatctccgtagacgagtctacgctcaagatcgttcccgtcgctgctatccggaaacctggattctcggacgagaaggattggaagcatacgaaactcgagtttggcgaaaccagagggccatggaaggtggcgtaacagaacgaatgctctggggagtatttgagcattctgtgccgaactcgttcttcccaagagtggagcgtgggtatggcttgaaatcgcctccaacccgcagagaaaatgagcgggtcgttgttcttgaggatccgtttgtgccatctgtgctttctcaaccgcacctgggaaaatccaaatctctcttccaaagcactcaatccaccaaggatcatgggcttgtgggcatcaaaattggcaacaaattccgcaggcacccgatcaagaaccacgcgtacgtatataccggcttggtaaccttcaacagttagcctctgccgctcatcgaggccttcaaattcagctttgttaatctgtcaatcaagatcagtacatgagctgtcgagtcgatcgctgattgccatgaaactcacatcaagttgcttttgcatggcggccttttgcgattcataccaatcgtcctctccgaactcttctccatgaggatctcgtccattggctttgccatcccggtcttcctcttcaaagcgaagtttgagctcttcctttcgggcggcatttttcgctcgttctgcctctagtgattcggctggttcagctgcttcggcttggtctgattcaggcttttcatcggcctcaagatcttcgaattcgccccaaccctccatttcttcatcatttgcttcgccatcttcattgtcatcaccatcgtcgccaaagcctccgaagccatcattgtcatcacctttatcacgattgccacctgatgtgaaacgttggcggagcctctcaatgttttcttccacggaccattttaccgctagctgatcgtagtcgtccggtgacaacttaggaacgggcgtgctttcgaagtattcgtcgctatttttgtttttagacttgaagaattcgtcgtcgtctgagtcgtcttcaatgttctcttcctctacttcgtccttccacctctgtaagacttcaggtgccgtcaggttcaaatcgtacatcaactttgcgaggtcagcagttcggtacgacggccgatttgcgtggagagctttggctttctcggtgagattggtacgccatctagcgtccagctcctcgtctccgtcctcgtcttctgcttcttctccaccaatgtccacatcggatcctagatcagaatcgctgtccgcaaacgcgagatcctctccgtcctcgccatcttggtccttaaatagggtgccaagtctattttcgtcgaaatcggatccttcttcctcatcaccgctcgcgagatcgtcatcatcggaaagatcgtttccgtctacgtcaatatcctgtgcatcgttttgttcaatgactcttgctttacgttgagactttcgtccggtgtcctcaacttcagggctcggtgcgtcgattaggcgatctcccccgcggaagagttgtatgctatcgtcggtttgaccaagcagcctcctttcgccttgcagggacatgatcagctcttcacccagaccacgttcaacgccacccgcgtccttgtcgaagctgaaccctttttctctggtgatgaaaatagcatcaccatcaatcttgagtccactacgatctgaaaacggtgcatgaagtcgtttatccttttcatctaaccgttttctgccggtcttgcccgtagctttagctaccatttgctgctgagctggggaagggcaggggtcaggtaaagcctcgacgtgatttgccgtaaaatcgccaacgcccggaacgtgaattcgctgatgctctttgttgaagttgacgcctcctcgaagatagccgcacaatgcgatggttctgtcgcagttctcgtcttcctccttttgagttgggtgcgtaatatcgcgaaagctatcaatcaagcaataagtgtggctgtttttgaagataagcggacgaggatttttcataacggagagaaaccgagacatgttgtggatttctcgatccggatatctcccgttgatgacgccggagaggtagaacaggtgagcaccttggtacagctcgttccacagtctgtgcttgagtcgtttctttgcatctttcaattgttggggttttcggaaaaggtcaaggtgggtgaggatggaaaagacattgccaggcattccggtagccgtcaaaatgttgagaaactccatagtctccatttcaaagccgaaattgccgtcgatcaggagcaagacgacatcggcaatttttgcgacatcgaccatggcagtcagggagttgggacattcgaagaaggtgagtctctgctttctcgaggtaatgactgtgatagggccggtaggctcagatagagactcttttg

SEQ ID NO: 34535 - DNA, 999 bp, Muscodor strobelii
  misc_feature: SGI cDNA ID NO. 571939
  misc_feature: Reduced expression when VOC is produced
  misc_feature: Encodes the peptide sequence at SEQ ID NO 34536
atggcatcgaaaatcacagaatgggtcaagccagacgataaatcaggcgaatttaagcgccaaagtagcacgttccgggactggatctgcgatgagccggactccaagtatccgcctgagaagggacggtatcatttgtttgttagctatgcttgtccttgggcccatcgaactctcatcgctaggaagctgaagggtcttgaggaatatatctcatttactgttgtgcattggcacatgggagagaaaggatggcgttttgacttgggggggactgatgaagttggccctgacccgttgcccggtcacgaatcatacacccacctacgagatctctacttcgcagtcgaaccagactacagcggtcgtttcacggttccagtgctgttcgacaaaaagaccaacacaatcatcaacaacgaatccagcgagatcctccgcatgttaggtacggtgttcaacaaacacctgcccgaacagtacgccaaggtcgacctatatcccgaggcactaagaccgcagatcgacgaagctggtgaatggacgtacgacaagatcaacaacggagtgtataagagcgggttcgctacgacgcaggaggcgtatgagaagaatgtccaggcgctgtttgagagtttggatagggctgagaaggtattgagtgaaagtaaaggggatttcttctttggtgatgttttgacggagactgatgtcaggctatacgtaacgatgatccgcttcgaccctgtctacgtccagcacttcaagtgcaacatcaaagatgttcgttctggatacccacacatccacaaatggttgcgaaacctctactggaattatcctgcgttcaaggatacgacgaacttcttgcatattaagaatcactataccaagagccacccacaaatcaacccgcatgcaatcacacctgttggaccgttgccgaatatcttgccccttgatgaggaggttactgctgctcaggttgcgaagttgtag

SEQ ID NO: 34536 - protein, 332 aa, Muscodor strobelii
  misc_feature: SGI Peptide ID NO. 571939
  misc_feature (2)..(331): NCBI GI: 39951535 Blast Desc: MGG_01410 [Magnaporthe grisea 70-15] gi|145020758|gb|EDK04887.1| MGG_01410 [Magnaporthe grisea 70-15]
  misc_feature (5)..(330): NCBI GI: 256726799 Blast Desc: [Nectria haematococca mpVI 77-13-4]
  misc_feature (2)..(320): NCBI GI: 46136345 Blast Desc: FG09688.1 [Gibberella zeae PH-1]
  misc_feature (1)..(328): NCBI GI: 67523437 Blast Desc: AN2174.2 [Aspergillus nidulans FGSC A4] gi|40745062|gb|EAA64218.1| AN2174.2 [Aspergillus nidulans FGSC A4]
  misc_feature (1)..(328): NCBI GI: 259487553 Blast Desc: TPA: glutathione S-transferase (Eurofung) [Aspergillus nidulans FGSC A4]
  misc_feature (2)..(330): NCBI GI: 145251237 Blast Desc: An15g06030 [Aspergillus niger] gi|134082662|emb|CAK42556.1| protein product [Aspergillus niger]
  misc_feature (5)..(331): NCBI GI: 255953109 Blast Desc: Pc21g02430 [Penicillium chrysogenum Wisconsin 54-1255] gi|211589018|emb|CAP95140.1| Pc21g02430 [Penicillium chrysogenum Wisconsin 54-1255]
  misc_feature (3)..(331): NCBI GI: 121716621 Blast Desc: conserved [Aspergillus clavatus NRRL 1] gi|119404018|gb|EAW14435.1| conserved [Aspergillus clavatus NRRL 1]
  misc_feature (3)..(331): NCBI GI: 115388251 Blast Desc: ATEG_02453 [Aspergillus terreus NIH2624] gi|114195715|gb|EAU37415.1| ATEG_02453 [Aspergillus terreus NIH2624]
  misc_feature (2)..(331): NCBI GI: 238488609 Blast Desc: cell wall biogenesis protein/glutathione transferase (Gto1), [Aspergillus flavus NRRL3357] gi|220697930|gb|EED54270.1| cell wall biogenesis protein/glutathione transferase (Gto1),
  misc_feature (3)..(317): SWISSPROT Homolog: EC 2.5.1.18 Glutathione transferase
  misc_feature: Useful for introducing or modulating the production of volatile compounds
MASKITEWVKPDDKSGEFKRQSSTFRDWICDEPDSKYPPEKGRYHLFVSYACPWAHRTLIARKLKGLEEYISFTVVHWHMGEKGWRFDLGGTDEVGPDPLPGHESYTHLRDLYFAVEPDYSGRFTVPVLFDKKTNTIINNESSEILRMLGTVFNKHLPEQYAKVDLYPEALRPQIDEAGEWTYDKINNGVYKSGFATTQEAYEKNVQALFESLDRAEKVLSESKGDFFFGDVLTETDVRLYVTMIRFDPVYVQHFKCNIKDVRSGYPHIHKWLRNLYWNYPAFKDTTNFLHIKNHYTKSHPQINPHAITPVGPLPNILPLDEEVTAAQVAKL

SEQ ID NO: 34537 - DNA, 4852 bp, Muscodor strobelii; identical to SEQ ID NO: 34534
  misc_feature: SGI EST ID NO. CUFF.82556.2
  misc_feature: Variant of the nucleotide sequence at SEQ ID NO 34535

SEQ ID NO: 34538 - DNA, 3432 bp, Muscodor strobelii
  misc_feature: SGI cDNA ID NO. 571940
  misc_feature: Reduced expression when VOC is produced
  misc_feature: Encodes the peptide sequence at SEQ ID NO 34539
atggacgaccaagcccacaagcctcatcgaaaggctaaagagaaaaagaaacatgtcggcgatcaaaaccccaaagcctttgccttttcgcgacctggcaagcttcagagagctgctgcgcgatcccacgatatcaaggaaaagcggctccacgtccctcaagtcgatcgtctacctaacaccgaacccccgccgcgacttgttgccatcgttgggcctccaggcgtcgggaagaccactttattaaagtcgcttgtcaagagatacacaaaagagtctctatctgagcctaccggccctatcacagtcattacctcgagaaagcagagactcaccttcttcgaatgtcccaactccctgactgccatggtcgatgtcgcaaaaattgccgatgtcgtcttgctcctgatcgacggcaatttcggctttgaaatggagactatggagtttctcaacattttgacggctaccggaatgcctggcaatgtcttttccatcctcacccaccttgaccttttccgaaaaccccaacaattgaaagatgcaaagaaacgactcaagcacagactgtggaacgagctgtaccaaggtgctcacctgttctacctctccggcgtcatcaacgggagatatccggatcgagaaatccacaacatgtctcggtttctctccgttatgaaaaatcctcgtccgcttatcttcaaaaacagccacacttattgcttgattgatagctttcgcgatattacgcacccaactcaaaaggaggaagacgagaactgcgacagaaccatcgcattgtgcggctatcttcgaggaggcgtcaacttcaacaaagagcatcagcgaattcacgttccgggcgttggcgattttacggcaaatcacgtcgaggctttacctgacccctgcccttccccagctcagcagcaaatggtagctaaagctacgggcaagaccggcagaaaacggttagatgaaaaggataaacgacttcatgcaccgttttcagatcgtagtggactcaagattgatggtgatgctattttcatcaccagagaaaaagggttcagcttcgacaaggacgcgggtggcgttgaacgtggtctgggtgaagagctgatcatgtccctgcaaggcgaaaggaggctgcttggtcaaaccgacgatagcatacaactcttccgcgggggagatcgcctaatcgacgcaccgagccctgaagttgaggacaccggacgaaagtctcaacgtaaagcaagagtcattgaacaaaacgatgcacaggatattgacgtagacggaaacgatctttccgatgatgacgatctcgcgagcggtgatgaggaagaaggatccgatttcgacgaaaatagacttggcaccctatttaaggaccaagatggcgaggacggagaggatctcgcgtttgcggacagcgattctgatctaggatccgatgtggacattggtggagaagaagcagaagacgaggacggagacgaggagctggacgctagatggcgtaccaatctcaccgagaaagccaaagctctccacgcaaatcggccgtcgtaccgaactgctgacctcgcaaagttgatgtacgatttgaacctgacggcacctgaagtcttacagaggtggaaggacgaagtagaggaagagaacattgaagacgactcagacgacgacgaattcttcaagtctaaaaacaaaaatagcgacgaatacttcgaaagcacgcccgttcctaagttgtcaccggacgactacgatcagctagcggtaaaatggtccgtggaagaaaacattgagaggctccgccaacgtttcacatcaggtggcaatcgtgataaaggtgatgacaatgatggcttcggaggctttggcgacgatggtgatgacaatgaagatggcgaagcaaatgatgaagaaatggagggttggggcgaattcgaagatcttgaggccgatgaaaagcctgaatcagaccaagccgaagcagctgaaccagccgaatcactagaggcagaacgagcgaaaaatgccgcccgaaaggaagagctcaaacttcgctttgaagaggaagaccgggatggcaaagccaatggacgagatcctcatggagaagagttcggagaggacgattggtatgaatcgcaaaaggccgccatgcaaaagcaacttgatattaacaaagctgaatttgaaggcctcgatgagcggcagaggctaactgttgaaggttaccaagccggtatatacgtacgcgtggttcttgatcgggtgcctgcggaatttgttgccaattttgatgcccacaagcccatgatccttggtggattgagtgctttggaagagagatttggattttcccaggtgcggttgagaaagcacagatggcacaaacggatcctcaagaacaacgacccgctcattttctctgcgggttggaggcgatttcaagccatacccacgctccactcttgggaagaacgagttcggcacagaatgctcaaatactccccagagcattcgttctgttacgccaccttccatggccctctggtttcgccaaactcgagtttcgtatgcttccaatccttctcgtccgagaatccaggtttccggatagcagcgacgggaacgatcttgagcgtagactcgtctacggagattgtcaagaaactgaaactgaccggtacaccggccaaggtgtataaaaacactgctttcatcaaggatatgttcaataccagccttgagatcgcaaaatttgaaggggcttccatcaaaaccgtgagtggcatcaggggtcaaatcaaacgtgctctttccaagccagagggtcatttccgtgcaacgtttgaggacaagattctcatgggagatctggtcttcttacgagcctggtaccctgtcaagccacgccggttctacaaccctgtgacggacttacttggagactggcagcccatgcgtcttacgggagaagtacgccgcgaacagggcatcgcaacgccacaactggcagacagcaaatatcggcccattgagcgcgctacacgccacttcaatcctctccgcgtacctcggcaacttgcagcagatcttccattcaaatcacagattgtacgcaccaaacctcagaagaagactacgtacatgcagaagcgcgcagttgtccttggtggcgaggagaagcgcgccagggatctcatgcaaaagctcaccaccattcgaaaggatactgttgcgaagcgtcgggcgaagaaggaagagaaacgtgttgagtttaggaagaagatggcagatgctggtgagaagaaggaggctagggagaaacgcgagaaacaagagtactggaagcgtgagggtaggaagaggaaaggtgacgcggagggcggtggtgggaagaggaggagatag

SEQ ID NO: 34539 - protein, 1143 aa, Muscodor strobelii
  misc_feature: SGI Peptide ID NO. 571940
  misc_feature (215)..(304): Pfam Id: PF08142 Pfam Desc: AARP2CN (NUC121) domain
  misc_feature (686)..(975): Pfam Id: PF04950 Pfam Desc: Domain of function (DUF663)
  misc_feature (716)..(975): Pfam Id: PF04950 Pfam Desc: Domain of function (DUF663)
  misc_feature (2)..(1130): NCBI GI: 85079318 Blast Desc: NCU04348 [Neurospora crassa OR74A] gi|28917388|gb|EAA27093.1| NCU04348 [Neurospora crassa OR74A]
  misc_feature (1)..(1143): NCBI GI: 156049027 Blast Desc: SS1G_08220 [Sclerotinia sclerotiorum 1980] gi|154692619|gb|EDN92357.1| SS1G_08220 [Sclerotinia sclerotiorum 1980]
  misc_feature (1)..(1143): NCBI GI: 46136559 Blast Desc: FG09795.1 [Gibberella zeae PH-1]
  misc_feature (1)..(1128): NCBI GI: 171688410 Blast Desc: protein product [Podospora anserina] gi|170944167|emb|CAP70277.1| protein product [Podospora anserina]
  misc_feature (50)..(1131): NCBI GI: 145603202 Blast Desc: MGG_06202 [Magnaporthe grisea 70-15] gi|145011482|gb|EDJ96138.1| MGG_06202 [Magnaporthe grisea 70-15]
  misc_feature (1)..(1143): NCBI GI: 261352236 Blast Desc: ribosome biogenesis protein BMS1 [Verticillium albo-atrum VaMs.102]
  misc_feature (1)..(1143): NCBI GI: 238841024 Blast Desc: GTP binding protein Bms1 [Microsporum canis CBS 113480]
  misc_feature (1)..(1143): NCBI GI: 212530150 Blast Desc: ribosome biogenesis protein (Bms1), [Penicillium marneffei ATCC 18224] gi|210074630|gb|EEA28717.1| ribosome biogenesis protein (Bms1), [Penicillium marneffei ATCC 18224]
  misc_feature (1)..(1143): NCBI GI: 242819467 Blast Desc: ribosome biogenesis protein (Bms1), [Talaromyces stipitatus ATCC 10500] gi|218713790|gb|EED13214.1| ribosome biogenesis protein (Bms1), [Talaromyces stipitatus ATCC 10500]
  misc_feature (1)..(1143): NCBI GI: 119190027 Blast Desc: CIMG_05061 [Coccidioides immitis RS]
  misc_feature: Useful for introducing or modulating the production of volatile compounds
MDDQAHKPHRKAKEKKKHVGDQNPKAFAFSRPGKLQRAAARSHDIKEKRLHVPQVDRLPNTEPPPRLVAIVGPPGVGKTTLLKSLVKRYTKESLSEPTGPITVITSRKQRLTFFECPNSLTAMVDVAKIADVVLLLIDGNFGFEMETMEFLNILTATGMPGNVFSILTHLDLFRKPQQLKDAKKRLKHRLWNELYQGAHLFYLSGVINGRYPDREIHNMSRFLSVMKNPRPLIFKNSHTYCLIDSFRDITHPTQKEEDENCDRTIALCGYLRGGVNFNKEHQRIHVPGVGDFTANHVEALPDPCPSPAQQQMVAKATGKTGRKRLDEKDKRLHAPFSDRSGLKIDGDAIFITREKGFSFDKDAGGVERGLGEELIMSLQGERRLLGQTDDSIQLFRGGDRLIDAPSPEVEDTGRKSQRKARVIEQNDAQDIDVDGNDLSDDDDLASGDEEEGSDFDENRLGTLFKDQDGEDGEDLAFADSDSDLGSDVDIGGEEAEDEDGDEELDARWRTNLTEKAKALHANRPSYRTADLAKLMYDLNLTAPEVLQRWKDEVEEENIEDDSDDDEFFKSKNKNSDEYFESTPVPKLSPDDYDQLAVKWSVEENIERLRQRFTSGGNRDKGDDNDGFGGFGDDGDDNEDGEANDEEMEGWGEFEDLEADEKPESDQAEAAEPAESLEAERAKNAARKEELKLRFEEEDRDGKANGRDPHGEEFGEDDWYESQKAAMQKQLDINKAEFEGLDERQRLTVEGYQAGIYVRVVLDRVPAEFVANFDAHKPMILGGLSALEERFGFSQVRLRKHRWHKRILKNNDPLIFSAGWRRFQAIPTLHSWEERVRHRMLKYSPEHSFCYATFHGPLVSPNSSFVCFQSFSSENPGFRIAATGTILSVDSSTEIVKKLKLTGTPAKVYKNTAFIKDMFNTSLEIAKFEGASIKTVSGIRGQIKRALSKPEGHFRATFEDKILMGDLVFLRAWYPVKPRRFYNPVTDLLGDWQPMRLTGEVRREQGIATPQLADSKYRPIERATRHFNPLRVPRQLAADLPFKSQIVRTKPQKKTTYMQKRAVVLGGEEKRARDLMQKLTTIRKDTVAKRRAKKEEKRVEFRKKMADAGEKKEAREKREKQEYWKREGRKRKGDAEGGGGKRRR

SEQ ID NO: 34540 - DNA, 5917 bp, Muscodor strobelii
  misc_feature: SGI EST ID NO. CUFF.82557.3
  misc_feature: Variant of the nucleotide sequence at SEQ ID NO 34538
cggccagggactcgagcccctccacatccaacttccaaggacgcgtcggcgaccccacagagctgatcccggtgaggggcgaggggcagacgacctaagctccagcaatgcttgtcatcttggcgcattctgatttcacttacctccagtcttcacttatcgataacaaaaagttttgggcggcccatcttcgatgaagctgctctcgttgcgtcgcattgtatcgcattctagatggctattcgtcctgaatattcgaccttttcgcgctacgccgcggtctaggtctgcccatcatggacgaccaagcccacaagcctcatcgaaaggctaaagagaaaaagaaacatgtcggcgatcaaaaccccaaagcctttgccttttcgcgacctggcaagcttcagagagctgctgcgcgatcccacgatatcaaggaaaagcggctccacgtccctcaagtcgatcgtctacctaacaccgaacccccgccgcgacttgttgccatcgttgggcctccaggcgtcgggaagaccactttattaaagtcgcttgtcaagagatacacaaaagagtctctatctgagcctaccggccctatcacagtcattacctcgagaaagcagagactcaccttcttcgaatgtcccaactccctgactgccatggtcgatgtcgcaaaaattgccgatgtcgtcttgctcctgatcgacggcaatttcggctttgaaatggagactatggagtttctcaacattttgacggctaccggaatgcctggcaatgtcttttccatcctcacccaccttgaccttttccgaaaaccccaacaattgaaagatgcaaagaaacgactcaagcacagactgtggaacgagctgtaccaaggtgctcacctgttctacctctccggcgtcatcaacgggagatatccggatcgagaaatccacaacatgtctcggtttctctccgttatgaaaaatcctcgtccgcttatcttcaaaaacagccacacttattgcttgattgatagctttcgcgatattacgcacccaactcaaaaggaggaagacgagaactgcgacagaaccatcgcattgtgcggctatcttcgaggaggcgtcaacttcaacaaagagcatcagcgaattcacgttccgggcgttggcgattttacggcaaatcacgtcgaggctttacctgacccctgcccttccccagctcagcagcaaatggtagctaaagctacgggcaagaccggcagaaaacggttagatgaaaaggataaacgacttcatgcaccgttttcagatcgtagtggactcaagattgatggtgatgctattttcatcaccagagaaaaagggttcagcttcgacaaggacgcgggtggcgttgaacgtggtctgggtgaagagctgatcatgtccctgcaaggcgaaaggaggctgcttggtcaaaccgacgatagcatacaactcttccgcgggggagatcgcctaatcgacgcaccgagccctgaagttgaggacaccggacgaaagtctcaacgtaaagcaagagtcattgaacaaaacgatgcacaggatattgacgtagacggaaacgatctttccgatgatgacgatctcgcgagcggtgatgaggaagaaggatccgatttcgacgaaaatagacttggcaccctatttaaggaccaagatggcgaggacggagaggatctcgcgtttgcggacagcgattctgatctaggatccgatgtggacattggtggagaagaagcagaagacgaggacggagacgaggagctggacgctagatggcgtaccaatctcaccgagaaagccaaagctctccacgcaaatcggccgtcgtaccgaactgctgacctcgcaaagttgatgtacgatttgaacctgacggcacctgaagtcttacagaggtggaaggacgaagtagaggaagagaacattgaagacgactcagacgacgacgaattcttcaagtctaaaaacaaaaatagcgacgaatacttcgaaagcacgcccgttcctaagttgtcaccggacgactacgatcagctagcggtaaaatggtccgtggaagaaaacattgagaggctccgccaacgtttcacatcaggtggcaatcgtgataaaggtgatgacaatgatggcttcggaggctttggcgacgatggtgatgacaatgaagatggcgaagcaaatgatgaagaaatggagggttggggcgaattcgaagatcttgaggccgatgaaaagcctgaatcagaccaagccgaagcagctgaaccagccgaatcactagaggcagaacgagcgaaaaatgccgcccgaaaggaagagctcaaacttcgctttgaagaggaagaccgggatggcaaagccaatggacgagatcctcatggagaagagttcggagaggacgattggtatgaatcgcaaaaggccgccatgcaaaagcaacttgatattaacaaagctgaatttgaaggcctcgatgagcggcagaggctaactgttgaaggttaccaagccggtatatacgtacgcgtggttcttgatcgggtgcctgcggaatttgttgccaattttgatgcccacaagcccatgatccttggtggattgagtgctttggaagagagatttggattttcccaggtgcggttgagaaagcacagatggcacaaacggatcctcaagaacaacgacccgctcattttctctgcgggttggaggcgatttcaagccatacccacgctccactcttgggaagaacgagttcggcacagaatgctcaaatactccccagagcattcgttctgttacgccaccttccatggccctctggtttcgccaaactcgagtttcgtatgcttccaatccttctcgtccgagaatccaggtttccggatagcagcgacgggaacgatcttgagcgtagactcgtctacggagattgtcaagaaactgaaactgaccggtacaccggccaaggtgtataaaaacactgctttcatcaaggatatgttcaataccagccttgagatcgcaaaatttgaaggggcttccatcaaaaccgtgagtggcatcaggggtcaaatcaaacgtgctctttccaagccagagggtcatttccgtgcaacgtttgaggacaagattctcatgggagatctggtcttcttacgagcctggtaccctgtcaagccacgccggttctacaaccctgtgacggacttacttggagactggcagcccatgcgtcttacgggagaagtacgccgcgaacagggcatcgcaacgccacaactggcagacagcaaatatcggcccattgagcgcgctacacgccacttcaatcctctccgcgtacctcggcaacttgcagcagatcttccattcaaatcacagattgtacgcaccaaacctcagaagaagactacgtacatgcagaagcgcgcagttgtccttggtggcgaggagaagcgcgccagggatctcatgcaaaagctcaccaccattcgaaaggatactgttgcgaagcgtcgggcgaagaaggaagagaaacgtgttgagtttaggaagaagatggcagatgctggtgagaagaaggaggctagggagaaacgcgagaaacaagagtactggaagcgtgagggtaggaagaggaaaggtgacgcggagggcggtggtgggaagaggaggagatagaacgggactagaggcggtgaatgtataaagatatcgcgattttgaaattaggaaaaatgaatgaaccaaatttcatgaatcatgcattggaacgtcactctgtgattcagtctatctgaatacccaacaagacgtaacgattcattaagtgagtacagattatgaatactactagatttagcagaatgattacagaagtatcagcaagttcttgcttatttctctacaacttcgcaacctgagcagcagtaacctcctcatcaaggggcaagatattcggcaacggtccaacaggtgtgattgcatgcgggttgatttgtgggctggtatcacatgttagatttcacatttaatatcataacgctcaggaaataaggtcagactacttactggctcttggtatagtgattcttaatatgcaagaagttcgtcgtatccttgaacgcaggataattccagtagaggtttcgcaaccatttgtggatgtgtgggtatccagaacgaacatctttgatgttgcacttgaagtgctggacgtagacagggtcgaagcggatcatcgttacgtatctaacattggtgaaggtcagtatataaaacggaacgtattcgaaatgagagaaaggatagaagggaggaaagagactcacagcctgacatcagtctccgtcaaaacatcaccaaagaagaaatcccctttactttcactcaataccttctcagccctatccaaactctcaaacagcgcctggacattcttctcatacgcctcctgcgtcgtagcgaacccgctcttatacactccgttgttgatcttgtcgtacgtccattcaccagcttcgtcgatctgcggtcttagtgcctcgggatataggtcgaccttggcgtactgttcgggcaggtgtttgttgaacaccgtacctaacatgcggaggatctcgctggattcgttgttgatgattgtgttggtctttttgtcgaacagcactggaaccgtgaaacgaccgctgtagtctggttcgactgcgaagtagagatctcgtaggtgggtgtatgattcgtgaccgggctgtacggagtattagatgattttaccttacaagttgaaagttcccaggaagactagatatgaaataaaactatgatagtaagacatcacgcagaaaaagctgcaccactcaccaacgggtcagggccaacttcatcagtcccccccaagtcaaaacgccatcctatatttcgagtcagcttccataccttaatcatgagagaccataagccgtatagactgcatcacggatcttcttacctttctctcccatgtgccaatgcacaacagtaaatgagatatattcctcaagacccttcagcttcctagcgatgagagttcgatgggcctatacctcagccattagtccacaccattcctgaatatctcccctgtcatcaaatccaacatattttgaaataaattgaagagacaacatacccaaggacaagcatagctaacaaacaaatgataccgtcccttctcaggcggatacttggagtccggctcatcgcagatccagtcccggaacgtgctactttggcgcttaaattcgcctgatttatcgtctggcttgacccattctgtgattttcgatgcctgttgcctgatcagtaatcgtctgacacatctttgagagatttggtggagagtagaacaagtaaatgagatgatgcgtgtaggataatgcggaaatgatgggggaaaggccataatgtcaacgaaactcaccattttcgtctgcgtgtgaaatcgagaaactccaactatactccgtgcggatggtatatatgtgcgtggaccactgacagaatagctgttcggcgctcgacagaatcctctgcttgaattgaaactctttgccgacagacgaaaagtcgaagctctggcaatagctctgtttgacatgcgaacttgcgatacccctcgtaggcggggagaagcggttaatatagtactacatgcaagctagcaccgtagtatcgtggcgtcagtacgactctccgactctatcctctatcacggtctagaatctggatcactgagtacatatgtgtatgtaagcctacaaattacggccaatcagaacagtaattgttttactctaattcttgcaaactcccttatttagaggtcgtaa

SEQ ID NO: 34541 - DNA, 2259 bp, Muscodor strobelii
  misc_feature: SGI cDNA ID NO. 571941
  misc_feature: Encodes the peptide sequence at SEQ ID NO 34542
atgagcagccccaagccgctggcagacgtctcgaccgacaccgccccgatcgaaccgagacacgcccccgatctccgtgagccctctgcccagaatgatacatccctctctcctgcaggaccaggcctttcggagcctgcgtctgaggacttgatcgatttcggcatggcagattcggggaaagggaaggggaagcagaaggaaaccaccgagactgcagaagacgatgcgcctccccacaatgctgcttcaaccgatgctatggagtcttctgttgctacactaaaacccacgaaacatccatttctcactgtcgacaccgcaccatacgtcgacccaacacccccaacgcctcaaggctcccagcccccatcgcgtactagctcggcacataggtctaagagacatggctcagactactcgcccacgcgctctgacgccggctacgatgagattcgccatgccagcgaggacgaccgcgacaacaactcccagtctgagatccagagcatcatggagcagtttcctgaggacgggggcgggccgggagaggacgaggtcatgagcccacgcctcgagatcgcctcgcccttgctgagtgctggtcctatgcagcatcccccgaggaagtccagcctcgagccgctggccccgagcattgcccagcagattcaggagatgaagaacatgtccctctccagtccttcgccaacaagcacccgatcgagagacaagctggccgagcaaggccctccggtgcctccaaaggatggtcattctgaggagaaaccggccagcgccgacatgcctctccaccgccccccgcctcccgaacccgagcctgaggctgacctgcccttcgatttccaccgtttcttagagcagctgaagcacaagaaagcggatcccgttgcccgctatctcaagtcctttttaaacgagttcgccaagaggcaatggatggttcacgagcaggttaagatcattggcgacttccttgccttcatcggcaataagatggcccactgtgaagtgtggagtgaggtgtctgatgccgagtttgacaacgctcgcgagggcatggagaaactcgtcatgaataggttatacacgcagactttctcgccagctatacctgcaccccagcccatacctggcgcgaagccaaagaagcgtggcggagaccggccactgggtccgggccggcgtggccagcaccaggaagatgtggagagagatgatatcctcgcgcagaaggtcagcatatacggctgggttcgggaagaacatttggacattccgcctgtcgtcgatagtgggaagagattcttaacacttgcgcagcaagaattgttaaaaattaaatcttatagagcaccaagagataagattatttgcgtgcttaattgttgcaaggtcatattcggcttgctcaagcacaacaagtccgattcgtcggctgatagttttatgccactcctgatttatgttgtactgcgagctaatccagatcacctcgtgtccaatgtacaatatattctacgttttcgtaaccaggaaaagctgggtggtgaagccgggtattatttgtcatctctgatgggcgctgtgcagttcattgagaatatggatcgtactactttgacaatctcggatgaggatttcgaaaagaacgtggaagcagctgtttccgctattgcggaaaaacataaagcagaagagcagagaaacgccttgccgtcgccgccacctcagatttccgagaagggtgggctgtacccgcctagatcatcctcggcacggcggtctgttgaacaagacagatcaggaacaccacgtcggtctgtatccaacgacgaccagaattcaggtgatgagggccaggcgatcactgggctgcttcgcactattcagaaaccactgtcatccataggtagaatgttcagcgacgagacttctgctgccggaccgagcgcggttacacacagtcgagaacccagcacagacgcacagacatccgcgaacatggctcgacaacagcaacaacaacagctctccgctcaggaagctgctgccaggcaagccagtgccgaggcagccgaggcgcagagattgcaacgggcggaacacaacaacgtagttgagactcttcaaggaatgtttcctgatctagatcgagacatcataagtgatgtagtccatcaaaaggaggggagagttggccttgctgtcgatgcctgccttgctctaagtgcctga

SEQ ID NO: 34542 - protein, 752 aa, Muscodor strobelii
  misc_feature: SGI Peptide ID NO. 571941
  misc_feature (709)..(751): Pfam Id: PF02845 Pfam Desc: CUE domain
  misc_feature (444)..(545): Pfam Id: PF02204 Pfam Desc: Vacuolar sorting protein 9 (VPS9) domain
  misc_feature (49)..(752): NCBI GI: 170940162 Blast Desc: protein product [Podospora anserina]
  misc_feature (49)..(751): NCBI GI: 256735214 Blast Desc: [Nectria haematococca mpVI 77-13-4]
  misc_feature (49)..(752): NCBI GI: 145615097 Blast Desc: MGG_05379 [Magnaporthe grisea 70-15] gi|145022012|gb|EDK06032.1| MGG_05379 [Magnaporthe grisea 70-15]
  misc_feature (2)..(751): NCBI GI: 46107396 Blast Desc: FG00581.1 [Gibberella zeae PH-1]
  misc_feature (13)..(752): NCBI GI: 156052875 Blast Desc: SS1G_06605 [Sclerotinia sclerotiorum 1980] gi|154704383|gb|EDO04122.1| SS1G_06605 [Sclerotinia sclerotiorum 1980]
  misc_feature (82)..(751): NCBI GI: 261357784 Blast Desc: vacuolar protein sorting-associated protein [Verticillium albo-atrum VaMs.102]
  misc_feature (56)..(752): NCBI GI: 154315156 Blast Desc: BC1G_04617 [Botryotinia fuckeliana B05.10] gi|150847580|gb|EDN22773.1| BC1G_04617 [Botryotinia fuckeliana B05.10]
  misc_feature (102)..(752): NCBI GI: 164424381 Blast Desc: NCU07301 [Neurospora crassa OR74A] gi|157070489|gb|EAA32919.2| conserved [Neurospora crassa OR74A]
  misc_feature (49)..(751): NCBI GI: 116195692 Blast Desc: CHGG_04444 [Chaetomium globosum CBS 148.51] gi|88180357|gb|EAQ87825.1| CHGG_04444 [Chaetomium globosum CBS 148.51]
  misc_feature (121)..(750): NCBI GI: 169611562 Blast Desc: SNOG_08895 [Phaeosphaeria nodorum SN15] gi|160702318|gb|EAT84063.2| SNOG_08895 [Phaeosphaeria nodorum SN15]
MSSPKPLADVSTDTAPIEPRHAPDLREPSAQNDTSLSPAGPGLSEPASEDLIDFGMADSGKGKGKQKETTETAEDDAPPHNAASTDAMESSVATLKPTKHPFLTVDTAPYVDPTPPTPQGSQPPSRTSSAHRSKRHGSDYSPTRSDAGYDEIRHASEDDRDNNSQSEIQSIMEQFPEDGGGPGEDEVMSPRLEIASPLLSAGPMQHPPRKSSLEPLAPSIAQQIQEMKNMSLSSPSPTSTRSRDKLAEQGPPVPPKDGHSEEKPASADMPLHRPPPPEPEPEADLPFDFHRFLEQLKHKKADPVARYLKSFLNEFAKRQWMVHEQVKIIGDFLAFIGNKMAHCEVWSEVSDAEFDNAREGMEKLVMNRLYTQTFSPAIPAPQPIPGAKPKKRGGDRPLGPGRRGQHQEDVERDDILAQKVSIYGWVREEHLDIPPVVDSGKRFLTLAQQELLKIKSYRAPRDKIICVLNCCKVIFGLLKHNKSDSSADSFMPLLIYVVLRANPDHLVSNVQYILRFRNQEKLGGEAGYYLSSLMGAVQFIENMDRTTLTISDEDFEKNVEAAVSAIAEKHKAEEQRNALPSPPPQISEKGGLYPPRSSSARRSVEQDRSGTPRRSVSNDDQNSGDEGQAITGLLRTIQKPLSSIGRMFSDETSAAGPSAVTHSREPSTDAQTSANMARQQQQQQLSAQEAAARQASAEAAEAQRLQRAEHNNVVETLQGMFPDLDRDIISDVVHQKEGRVGLAVDACLALSA

SEQ ID NO: 34543 - DNA, 2759 bp, Muscodor strobelii
  misc_feature: SGI EST ID NO. CUFF.82114.0
  misc_feature: Variant of the nucleotide sequence at SEQ ID NO 34541
ttagaaggattacagccctagaagctagcggcagcagctaagtccgacatcacgtacactgacgtactcgtgtcttttcatcctcatttcaagttccatcccattcactactaactaccggatctacctcttttcgtcccttcgctatccgccaggtccaggagcaaagcactactagtaatctccccaccgaagcttgaacgtctcatgcatgcctcccgaacaacctctcgtcctcccttccgaccatgaccccgccatgagcagccccaagccgctggcagacgtctcgaccgacaccgccccgatcgaaccgagacacgcccccgatctccgtgagccctctgcccagaatgatacatccctctctcctgcaggaccaggcctttcggagcctgcgtctgaggacttgatcgatttcggcatggcagattcggggaaagggaaggggaagcagaaggaaaccaccgagactgcagaagacgatgcgcctccccacaatgctgcttcaaccgatgctatggagtcttctgttgctacactaaaacccacgaaacatccatttctcactgtcgacaccgcaccatacgtcgacccaacacccccaacgcctcaaggctcccagcccccatcgcgtactagctcggcacataggtctaagagacatggctcagactactcgcccacgcgctctgacgccggctacgatgagattcgccatgccagcgaggacgaccgcgacaacaactcccagtctgagatccagagcatcatggagcagtttcctgaggacgggggcgggccgggagaggacgaggtcatgagcccacgcctcgagatcgcctcgcccttgctgagtgctggtcctatgcagcatcccccgaggaagtccagcctcgagccgctggccccgagcattgcccagcagattcaggagatgaagaacatgtccctctccagtccttcgccaacaagcacccgatcgagagacaagctggccgagcaaggccctccggtgcctccaaaggatggtcattctgaggagaaaccggccagcgccgacatgcctctccaccgccccccgcctcccgaacccgagcctgaggctgacctgcccttcgatttccaccgtttcttagagcagctgaagcacaagaaagcggatcccgttgcccgctatctcaagtcctttttaaacgagttcgccaagaggcaatggatggttcacgagcaggttaagatcattggcgacttccttgccttcatcggcaataagatggcccactgtgaagtgtggagtgaggtgtctgatgccgagtttgacaacgctcgcgagggcatggagaaactcgtcatgaataggttatacacgcagactttctcgccagctatacctgcaccccagcccatacctggcgcgaagccaaagaagcgtggcggagaccggccactgggtccgggccggcgtggccagcaccaggaagatgtggagagagatgatatcctcgcgcagaaggtcagcatatacggctgggttcgggaagaacatttggacattccgcctgtcgtcgatagtgggaagagattcttaacacttgcgcagcaaggtgcgtgctccaacccgcttggatgcccgctgtcgctaacagaggcagaattgttaaaaattaaatcttatagagcaccaagagataagattatttgcgtgcttaattgttgcaaggtcatattcggcttgctcaagcacaacaagtccgattcgtcggctgatagttttatgccactcctgatttatgttgtactgcgagctaatccagatcacctcgtgtccaatgtacaatatattctacgttttcgtaaccaggaaaagctgggtggtgaagccgggtattatttgtcatctctgatgggcgctgtgcagttcattgagaatatggatcgtactactttgacaatctcggatgaggatttcgaaaagaacgtggaagcagctgtttccgctattgcggaaaaacataaagcagaagagcagagaaacgccttgccgtcgccgccacctcagatttccgagaagggtgggctgtacccgcctagatcatcctcggcacggcggtctgttgaacaagacagatcaggaacaccacgtcggtctgtatccaacgacgaccagaattcaggtgatgagggccaggcgatcactgggctgcttcgcactattcagaaaccactgtcatccataggtagaatgttcagcgacgagacttctgctgccggaccgagcgcggttacacacagtcgagaacccagcacagacgcacagacatccgcgaacatggctcgacaacagcaacaacaacagctctccgctcaggaagctgctgccaggcaagccagtgccgaggcagccgaggcgcagagattgcaacgggcggaacacaacaacgtagttgagactcttcaaggaatgtttcctgatctagatcgagacatcataagtgatgtagtccatcaaaaggaggggagagttggccttgctgtcgatgcctgccttgctctaagtgcctgatttctcaattcatgtcatgctagcgattgccattttgatgggttactggcccggtatccagttagacttagctacggacaccatttgcaccaagatcctcatatacccatcccataaacacctacttatagtagtatattcctcaatcaatcatattgatgaagctaatttacaaaaatttgcctcgtctttc

SEQ ID NO: 34544 - DNA, 2307 bp, Muscodor strobelii
  misc_feature: SGI cDNA ID NO. 571942
  misc_feature: Encodes the peptide sequence at SEQ ID NO 34545
atgagcagccccaagccgctggcagacgtctcgaccgacaccgccccgatcgaaccgagacacgcccccgatctccgtgagccctctgcccagaatgatacatccctctctcctgcaggaccaggcctttcggagcctgcgtctgaggacttgatcgatttcggcatggcagattcggggaaagggaaggggaagcagaaggaaaccaccgagactgcagaagacgatgcgcctccccacaatgctgcttcaaccgatgctatggagtcttctgttgctacactaaaacccacgaaacatccatttctcactgtcgacaccgcaccatacgtcgacccaacacccccaacgcctcaaggctcccagcccccatcgcgtactagctcggcacataggtctaagagacatggctcagactactcgcccacgcgctctgacgccggctacgatgagattcgccatgccagcgaggacgaccgcgacaacaactcccagtctgagatccagagcatcatggagcagtttcctgaggacgggggcgggccgggagaggacgaggtcatgagcccacgcctcgagatcgcctcgcccttgctgagtgctggtcctatgcagcatcccccgaggaagtccagcctcgagccgctggccccgagcattgcccagcagattcaggagatgaagaacatgtccctctccagtccttcgccaacaagcacccgatcgagagacaagctggccgagcaaggccctccggtgcctccaaaggatggtcattctgaggagaaaccggccagcgccgacatgcctctccaccgccccccgcctcccgaacccgagcctgaggctgacctgcccttcgatttccaccgtttcttagagcagctgaagcacaagaaagcggatcccgttgcccgctatctcaagtcctttttaaacgagttcgccaagaggcaatggatggttcacgagcaggttaagatcattggcgacttccttgccttcatcggcaataagatggcccactgtgaagtgtggagtgaggtgtctgatgccgagtttgacaacgctcgcgagggcatggagaaactcgtcatgaataggttatacacgcagactttctcgccagctatacctgcaccccagcccatacctggcgcgaagccaaagaagcgtggcggagaccggccactgggtccgggccggcgtggccagcaccaggaagatgtggagagagatgatatcctcgcgcagaaggtcagcatatacggctgggttcgggaagaacatttggacattccgcctgtcgtcgatagtgggaagagattcttaacacttgcgcagcaaggtgcgtgctccaacccgcttggatgcccgctgtcgctaacagaggcagaattgttaaaaattaaatcttatagagcaccaagagataagattatttgcgtgcttaattgttgcaaggtcatattcggcttgctcaagcacaacaagtccgattcgtcggctgatagttttatgccactcctgatttatgttgtactgcgagctaatccagatcacctcgtgtccaatgtacaatatattctacgttttcgtaaccaggaaaagctgggtggtgaagccgggtattatttgtcatctctgatgggcgctgtgcagttcattgagaatatggatcgtactactttgacaatctcggatgaggatttcgaaaagaacgtggaagcagctgtttccgctattgcggaaaaacataaagcagaagagcagagaaacgccttgccgtcgccgccacctcagatttccgagaagggtgggctgtacccgcctagatcatcctcggcacggcggtctgttgaacaagacagatcaggaacaccacgtcggtctgtatccaacgacgaccagaattcaggtgatgagggccaggcgatcactgggctgcttcgcactattcagaaaccactgtcatccataggtagaatgttcagcgacgagacttctgctgccggaccgagcgcggttacacacagtcgagaacccagcacagacgcacagacatccgcgaacatggctcgacaacagcaacaacaacagctctccgctcaggaagctgctgccaggcaagccagtgccgaggcagccgaggcgcagagattgcaacgggcggaacacaacaacgtagttgagactcttcaaggaatgtttcctgatctagatcgagacatcataagtgatgtagtccatcaaaaggaggggagagttggccttgctgtcgatgcctgccttgctctaagtgcctga

SEQ ID NO: 34545 - protein, 768 aa, Muscodor strobelii
  misc_feature: SGI Peptide ID NO. 571942
  misc_feature (725)..(767): Pfam Id: PF02845 Pfam Desc: CUE domain
  misc_feature (462)..(561): Pfam Id: PF02204 Pfam Desc: Vacuolar sorting protein 9 (VPS9) domain
  misc_feature (49)..(768): NCBI GI: 170940162 Blast Desc: protein product [Podospora anserina]
  misc_feature (49)..(767): NCBI GI: 256735214 Blast Desc: [Nectria haematococca mpVI 77-13-4]
  misc_feature (49)..(768): NCBI GI: 145615097 Blast Desc: MGG_05379 [Magnaporthe grisea 70-15] gi|145022012|gb|EDK06032.1| MGG_05379 [Magnaporthe grisea 70-15]
  misc_feature (50)..(767): NCBI GI: 46107396 Blast Desc: FG00581.1 [Gibberella zeae PH-1]
  misc_feature (13)..(768): NCBI GI: 156052875 Blast Desc: SS1G_06605 [Sclerotinia sclerotiorum 1980] gi|154704383|gb|EDO04122.1| SS1G_06605 [Sclerotinia sclerotiorum 1980]
  misc_feature (82)..(767): NCBI GI: 261357784 Blast Desc: vacuolar protein sorting-associated protein [Verticillium albo-atrum VaMs.102]
  misc_feature (56)..(768): NCBI GI: 154315156 Blast Desc: BC1G_04617 [Botryotinia fuckeliana B05.10] gi|150847580|gb|EDN22773.1| BC1G_04617 [Botryotinia fuckeliana B05.10]
  misc_feature (102)..(768): NCBI GI: 164424381 Blast Desc: NCU07301 [Neurospora crassa OR74A] gi|157070489|gb|EAA32919.2| conserved [Neurospora crassa OR74A]
  misc_feature (49)..(767): NCBI GI: 116195692 Blast Desc: CHGG_04444 [Chaetomium globosum CBS 148.51] gi|88180357|gb|EAQ87825.1| CHGG_04444 [Chaetomium globosum CBS 148.51]
  misc_feature (121)..(766): NCBI GI: 169611562 Blast Desc: SNOG_08895 [Phaeosphaeria nodorum SN15] gi|160702318|gb|EAT84063.2| SNOG_08895 [Phaeosphaeria nodorum SN15]
MSSPKPLADVSTDTAPIEPRHAPDLREPSAQNDTSLSPAGPGLSEPASEDLIDFGMADSGKGKGKQKETTETAEDDAPPHNAASTDAMESSVATLKPTKHPFLTVDTAPYVDPTPPTPQGSQPPSRTSSAHRSKRHGSDYSPTRSDAGYDEIRHASEDDRDNNSQSEIQSIMEQFPEDGGGPGEDEVMSPRLEIASPLLSAGPMQHPPRKSSLEPLAPSIAQQIQEMKNMSLSSPSPTSTRSRDKLAEQGPPVPPKDGHSEEKPASADMPLHRPPPPEPEPEADLPFDFHRFLEQLKHKKADPVARYLKSFLNEFAKRQWMVHEQVKIIGDFLAFIGNKMAHCEVWSEVSDAEFDNAREGMEKLVMNRLYTQTFSPAIPAPQPIPGAKPKKRGGDRPLGPGRRGQHQEDVERDDILAQKVSIYGWVREEHLDIPPVVDSGKRFLTLAQQGACSNPLGCPLSLTEAELLKIKSYRAPRDKIICVLNCCKVIFGLLKHNKSDSSADSFMPLLIYVVLRANPDHLVSNVQYILRFRNQEKLGGEAGYYLSSLMGAVQFIENMDRTTLTISDEDFEKNVEAAVSAIAEKHKAEEQRNALPSPPPQISEKGGLYPPRSSSARRSVEQDRSGTPRRSVSNDDQNSGDEGQAITGLLRTIQKPLSSIGRMFSDETSAAGPSAVTHSREPSTDAQTSANMARQQQQQQLSAQEAAARQASAEAAEAQRLQRAEHNNVVETLQGMFPDLDRDIISDVVHQKEGRVGLAVDACLALSA

SEQ ID NO: 34546 - DNA, 2759 bp, Muscodor strobelii; identical to SEQ ID NO: 34543
  misc_feature: SGI EST ID NO. CUFF.82114.0
  misc_feature: Variant of the nucleotide sequence at SEQ ID NO 34544

SEQ ID NO: 34547 - DNA, 1485 bp, Muscodor strobelii
  misc_feature: SGI cDNA ID NO. 571943
  misc_feature: Encodes the peptide sequence at SEQ ID NO 34548
atgtacaagtccacagcccttgccgccgccttaacagcaaccgtctacgcacaaaccctaaacacagacctccaatccgcaggcttcaactccacatttaagctcacctcatcacaaatctccgctgcgaacttaacaccaaaagcagtagtgaacatcgagaacacactccgcttcgacctatctcaactggccttcggtgggccagcacaagatgacttctacactctgcccccactcacaaacgacacggaactcgagccgggcgttttactgaaagtccaagagttcacagacccaagttcgtatgtcctgccgcctaacacggcgctgagtaggattctatacacgaccacgaatctgaacggcactgttctgcccgctagtgcgtttgtcctgtggcctttctatcctaagcaatttgctcaagacgggtatgataaaaacggcactggagccccggttatcctctggacgcacggaacatcggggttcttcgcgcctcacggtcccagtgcgcagagaaacctgtggtatgcggacgcagcgccttttgctctcgcactagcgggctatgcggtcgttgcgccggactacgccgggctggggattcataggagctgggatggatcggagatccctcaccagtacctcatgtcgcgcgtcagcgcgcacgatgcgctttattcgcttcgcgcggcttgggaggcgtttccggacttattgagaaaggaatttgtgactatggggcatagtcagggtggtggcgttgcctggggtgtgtctgaggttctcgctgctgagggagaagcgttgaaagatttggtggaggggttcaggggcacggttagcggaagccctacgacggatgtttttacgggcttgccgcaatttattgttacgtggatctcgatgttcttggacacgatattcccgagcttcaagcaggagtactggatcactgacctggggatagcgaggacgaagctgcagaaggagatcgagggtgggatttcggtgtctcagacgctttatcttgatacggaggagaagattgtcaaggatgattataatgagacctggtacgttgaggcgtatggaaaacttgccaacgttggacagagacctttcttaggtcctatgattgttatccaggggacaaatgatgcgtacgtctactacgaggtcacgaacaagacagtagtggataactgcgcatatatcgacgacaacaacctagacgaggatctggagttcctgatcgtcaatggaacgggtcatgttccgacactggacgctacgagaccgatctggatgcagtggatcgaggaccgttttgagggcaagtcggtgaagaagagcgattgtgtgaggacggacctggatagctttttgccgcttgacagatatctggctgttggaaactcgtatgttcagtgggctggtggcgacgaccactggtttgagacggttctgggactttga

SEQ ID NO: 34548 - protein, 494 aa, Muscodor strobelii
  misc_feature: SGI Peptide ID NO. 571943
  misc_feature (1)..(494): NCBI GI: 256729151 Blast Desc: NECHADRAFT_80111 [Nectria haematococca mpVI 77-13-4]
  misc_feature (1)..(487): NCBI GI: 119474547 Blast Desc: secretory lipase, [Neosartorya fischeri NRRL 181] gi|119407302|gb|EAW17252.1| secretory lipase, [Neosartorya fischeri NRRL 181]
  misc_feature (26)..(489): NCBI GI: 256724130 Blast Desc: NECHADRAFT_86384 [Nectria haematococca mpVI 77-13-4]
  misc_feature (53)..(487): NCBI GI: 146323255 Blast Desc: secretory lipase [Aspergillus fumigatus Af293] gi|129556542|gb|EAL86671.2| secretory lipase, [Aspergillus fumigatus Af293]
  misc_feature (53)..(487): NCBI GI: 159128120 Blast Desc: secretory lipase, [Aspergillus fumigatus A1163]
  misc_feature (73)..(456): NCBI GI: 256729559 Blast Desc: NECHADRAFT_84257 [Nectria haematococca mpVI 77-13-4]
  misc_feature (79)..(487): NCBI GI: 212530382 Blast Desc: secretory lipase, [Penicillium marneffei ATCC 18224] gi|210074746|gb|EEA28833.1| secretory lipase, [Penicillium marneffei ATCC 18224]
  misc_feature (25)..(481): NCBI GI: 169614175 Blast Desc: SNOG_10223 [Phaeosphaeria nodorum SN15] gi|111061438|gb|EAT82558.1| SNOG_10223 [Phaeosphaeria nodorum SN15]
  misc_feature (85)..(493): NCBI GI: 242818867 Blast Desc: secretory lipase, [Talaromyces stipitatus ATCC 10500] gi|218713667|gb|EED13091.1| secretory lipase, [Talaromyces stipitatus ATCC 10500]
  misc_feature (57)..(301): NCBI GI: 154319267 Blast Desc: BC1G_02585 [Botryotinia fuckeliana B05.10] gi|150857016|gb|EDN32208.1| BC1G_02585 [Botryotinia fuckeliana B05.10]
MYKSTALAAALTATVYAQTLNTDLQSAGFNSTFKLTSSQISAANLTPKAVVNIENTLRFDLSQLAFGGPAQDDFYTLPPLTNDTELEPGVLLKVQEFTDPSSYVLPPNTALSRILYTTTNLNGTVLPASAFVLWPFYPKQFAQDGYDKNGTGAPVILWTHGTSGFFAPHGPSAQRNLWYADAAPFALALAGYAVVAPDYAGLGIHRSWDGSEIPHQYLMSRVSAHDALYSLRAAWEAFPDLLRKEFVTMGHSQGGGVAWGVSEVLAAEGEALKDLVEGFRGTVSGSPTTDVFTGLPQFIVTWISMFLDTIFPSFKQEYWITDLGIARTKLQKEIEGGISVSQTLYLDTEEKIVKDDYNETWYVEAYGKLANVGQRPFLGPMIVIQGTNDAYVYYEVTNKTVVDNCAYIDDNNLDEDLEFLIVNGTGHVPTLDATRPIWMQWIEDRFEGKSVKKSDCVRTDLDSFLPLDRYLAVGNSYVQWAGGDDHWFETVLGL

SEQ ID NO: 34549 - DNA, 2152 bp, Muscodor strobelii
  misc_feature: SGI EST ID NO. CUFF.82105.0
  misc_feature: Variant of the nucleotide sequence at SEQ ID NO 34547
ctaacatcacgtaaccggcactccgtggacaaccactccgcaatggaaatggacagaaatgaataagaagttaattaagcttttcgacgcttggccgtatgtgtataagtcgttactgcttacataaatagtgtgacgactgtgaacctcacaacactgctcggatccctgctccgcctcacaaattgccatatttgccgcttctaaggaagattttagagtggaaaagcaaccatgacgacaactttcgggcttcagattctgttagggtcgactgtcagtcgcgcggaaaggactgctcgagtggatcgcactcatttgcggacatcaccatgattatcaatattcctggccgtggccaggcgactgaattcaaggggtacatacatccatgatataagaagcaaagccatagtcatgatgaagactgcaaaacatatcgtcccatcagtcaatccaatatattacacttcgacaccagtcaaaagactcgaagatgtacaagtccacagcccttgccgccgccttaacagcaaccgtctacgcacaaaccctaaacacagacctccaatccgcaggcttcaactccacatttaagctcacctcatcacaaatctccgctgcgaacttaacaccaaaagcagtagtgaacatcgagaacacactccgcttcgacctatctcaactggccttcggtgggccagcacaagatgacttctacactctgcccccactcacaaacgacacggaactcgagccgggcgttttactgaaagtccaagagttcacagacccaagttcgtatgtcctgccgcctaacacggcgctgagtaggattctatacacgaccacgaatctgaacggcactgttctgcccgctagtgcgtttgtcctgtggcctttctatcctaagcaatttgctcaagacgggtatgataaaaacggcactggagccccggttatcctctggacgcacggaacatcggggttcttcgcgcctcacggtcccagtgcgcagagaaacctgtggtatgcggacgcagcgccttttgctctcgcactagcgggctatgcggtcgttgcgccggactacgccgggctggggattcataggagctgggatggatcggagatccctcaccagtacctcatgtcgcgcgtcagcgcgcacgatgcgctttattcgcttcgcgcggcttgggaggcgtttccggacttattgagaaaggaatttgtgactatggggcatagtcagggtggtggcgttgcctggggtgtgtctgaggttctcgctgctgagggagaagcgttgaaagatttggtggaggggttcaggggcacggttagcggaagccctacgacggatgtttttacgggcttgccgcaatttattgttacgtggatctcgatgttcttggacacgatattcccgagcttcaagcaggagtactggatcactgacctggggatagcgaggacgaagctgcagaaggagatcgagggtgggatttcggtgtctcagacgctttatcttgatacggaggagaagattgtcaaggatgattataatgagacctggtacgttgaggcgtatggaaaacttgccaacgttggacagagacctttcttaggtcctatgattgttatccaggggacaaatgatgcgtacgtctactacgaggtcacgaacaagacagtagtggataactgcgcatatatcgacgacaacaacctagacgaggatctggagttcctgatcgtcaatggaacgggtcatgttccgacactggacgctacgagaccgatctggatgcagtggatcgaggaccgttttgagggcaagtcggtgaagaagagcgattgtgtgaggacggacctggatagctttttgccgcttgacagatatctggctgttggaaactcgtatgttcagtgggctggtggcgacgaccactggtttgagacggttctgggactttgaggcggaagatgttgaccaacataaagatcatcacctctggccccgtgcttgactcgggtgctcacatagaaattcttgtatatagatgttagctaacttctctcctgctacttttgtatcgtattagaattaatccatatacttctcatactcctgcttattctacgactg

SEQ ID NO: 34550 - DNA, 1356 bp, Muscodor strobelii
  misc_feature: SGI cDNA ID NO. 571944
  misc_feature: Elevated expression when VOC is produced
  misc_feature: Encodes the peptide sequence at SEQ ID NO 34551
atgcatcagaaactcgctaccatcgcggcctttgtcgccagcgtccgtgctcaagcggcctgcactcttaccgctgagacgcacccgtccatgacatggcaacaatgcgcggccggtggaagctgcacaacgaaaagtggcaaagtaaccgttgatgctaactggcgatggactcaccaaacttcgtcaagtaccaactgctataccggaaatgagtgggatacttctatctgcagcacaaatgcggcctgcgctacggcctgctgtgtcgacggtgctgactatgccggtacatatggtgctacaacgtccggtaacgctctcaatctcaaattcgtcacccaaggcccatacagcaccaacatcggatcccgaatgtacctgatggccagcgacactcaataccagggcttcaagctgcttggcaatgagttcactttcgatgtcgatgtttcaaaccttccttgcggtttgaatggtgctctttacttcgtgtccatggaccttgacggtggcatggccaagtattcaagcaacaaggctggtgccaagttcggcacaggttactgtgacgcccaatgccctcgcgatctcaagttcatcaacggccaggccaacgttgaaggctggaagccctcgtccaacgatgcaaacgctggcgtcggtaacctgggcagctgctgcgctgagatggatatctgggaagccaacaagatggccactgcctacactcctcatccctgcacgaacaacgcccaacactcttgcaacggagacgcttgtggtggaacctactccagcactcgctacgctggagactgcgatcccgacggatgcgacttcaacagctaccgcatgggcgacacatctttcttcgggccgggcatgaccgttgacaccaactcgcccgtcactgtcgtcactcaattccttacctccggctcgaccctctcggagatcaagcgtttctacatccagaacggcaaggtcatccccaacagtcagagcacgatctccggtgttaccggcaactccgtcacgcccaagttctgcgatgctcagaagaccgctttcggcgacaccaacgtgtttgaccagaagggtggatttgccggtatttccaaggctctggcgggcgacatggttctcgttatgtccctgtgggacgaccactacgccgacatgctctggctcgattctacttaccccgttggctcgagcaaggctggctccgctcgtggcacttgctcttctacctctggtgttcccgctaccgttgagtcccagagcggaagcgccagcgtcaagtactcgaacatcaagttcggtcctatcaactctactttcactcagtaa

SEQ ID NO: 34551 - protein, 451 aa, Muscodor strobelii
  misc_feature: SGI Peptide ID NO. 571944
  misc_feature (19)..(451): Pfam Id: PF00840 Pfam Desc: Glycosyl hydrolase family 7
  misc_feature (1)..(450): NCBI GI: 156712278 Blast Desc: cellulose 1,4-beta-cellobiosidase [Acremonium thermophilum]
  misc_feature (1)..(449): NCBI GI: 39977899 Blast Desc: MGG_06834 [Magnaporthe grisea 70-15] gi|145013609|gb|EDJ98250.1| MGG_06834 [Magnaporthe grisea 70-15]
  misc_feature (1)..(450): NCBI GI: 56718412 Blast Desc: cellobiohydrolase precursor [Thermoascus aurantiacus var. levisporus]
  misc_feature (1)..(450): NCBI GI: 156712284 Blast Desc: cellulose 1,4-beta-cellobiosidase [Thermoascus aurantiacus]
  misc_feature (1)..(450): NCBI GI: 18997123 Blast Desc: AF478686_1 cellobiohydrolase I [Thermoascus aurantiacus]
  misc_feature (1)..(448): NCBI GI: 156712282 Blast Desc: cellulose 1,4-beta-cellobiosidase [Chaetomium thermophilum]
  misc_feature (1)..(448): NCBI GI: 58045187 Blast Desc: cellobiohydrolase [Chaetomium thermophilum]
  misc_feature (1)..(450): NCBI GI: 16304152 Blast Desc: AF421954_1 cellobiohydrolase precursor [Thermoascus aurantiacus]
  misc_feature (18)..(445): NCBI GI: 85108032 Blast Desc: exoglucanase 1 precursor [Neurospora crassa OR74A] gi|74696551|sp|Q7SA23.1|GUX1A_NEUCR RecName: Full=Exoglucanase 1; AltName: Full=Exocellobiohydrolase 1; AltName: 1; Flags: 1 crassa
  misc_feature (1)..(449): NCBI GI: 169763962 Blast Desc: [Aspergillus oryzae RIB40] gi|238489939|ref|XP_002376207.1| cellobiohydrolase celD [Aspergillus flavus NRRL3357] gi|83770909|dbj|BAE61042.1| protein
  misc_feature (21)..(445): SWISSPROT Homolog: EC 3.2.1.91 Cellulose 1,4-beta-cellobiosidase
  misc_feature: Useful for introducing or modulating the production of volatile compounds
MHQKLATIAAFVASVRAQAACTLTAETHPSMTWQQCAAGGSCTTKSGKVTVDANWRWTHQTSSSTNCYTGNEWDTSICSTNAACATACCVDGADYAGTYGATTSGNALNLKFVTQGPYSTNIGSRMYLMASDTQYQGFKLLGNEFTFDVDVSNLPCGLNGALYFVSMDLDGGMAKYSSNKAGAKFGTGYCDAQCPRDLKFINGQANVEGWKPSSNDANAGVGNLGSCCAEMDIWEANKMATAYTPHPCTNNAQHSCNGDACGGTYSSTRYAGDCDPDGCDFNSYRMGDTSFFGPGMTVDTNSPVTVVTQFLTSGSTLSEIKRFYIQNGKVIPNSQSTISGVTGNSVTPKFCDAQKTAFGDTNVFDQKGGFAGISKALAGDMVLVMSLWDDHYADMLWLDSTYPVGSSKAGSARGTCSSTSGVPATVESQSGSASVKYSNIKFGPINSTFTQ

SEQ ID NO: 34552 - DNA, 2978 bp, Muscodor strobelii
  misc_feature: SGI EST ID NO. CUFF.82108.0
  misc_feature: Variant of the nucleotide sequence at SEQ ID NO 34550
caagctaggcgttatggaccgatgtcccggaagaaatctgatcaaaggggtcccgagtatgcctcacgatgtctccttgatgttggaggtggtatgcggtctacgaggcttgccggtgcgtttggtatgttacttcacacacccgttggtgagtcttcggtgtctttgcaaaacacagtactatgtgaacgcttggcatcagccctgaccatattatgtcaggtatttgacccacttccgtccatctaccccaaacttgaaccacgtaagaatttcccaccagccaggttcacagaaaagcataatcgacattttaattgcacaagaagcttgtacctggttctcaatgtcttggccactgttgatcatcgcgggggaaccaccccatggcggacaaatccaaccctacggcggagtaacttcgtcagggtcgtgaaccccaactccttgcgcctcgtgacgactctggcaagggttccgaactcgtaagtagttgtgatcctttggctgtcacaaacttggcggcgctagagttgtcgatacttgctggcagggttctagttgcattcggccagaccgtttccgtaccttagaggaaaagcctccaataagccattgttcgttatgcctctagcacaagtcaggcatccaagctttgaaactgaaccactcatttgtcgactcgtccatcctatgtcatcagcccgggcagacctaggcagtcgtttcatgctcgtgtcgttgctatgccagggctttcagaccacctgctccatcaagtgttctgcatacggccacaacacgcacggtttcccatacatattgatagttcaagaacattccaagatatccctgcacttacttcgctcctaacatgctagagtccgaccgtcagttcatcgtctggagtgtcacggcccgtgtaccggattgttctagcccaggattcccaagacgccgtatgcggcgtttggtttctccagctcctggtgagagaggcaaatcggggagacatcatggctctcggagggtggcaagcgagttccggagtggtatctgctcggtactcttctctagatttgggacgtgatatataaagaccagtgatcgcgtcagtatccttgaatattctgtttcactacagaagtcatcagtcaagtcttgaacaagtcgttccatcgcgcttgtcatcatgcatcagaaactcgctaccatcgcggcctttgtcgccagcgtccgtgctcaagcggcctgcactcttaccgctgagacgcacccgtccatgacatggcaacaatgcgcggccggtggaagctgcacaacgaaaagtggcaaagtaaccgttgatgctaactggcgatggactcaccaaacttcgtcaagtaccaactgctataccggaaatgagtgggatacttctatctgcagcacaaatgcggcctgcgctacggcctgctgtgtcgacggtgctgactatgccggtacatatggtgctacaacgtccggtaacgctctcaatctcaaattcgtcacccaaggcccatacagcaccaacatcggatcccgaatgtacctgatggccagcgacactcaataccagggcttcaagctgcttggcaatgagttcactttcgatgtcgatgtttcaaaccttccttgcggtttgaatggtgctctttacttcgtgtccatggaccttgacggtggcatggccaagtattcaagcaacaaggctggtgccaagttcggcacaggttactgtgacgcccaatgccctcgcgatctcaagttcatcaacggccaggccaacgttgaaggctggaagccctcgtccaacgatgcaaacgctggcgtcggtaacctgggcagctgctgcgctgagatggatatctgggaagccaacaagatggccactgcctacactcctcatccctgcacgaacaacgcccaacactcttgcaacggagacgcttgtggtggaacctactccagcactcgctacgctggagactgcgatcccgacggatgcgacttcaacagctaccgcatgggcgacacatctttcttcgggccgggcatgaccgttgacaccaactcgcccgtcactgtcgtcactcaattccttacctccggctcgaccctctcggagatcaagcgtttctacatccagaacggcaaggtcatccccaacagtcagagcacgatctccggtgttaccggcaactccgtcacgcccaagttctgcgatgctcagaagaccgctttcggcgacaccaacgtgtttgaccagaagggtggatttgccggtatttccaaggctctggcgggcgacatggttctcgttatgtccctgtgggacgaccactacgccgacatgctctggctcgattctacttaccccgttggctcgagcaaggctggctccgctcgtggcacttgctcttctacctctggtgttcccgctaccgttgagtcccagagcggaagcgccagcgtcaagtactcgaacatcaagttcggtcctatcaactctactttcactcagtaaacgcgagaaaaaagtcgtttcttggtagttatatgataggggttgtcattgagtggattggttcttcgcgaacaagacatagagtgcaagatagttacgtaggccttcttgtatataaatcttctgtcactcgttctgcatcaactttttctcactgcatcagaatcgtgcttcgatatggtgcttcgatatggtgcttcgatatgacgcttcttaagtgactctcttctgtaccttatacaaagttggctaacctaatggattcgaatcgaatggaatcgcctcacgttcggctcactgatccgaactttataatggcaagctgtaacaacaagccgaccaatgaattatttgacaagccttttgacggatctttccgatgatcatgatcccaacttaagaacaataagcactcgatgaaatgtatttg

SEQ ID NO: 34553 - DNA, 1371 bp, Muscodor strobelii
  misc_feature: SGI cDNA ID NO. 571945
  misc_feature: Reduced expression when VOC is produced
  misc_feature: Encodes the peptide sequence at SEQ ID NO 34554
atgcatcagaaactcgctaccatcgcggcctttgtcgccactaactcgaggataggcgtccgtgctcaagcggcctgcactcttaccgctgagacgcacccgtccatgacatggcaacaatgcgcggccggtggaagctgcacaacgaaaagtggcaaagtaaccgttgatgctaactggcgatggactcaccaaacttcgtcaagtaccaactgctataccggaaatgagtgggatacttctatctgcagcacaaatgcggcctgcgctacggcctgctgtgtcgacggtgctgactatgccggtacatatggtgctacaacgtccggtaacgctctcaatctcaaattcgtcacccaaggcccatacagcaccaacatcggatcccgaatgtacctgatggccagcgacactcaataccagggcttcaagctgcttggcaatgagttcactttcgatgtcgatgtttcaaaccttccttgcggtttgaatggtgctctttacttcgtgtccatggaccttgacggtggcatggccaagtattcaagcaacaaggctggtgccaagttcggcacaggttactgtgacgcccaatgccctcgcgatctcaagttcatcaacggccaggccaacgttgaaggctggaagccctcgtccaacgatgcaaacgctggcgtcggtaacctgggcagctgctgcgctgagatggatatctgggaagccaacaagatggccactgcctacactcctcatccctgcacgaacaacgcccaacactcttgcaacggagacgcttgtggtggaacctactccagcactcgctacgctggagactgcgatcccgacggatgcgacttcaacagctaccgcatgggcgacacatctttcttcgggccgggcatgaccgttgacaccaactcgcccgtcactgtcgtcactcaattccttacctccggctcgaccctctcggagatcaagcgtttctacatccagaacggcaaggtcatccccaacagtcagagcacgatctccggtgttaccggcaactccgtcacgcccaagttctgcgatgctcagaagaccgctttcggcgacaccaacgtgtttgaccagaagggtggatttgccggtatttccaaggctctggcgggcgacatggttctcgttatgtccctgtgggacgaccactacgccgacatgctctggctcgattctacttaccccgttggctcgagcaaggctggctccgctcgtggcacttgctcttctacctctggtgttcccgctaccgttgagtcccagagcggaagcgccagcgtcaagtactcgaacatcaagttcggtcctatcaactctactttcactcagtaa

SEQ ID NO: 34554 - protein, 456 aa, Muscodor strobelii
  misc_feature: SGI Peptide ID NO. 571945
  misc_feature (24)..(456): Pfam Id: PF00840 Pfam Desc: Glycosyl hydrolase family 7
  misc_feature (21)..(455): NCBI GI: 156712278 Blast Desc: cellulose 1,4-beta-cellobiosidase [Acremonium thermophilum]
  misc_feature (1)..(454): NCBI GI: 39977899 Blast Desc: MGG_06834 [Magnaporthe grisea 70-15] gi|145013609|gb|EDJ98250.1| MGG_06834 [Magnaporthe grisea 70-15]
  misc_feature (1)..(455): NCBI GI: 56718412 Blast Desc: cellobiohydrolase precursor [Thermoascus aurantiacus var. levisporus]
  misc_feature (1)..(455): NCBI GI: 156712284 Blast Desc: cellulose 1,4-beta-cellobiosidase [Thermoascus aurantiacus]
  misc_feature (23)..(453): NCBI GI: 156712282 Blast Desc: cellulose 1,4-beta-cellobiosidase [Chaetomium thermophilum]
  misc_feature (1)..(455): NCBI GI: 18997123 Blast Desc: AF478686_1 cellobiohydrolase I [Thermoascus aurantiacus]
  misc_feature (26)..(453): NCBI GI: 58045187 Blast Desc: cellobiohydrolase [Chaetomium thermophilum]
  misc_feature (23)..(450): NCBI GI: 85108032 Blast Desc: exoglucanase 1 precursor [Neurospora crassa OR74A] gi|74696551|sp|Q7SA23.1|GUX1A_NEUCR RecName: Full=Exoglucanase 1; AltName: Full=Exocellobiohydrolase 1; AltName: 1; Flags: 1 crassa
  misc_feature (1)..(455): NCBI GI: 16304152 Blast Desc: AF421954_1 cellobiohydrolase precursor [Thermoascus aurantiacus]
  misc_feature (31)..(453): NCBI GI: 50844407 Blast Desc: CBHI [Chaetomium thermophilum var. thermophilum]
  misc_feature (23)..(450): SWISSPROT Homolog: EC 3.2.1.91 Cellulose 1,4-beta-cellobiosidase
  misc_feature: Useful for introducing or modulating the production of volatile compounds
MHQKLATIAAFVATNSRIGVRAQAACTLTAETHPSMTWQQCAAGGSCTTKSGKVTVDANWRWTHQTSSSTNCYTGNEWDTSICSTNAACATACCVDGADYAGTYGATTSGNALNLKFVTQGPYSTNIGSRMYLMASDTQYQGFKLLGNEFTFDVDVSNLPCGLNGALYFVSMDLDGGMAKYSSNKAGAKFGTGYCDAQCPRDLKFINGQANVEGWKPSSNDANAGVGNLGSCCAEMDIWEANKMATAYTPHPCTNNAQHSCNGDACGGTYSSTRYAGDCDPDGCDFNSYRMGDTSFFGPGMTVDTNSPVTVVTQFLTSGSTLSEIKRFYIQNGKVIPNSQSTISGVTGNSVTPKFCDAQKTAFGDTNVFDQKGGFAGISKALAGDMVLVMSLWDDHYADMLWLDSTYPVGSSKAGSARGTCSSTSGVPATVESQSGSASVKYSNIKFGPINSTFTQ

SEQ ID NO: 34555 - DNA, 2978 bp, Muscodor strobelii; identical to SEQ ID NO: 34552
  misc_feature: SGI EST ID NO. CUFF.82108.0
  misc_feature: Variant of the nucleotide sequence at SEQ ID NO 34553

SEQ ID NO: 34556 - DNA, 2160 bp, Muscodor strobelii
  misc_feature: SGI cDNA ID NO. 571946
  misc_feature: Encodes the peptide sequence at SEQ ID NO 34557
atggggagcaagaccaagaaggctcccgtcgcgggagatctcgaggcggcgcatgcctcttcttctgccctcgtgatatgtaggaacaagcattggcgatatatctcctccttccacggcccctggctccaattgcctctcgaagtcctcgaaacactggccaatgcgaactactacatgcccctcccgcgccccgtcgacccggctgtcttctacgatctgctcaagatccgccagcttgtcgatggcgccaccgatctggctgtccgcgctgccaatggcgtgacatcctctgccatgtctgcttcgcttggtggcggctcttcgcatcacatgcagactctgggtttggggttcgggaacacgaccggcgccaaactcagcccggaaaggaggtttcgtatgcgcgagcaggccacccagaagctgtcgcgcgcctaccaccttgacgagattgcttccagtgtcgccatgatgcaggctacatccacgcttgagaatgtcgcttcactggtgctgcagagggccccggacgaccccgacgcaaactacgtccatttcttccacgagaagatcccatccagacagctggctgagtgcacggatttccgtgctctcaattctatagttcacaaccggcccgccgagagcgagccgctgcggacgcgcgcaatcgttcgcatgttcaaagaggacttcgaaggtgcggcgcaagatctgactctggcattgaatgtttgccgtcacaacaaaccacacaggcctcacgctgaagaggccatgcaactcgagcgtagatctaatcgacgtcgagacaatcctccccttgacgagcgggatcatcccagcagcacggaagtgcaactcttattccaacgggcagggtgctatctaacattggcatgtgatcatgttgggctggcattggacaaagacagcggcgaacagtctgtacaatcatcgaatggaatattgaattgtcagaatggctttggtgacaggcatggtaatgggaatggcgacgcagcttgcttgccccctgatggcgcagctaatcctggagttgagggacccaccaagcaccagctggaaaatcgcaaagcagtacgcctgtacgcgaagcgagcattgcgggactacatggaatatctgaaatactttcactattctcccaatctgccaattgatgtctctgatgatttcagccggcaagtcaaccaggctacgcaacggagtaagcggtactacgcccagtctcgttggtcgtctcaggaaccaagcagtccactcaccgccaactctgttggccatatcgtctatcccttgaacgctctcctctctgccatgccgcccgcggatcttcctgcttacccggctactgatcttgttcgagcttcttccaagtgcgacccaatggatgtcatagacaggactactgaagttgctacgtatcacccactccttaccgaagccttgcattcattgctcctatgccacgtgcttgtacaaacgtccataaaggagcttcaacggcatgcttacatggtggctcgcctcgttcgccttgcggatggctaccctgtgtttcaaccgagtaggtctcctgctcgcgcggattggatcgaggttctgcgtagagccgacaactggatcgacctcgcgtcaagttgggagacactgtgtgctccagctccacttcctacagcgccagcagcgaacggatcttcgggtgttagttcagggctgaatgctttgtctattgcgggcagagcgagccctaaagaaacaagtgagcaacgcaaagagcgggccaagcaccaggtgatcatcgaagctcttgaagacgatcgtgtgagcgacgaagcgagctttaaggctgctatcactgcgcggcaacaacgcgctgaagctgatcatgctactgctccgagcaacggatctcctaaccctaacagcggcccgaagcgctgggcagttcatgatggcagggagtatcctatcctgaccgagcgtgccgaggcggtcgcgcgatggatccgtgaggcaccatcgacatcgggtatgggtagcagcaagcgcaaaaagaaaccagcgaagaaggcaactcagagtgatctgtccgtatcggctgagagggtgtccgagctagacgatgcttga

SEQ ID NO: 34557 - protein, 719 aa, Muscodor strobelii
  misc_feature: SGI Peptide ID NO. 571946
  misc_feature (20)..(687): NCBI GI: 261201686 Blast Desc: conserved [Ajellomyces dermatitidis SLH14081] gi|239590154|gb|EEQ72735.1| conserved [Ajellomyces dermatitidis SLH14081]
  misc_feature (20)..(687): NCBI GI: 239611867 Blast Desc: conserved [Ajellomyces dermatitidis ER-3]
  misc_feature (20)..(683): NCBI GI: 154315158 Blast Desc: BC1G_04618 [Botryotinia fuckeliana B05.10] gi|150847581|gb|EDN22774.1| BC1G_04618 [Botryotinia fuckeliana B05.10]
  misc_feature (16)..(683): NCBI GI: 156052877 Blast Desc: SS1G_06606 [Sclerotinia sclerotiorum 1980] gi|154704384|gb|EDO04123.1| SS1G_06606 [Sclerotinia sclerotiorum 1980]
  misc_feature (20)..(687): NCBI GI: 226281642 Blast Desc: conserved [Paracoccidioides brasiliensis Pb01]
  misc_feature (6)..(717): NCBI GI: 46107384 Blast Desc: FG00575.1 [Gibberella zeae PH-1]
  misc_feature (20)..(687): NCBI GI: 225679513 Blast Desc: conserved [Paracoccidioides brasiliensis Pb03]
  misc_feature (23)..(639): NCBI GI: 164426389 Blast Desc: NCU08650 [Neurospora crassa OR74A] gi|157071317|gb|EAA32715.2| [Neurospora crassa OR74A]
  misc_feature (24)..(715): NCBI GI: 256734499 Blast Desc: NECHADRAFT_65620 [Nectria haematococca mpVI 77-13-4]
  misc_feature (16)..(683): NCBI GI: 189205719 Blast Desc: conserved [Pyrenophora tritici-repentis Pt-1C-BFP] gi|187975287|gb|EDU41913.1| conserved [Pyrenophora tritici-repentis Pt-1C-BFP]
MGSKTKKAPVAGDLEAAHASSSALVICRNKHWRYISSFHGPWLQLPLEVLETLANANYYMPLPRPVDPAVFYDLLKIRQLVDGATDLAVRAANGVTSSAMSASLGGGSSHHMQTLGLGFGNTTGAKLSPERRFRMREQATQKLSRAYHLDEIASSVAMMQATSTLENVASLVLQRAPDDPDANYVHFFHEKIPSRQLAECTDFRALNSIVHNRPAESEPLRTRAIVRMFKEDFEGAAQDLTLALNVCRHNKPHRPHAEEAMQLERRSNRRRDNPPLDERDHPSSTEVQLLFQRAGCYLTLACDHVGLALDKDSGEQSVQSSNGILNCQNGFGDRHGNGNGDAACLPPDGAANPGVEGPTKHQLENRKAVRLYAKRALRDYMEYLKYFHYSPNLPIDVSDDFSRQVNQATQRSKRYYAQSRWSSQEPSSPLTANSVGHIVYPLNALLSAMPPADLPAYPATDLVRASSKCDPMDVIDRTTEVATYHPLLTEALHSLLLCHVLVQTSIKELQRHAYMVARLVRLADGYPVFQPSRSPARADWIEVLRRADNWIDLASSWETLCAPAPLPTAPAANGSSGVSSGLNALSIAGRASPKETSEQRKERAKHQVIIEALEDDRVSDEASFKAAITARQQRAEADHATAPSNGSPNPNSGPKRWAVHDGREYPILTERAEAVARWIREAPSTSGMGSSKRKKKPAKKATQSDLSVSAERVSELDDA

SEQ ID NO: 34558 - DNA, 3530 bp, Muscodor strobelii
  misc_feature: SGI EST ID NO. CUFF.82111.1
  misc_feature: Variant of the nucleotide sequence at SEQ ID NO 34556
gggaacccggcactcaatttgaacctggcttaaacttactcttagaggcaattgtacattcactaggatgtacctacatggggctaagatgaggtaccacgcaggcaaaatcaggtagctcatagcgggctcggcactgattgaccggggacgtacaggtacgatgcgcccgcgataagaaacttccatattgcaaaagtcgacgcaattcaaatgaaacaccacgcaactcgaccgaattcatactctatagctgtccactctgtgcttcttcaagtaacagtagcctgagcacagcgtatttgttacaggtctttgggagattccaacaatcccatctgaccagacattgctccctttctctgtcgaaagcgcaggtacggagtgcgctccgggactgcgacacattgcgctccgaattgcgattcaagtcccattgttcaaacgatgcatcgccgcattgcgacctgctagtttgactccattcgcccatcgcttgcagtgcttcccgatccgaatccaattgtgccaatgattgattggctgcattgtatcccgctgtccatacctcaagctataccccagctaccttgcagctatcccaccaacagccactacactgcgcaatggggagcaagaccaagaaggctcccgtcgcgggagatctcgaggcggcgcatgcctcttcttctgccctcgtgatatgtaggaacaagcattggcgatatatctcctccttccacggcccctggctccaattgcctctcgaagtcctcgaaacactggccaatgcgaactactacatgcccctcccgcgccccgtcgacccggctgtcttctacgatctgctcaagatccgccagcttgtcgatggcgccaccgatctggctgtccgcgctgccaatggcgtgacatcctctgccatgtctgcttcgcttggtggcggctcttcgcatcacatgcagactctgggtttggggttcgggaacacgaccggcgccaaactcagcccggaaaggaggtttcgtatgcgcgagcaggccacccagaagctgtcgcgcgcctaccaccttgacgagattgcttccagtgtcgccatgatgcaggctacatccacgcttgagaatgtcgcttcactggtgctgcagagggccccggacgaccccgacgcaaactacgtccatttcttccacgagaagatcccatccagacagctggctgagtgcacggatttccgtgctctcaattctatagttcacaaccggcccgccgagagcgagccgctgcggacgcgcgcaatcgttcgcatgttcaaagaggacttcgaaggtgcggcgcaagatctgactctggcattgaatgtttgccgtcacaacaaaccacacaggcctcacgctgaagaggccatgcaactcgagcgtagatctaatcgacgtcgagacaatcctccccttgacgagcgggatcatcccagcagcacggaagtgcaactcttattccaacgggcagggtgctatctaacattggcatgtgatcatgttgggctggcattggacaaagacagcggcgaacagtctgtacaatcatcgaatggaatattgaattgtcagaatggctttggtgacaggcatggtaatgggaatggcgacgcagcttgcttgccccctgatggcgcagctaatcctggagttgagggacccaccaagcaccagctggaaaatcgcaaagcagtacgcctgtacgcgaagcgagcattgcgggactacatggaatatctgaaatactttcactattctcccaatctgccaattgatgtctctgatgatttcagccggcaagtcaaccaggctacgcaacggagtaagcggtactacgcccagtctcgttggtcgtctcaggaaccaagcagtccactcaccgccaactctgttggccatatcgtctatcccttgaacgctctcctctctgccatgccgcccgcggatcttcctgcttacccggctactgatcttgttcgagcttcttccaagtgcgacccaatggatgtcatagacaggactactgaagttgctacgtatcacccactccttaccgaagccttgcattcattgctcctatgccacgtgcttgtacaaacgtccataaaggagcttcaacggcatgcttacatggtggctcgcctcgttcgccttgcggatggctaccctgtgtttcaaccgagtaggtctcctgctcgcgcggattggatcgaggttctgcgtagagccgacaactggatcgacctcgcgtcaagttgggagacactgtgtgctccagctccacttcctacagcgccagcagcgaacggatcttcgggtgttagttcagggctgaatgctttgtctattgcgggcagagcgagccctaaagaaacaagtgagcaacgcaaagagcgggccaagcaccaggtgatcatcgaagctcttgaagacgatcgtgtgagcgacgaagcgagctttaaggctgctatcactgcgcggcaacaacgcgctgaagctgatcatgctactgctccgagcaacggatctcctaaccctaacagcggcccgaagcgctgggcagttcatgatggcagggagtatcctatcctgaccgagcgtgccgaggcggtcgcgcgatggatccgtgaggcaccatcgacatcgggtatgggtagcagcaagcgcaaaaagaaaccagcgaagaaggcaactcagagtgatctgtccgtatcggctgagagggtgtccgagctagacgatgcttgagttgagttaacagcttggatgactagcgcagcagtcgtagtatcgtcattcacatggtatatagtaggcatcgcgatgtgtagtcttgttggaacatatcaggggaagccaatgtcatcacttcatcgaatgatgttttgttatcactgcttgaggggaactctgaactcgatgaatagtcttaaaaaccacggtcagatcacaaaacagtacttgactccgcgtacaagtgcccacgatgaatcgatcgtggccaaaatgtatagtacttgccaaaataggaacgctgtaccggaccaaaatccgaatccggagtccggagacggatggcaagatctcaggttgcttttgaaatcttacttggggtatcaattaaaaagcgacgatgttacaagcatactgacgatgctgatgaacgaatggtatgtggcctgcatgtttaattaagtgctcggcgtcagcttcgtgcgatgtattcatgcaaagcaaatatacctacaatgacagtcacaaacctacgatatcaggtcattcggaataccaactcgccaatgcgcattcttcggccccggaagccgtttggttcttagatctatctattttgaacgactacatctttgtgtttcaagacaaacaaccaattatctgactatgagcaggatacaatttgagatatcgtctcggctggctctcgccgcaatgtaactgcgtgggaacccaatctaactagaggccttgttcatg

SEQ ID NO: 34559 - DNA, 1422 bp, Muscodor strobelii
  misc_feature: SGI cDNA ID NO. 571947
  misc_feature: Encodes the peptide sequence at SEQ ID NO 34560
atgaatcagctcgacaccgattacgtgttcattacacacgaagattcagtgggctcggcgatatgcaattcccaatgccttgacgacatcagcacattcatcgaaagtatcgcagacgaactatggaccattaataagaaaatacacgataatcccgagttgggatacaaggaattcattgctcatgaaacgctgacgcgcttcttggaaagccgtccgagatgggctgtgactcgatctgcatatggaatggaaaccgcttgggtcgcggtatttgatagcggaaaaaaagggccggtagtatcttttaacgttgaaatggatgcgttggaaggcattggacatgcgtgcggccacaacctcatcgcaacagcgtcaatcgcaggaggactagccacagccgaattgctaaaacaaagcaaacttggaggaaaggtggtactcttcgggacacccgctgaggaaggaggcggaggcaagatcagacttttgaaggcggaagcatataaagagcatgaagtcgacgtcaatttgctttctcacccgggtatcgtgaagaaccacgcgataatgcgcacagcagcctatacatcattcaaggttgagtattttggacgcgaagcacatgctgcggcgagcccgtgggagggaatcaacgcactggacgccctgataacagcctacaacgccatatctgttcttcggcaacagacaatgccgggcgatgtcatacagtgcaacatcacccacggcggctcgcggcccaacataattcatgcctacgcagctggaaactttgtcgtaagagctaatacacaatcacggctggcagaactcgaagtgaaaatcaaggcatgcctcgaggccggcgcatctgcatcgggcgccaggctcacgatgacacaagtcatggcgtatgccgaccatgtaccgaaccgcgtgcttgcggatcactaccgacgatatttcaacgagctccaccccgaagatccaattcccgataatccagagttggaggagattgaagggcgtacgatggcgagtacagaccaagggaatgttagttatgcgatgccgagcatcaatgtaggattttgtattccgcctggccctgggaacgctggacctcgtcaaaacttcttcttcttcttcaaaactaacggtatcacagtgagtcatgccaagttggttcaaatccaagcaaccaaagttacgccatgcctgttcaggtggacatgcttacacatcacagataatcctggttttgcggagacagcagggacaaaggaagcatttacaagatgccttcgggttggcaaagcgatggccggagtcggagttgatattctccaggacgaaaagatgctcaaagacgtcaagagagaatggagaaaagacgtgggaaaaacgaattcgcgttaa

SEQ ID NO: 34560 - protein, 473 aa, Muscodor strobelii
  misc_feature: SGI Peptide ID NO. 571947
  misc_feature (198)..(295): Pfam Id: PF07687 Pfam Desc: Peptidase dimerisation domain
  misc_feature (5)..(473): NCBI GI: 164424516 Blast Desc: NCU07100 [Neurospora crassa OR74A] gi|157070547|gb|EAA31025.2| [Neurospora crassa OR74A]
  misc_feature (27)..(471): NCBI GI: 171685312 Blast Desc: protein product [Podospora anserina] gi|170942617|emb|CAP68269.1| protein product [Podospora anserina]
  misc_feature (30)..(467): NCBI GI: 145602171 Blast Desc: MGG_12935 [Magnaporthe grisea 70-15] gi|145010601|gb|EDJ95257.1| MGG_12935 [Magnaporthe grisea 70-15]
  misc_feature (27)..(340): NCBI GI: 169608548 Blast Desc: SNOG_07356 [Phaeosphaeria nodorum SN15] gi|160701669|gb|EAT84822.2| SNOG_07356 [Phaeosphaeria nodorum SN15]
  misc_feature (23)..(471): NCBI GI: 116200929 Blast Desc: CHGG_08349 [Chaetomium globosum CBS 148.51] gi|88176867|gb|EAQ84335.1| CHGG_08349 [Chaetomium globosum CBS 148.51]
  misc_feature (27)..(471): NCBI GI: 256722484 Blast Desc: NECHADRAFT_77183 [Nectria haematococca mpVI 77-13-4]
  misc_feature (24)..(465): NCBI GI: 256733818 Blast Desc: NECHADRAFT_36035 [Nectria haematococca mpVI 77-13-4]
  misc_feature (24)..(465): NCBI GI: 46124471 Blast Desc: FG06613.1 [Gibberella zeae PH-1]
  misc_feature (30)..(465): NCBI GI: 261357930 Blast Desc: aminobenzoyl-glutamate utilization protein B [Verticillium albo-atrum VaMs.102]
  misc_feature (17)..(467): NCBI GI: 39976323 Blast Desc: MGG_05912 [Magnaporthe grisea 70-15] gi|145011839|gb|EDJ96495.1| MGG_05912 [Magnaporthe grisea 70-15]
  misc_feature (44)..(287): SWISSPROT Homolog: EC 3.5.1.47 N-acetyldiaminopimelate deacetylase
MNQLDTDYVFITHEDSVGSAICNSQCLDDISTFIESIADELWTINKKIHDNPELGYKEFIAHETLTRFLESRPRWAVTRSAYGMETAWVAVFDSGKKGPVVSFNVEMDALEGIGHACGHNLIATASIAGGLATAELLKQSKLGGKVVLFGTPAEEGGGGKIRLLKAEAYKEHEVDVNLLSHPGIVKNHAIMRTAAYTSFKVEYFGREAHAAASPWEGINALDALITAYNAISVLRQQTMPGDVIQCNITHGGSRPNIIHAYAAGNFVVRANTQSRLAELEVKIKACLEAGASASGARLTMTQVMAYADHVPNRVLADHYRRYFNELHPEDPIPDNPELEEIEGRTMASTDQGNVSYAMPSINVGFCIPPGPGNAGPRQNFFFFFKTNGITVSHAKLVQIQATKVTPCLFRWTCLHITDNPGFAETAGTKEAFTRCLRVGKAMAGVGVDILQDEKMLKDVKREWRKDVGKTNSR

SEQ ID NO: 34561 - DNA, 1832 bp, Muscodor strobelii
  misc_feature: SGI EST ID NO. CUFF.82133.1
  misc_feature: Variant of the nucleotide sequence at SEQ ID NO 34559
gcgcccgtcacataaaatcttcctcgacatattccaaaatatgaatcagctcgacaccgattacgtgttcattacacacgaagattcagtgggctcggcgatatgcaattcccaatgccttgacgacatcagcacattcatcgaaagtatcgcagacgaactatggaccattaataagaaaatacacgataatcccgagttgggatacaaggaattcattgctcatgaaacgctgacgcgcttcttggaaagccgtccgagatgggctgtgactcgatctgcatatggaatggaaaccgcttgggtcgcggtatttgatagcggaaaaaaagggccggtagtatcttttaacgttgaaatggatgcgttggaaggcattggacatgcgtgcggccacaacctcatcgcaacagcgtcaatcgcaggaggactagccacagccgaattgctaaaacaaagcaaacttggaggaaaggtggtactcttcgggacacccgctgaggaaggtgtgtccacgaacacatgaatttcactaatcttctgcttgactaggaactaagcatgagtaggaggcggaggcaagatcagacttttgaaggcggaagcatataaagagcatgaagtcgacgtcaatttgctttctcacccgggtatcgtgaagaaccacgcgataatgcgcacagcagcctatacatcattcaaggttgagtattttggacgcgaagcacatgctgcggcgagcccgtgggagggaatcaacgcactggacgccctgataacagcctacaacgccatatctgttcttcggcaacagacaatgccgggcgatgtcatacagtgcaacatcacccacggcggctcgcggcccaacataattcatgcctacgcagctggaaactttgtcgtaagagctaatacacaatcacggctggcagaactcgaagtgaaaatcaaggcatgcctcgaggccggcgcatctgcatcgggcgccaggctcacgatgacacaagtcatggcgtatgccgaccatgtaccgaaccgcgtgcttgcggatcactaccgacgatatttcaacgagctccaccccgaagatccaattcccgataatccagagttggaggagattgaagggcgtacgatggcgagtacagaccaagggaatgttagttatgcgatgccgagcatcaatgtaggattttgtattccgcctggccctgggaacgctggacctcgtgagtcatgccaagttggttcaaatccaagcaaccaaagttacgccatgcctgttcaggtggacatgcttacacatcacagataatcctggttttgcggagacagcagggacaaaggaagcatttacaagatgccttcgggttggcaaagcgatggccggagtcggagttgatattctccaggacgaaaagatgctcaaagacgtcaagagagaatggagaaaagacgtgggaaaaacgaattcgcgttaaaagctacataaggtagcggatgatatgtgtgagtatagaacgaaatatatatttgacgttaggcagaacaaagactctcacgaagtaggtattgattgtaaaccacgctggcttgttcccttctctttgaggggagatttgttagctttcatgcggatagatgtcccacataccgagaattaacatcatcctaacttctgggcacattatgtccataagcttctaagctttgaggcggcagttccatcgctgcactgattgtatcagatgaggtagaagcgtacatttctcaaagtacggtacacaagctaaggtattgatgttctacgactcccacgtgatgactgg

SEQ ID NO: 34562 - DNA, 1551 bp, Muscodor strobelii
  misc_feature: SGI cDNA ID NO. 571948
  misc_feature: Encodes the peptide sequence at SEQ ID NO 34563
atggttagctccaagaaagtctacaactggtacatagcccttgtggctgccatgtgtatggttttgtacgggtatgatgccgccgtcttcaacgctgtccaggcctccgacaactggctcgcttggtttgatctcgacattgcaagtctagtgatgaccgcctacacaattggagccattttctcgggattcttccttgctggaccaaccgcggattactttggtagaagggttggaatgggtcttggttgctttattaccattatcgccacctttattcaaacttttgccccatatcacaacctcggagctttcattggcggccgtgttctggttggtattggccaaggcctggcactgactgccggatcaatctatatcggagaggtatccgttgccgaagtccgtggcagaattatgacattctggcaagcattttatagtgttggtgccttcatcgcctactggatcgcttacgctgccaacctatacaaaaagaggctaggggactgggactggcgtatcgtcgtcattttccagatcctggtcccggccatcgtcatcgctctcctcccctttcaacctgaatcaccgcgttggtatatcaagcgccacaagaacatcgagaaagctagacatgctctgcgtcgcattcgggatacagagcaagaagttgaggacgagattctcgctattcgtgaggctatcgaatacgaaaatgaggcaatcagtggttcttacaaggccttgttcaaggatccttctctgcggaaacgtctcttccttggtgtcatcatcaatgttggccagcaactcacgggtcaaggaacattaaactcctactcgagcaccatctacaagggagtgttcgcctctagttcgactatcaatttgataaacgcattaaacgccacatttggtatcttcttcaccctaaatgcttggtggacttccgaccgcttcggtcgacgttggctactcatggttggagcaactggtatggctattgtcatgctcattgttccgattgttggtcagaagacacccaacatcgtccaacctgatgggtcgatgacaaagtcggagccagtcggcatcgcgattgtcttcttgttattcctattcatattcttttacaagccatcctggggcgcgacggtttggatctggacatcagaagtcttcagcatgaacgtgcgcgcacaagccgttggcatgtgttcgcagagtcagaacgtcgccaatgcgatattccagcaattcttccccatcttcctcgcgaacgagggactgaagtgtctgtacttcttcttcacaaccaatgtcttgctcctcgtgtttgtgtactttttgatccccgagacgaagcgtgtgccactcgaggagatggatactctgtttggtggccaaaatcacgtagagaagggcgctcagatacttggtgtgcccgatgcgcaccatgctacaattggcgagaatagtgagaagggcccggctgtcaacgagcatgagacgactgccccggccgctgccaaggagattggtgtctag

SEQ ID NO: 34563 - protein, 516 aa, Muscodor strobelii
  misc_feature: SGI Peptide ID NO. 571948
  misc_feature (16)..(419): Pfam Id: PF07690 Pfam Desc: Major Facilitator Superfamily
  misc_feature (12)..(467): Pfam Id: PF00083 Pfam Desc: Sugar (and other) transporter
  misc_feature (1)..(496): NCBI GI: 39969841 Blast Desc: MGG_10530 [Magnaporthe grisea 70-15] gi|145010171|gb|EDJ94827.1| MGG_10530 [Magnaporthe grisea 70-15]
  misc_feature (1)..(504): NCBI GI: 46107378 Blast Desc: FG00572.1 [Gibberella zeae PH-1]
  misc_feature (1)..(510): NCBI GI: 255936957 Blast Desc: Pc13g10850 [Penicillium chrysogenum Wisconsin 54-1255] gi|211584125|emb|CAP92154.1| Pc13g10850 [Penicillium chrysogenum Wisconsin 54-1255]
  misc_feature (6)..(494): NCBI GI: 154315182 Blast Desc: BC1G_04630 [Botryotinia fuckeliana B05.10] gi|150847593|gb|EDN22786.1| BC1G_04630 [Botryotinia fuckeliana B05.10]
  misc_feature (1)..(496): NCBI GI: 189189594 Blast Desc: sugar transporter [Pyrenophora tritici-repentis Pt-1C-BFP] gi|187972742|gb|EDU40241.1| sugar transporter [Pyrenophora tritici-repentis Pt-1C-BFP]
  misc_feature (2)..(505): NCBI GI: 256735581 Blast Desc: NECHADRAFT_75567 [Nectria haematococca mpVI 77-13-4]
  misc_feature (3)..(500): NCBI GI: 154323678 Blast Desc: BC1G_00238 [Botryotinia fuckeliana B05.10] gi|150842467|gb|EDN17660.1| BC1G_00238 [Botryotinia fuckeliana B05.10]
  misc_feature (1)..(502): NCBI GI: 212538651 Blast Desc: MFS sugar transporter, [Penicillium marneffei ATCC 18224] gi|210069223|gb|EEA23314.1| MFS sugar transporter, [Penicillium marneffei ATCC 18224]
  misc_feature (3)..(489): NCBI GI: 156056955 Blast Desc: SS1G_04208 [Sclerotinia sclerotiorum 1980] gi|154701994|gb|EDO01733.1| SS1G_04208 [Sclerotinia sclerotiorum 1980]
  misc_feature (20)..(481): NCBI GI: 67517863 Blast Desc: AN1109.2 [Aspergillus nidulans FGSC A4] gi|40747071|gb|EAA66227.1| AN1109.2 [Aspergillus nidulans FGSC A4] gi|259488576|tpe|CBF88122.1| TPA: MFS sugar transporter, FGSC
MVSSKKVYNWYIALVAAMCMVLYGYDAAVFNAVQASDNWLAWFDLDIASLVMTAYTIGAIFSGFFLAGPTADYFGRRVGMGLGCFITIIATFIQTFAPYHNLGAFIGGRVLVGIGQGLALTAGSIYIGEVSVAEVRGRIMTFWQAFYSVGAFIAYWIAYAANLYKKRLGDWDWRIVVIFQILVPAIVIALLPFQPESPRWYIKRHKNIEKARHALRRIRDTEQEVEDEILAIREAIEYENEAISGSYKALFKDPSLRKRLFLGVIINVGQQLTGQGTLNSYSSTIYKGVFASSSTINLINALNATFGIFFTLNAWWTSDRFGRRWLLMVGATGMAIVMLIVPIVGQKTPNIVQPDGSMTKSEPVGIAIVFLLFLFIFFYKPSWGATVWIWTSEVFSMNVRAQAVGMCSQSQNVANAIFQQFFPIFLANEGLKCLYFFFTTNVLLLVFVYFLIPETKRVPLEEMDTLFGGQNHVEKGAQILGVPDAHHATIGENSEKGPAVNEHETTAPAAAKEIGV

SEQ ID NO: 34564 - DNA, 633 bp, Muscodor strobelii
  misc_feature: SGI EST ID NO. CUFF.82124.0
  misc_feature: Variant of the nucleotide sequence at SEQ ID NO 34562
cgtgttctggttggtattggccaaggcctggcactgactgccggatcaatctatatcggagaggtatccgttgccgaagtccgtggcagaattatgacattctggcaagcattttatagtgttggtgccttcatcgcctactggatcgcttacgctgccaacctatacaaaaagaggctaggggactgggactggcgtatcgtcgtcattttccagatcctggtcccggccatcgtcatcgctctcctcccctttcaacctgaatcaccgcgttggtatatcaagcgccacaagaacatcgagaaagctagacatgctctgcgtcgcattcgggatacagagcaagaagttgaggacgagattctcgctattcgtgaggctatcgaatacgaaaatgaggcaatcagtggttcttacaaggccttgttcaaggatccttctctgcggaaacgtctcttccttggtgtcatcatcaatgttggccagcaactcacgggtcaaggaacattaaactcctactcgagcaccatctacaagggagtgttcgcctctagttcgactatcaatttgataaacgcattaaacgccacatttggtatcttcttcaccctaaatgcttggtggacttccgac

SEQ ID NO: 34565 - DNA, 1923 bp, Muscodor strobelii
  misc_feature: SGI cDNA ID NO. 571949
  misc_feature: Encodes the peptide sequence at SEQ ID NO 34566
atgggccgatcaagtttttctgataatcctctgttacgtgtgtcccgtccagtatccgcttgctctagatgtcgagcagccaaggtcaagtgtgatggcaaattaccagcctgcacagcttgtgaaaaggctggccgggaaacagaatgctcggcagccaacgatcagttcgcaaggggtaaggagagaagctatgtcgctgcgcttgagctccgcatagagaagatggagagacggcttgcttttgcgcgctccaggaaggcatcactcgtgcaacacggaactgaatcactacctcctatcccagaaacagataggaaagactcactcgcggccattcgtgatgccatttatcggaaggcggtaaggagccgggagaattctgatgttaactcgcttatgtccgattttggtttcctctcaatcaacgcaacgaccagggattttgaaccattgtcgagcaacatgacctttgctcgactagtgctagccgctgcccaaaacgaccccttacccattgaacatgaaaattggaacatgccgtctaggcaagacgccctttctcttgttcaatactacatgacaaacgtttattctctatatcccgctttctccgaaactgttctgttcaatgctctagatcaagtgtactcaatgcaagaccgcattgtgaaagataccgaatattggctactttacatggttttggccattggctcgagcgcacaaagtcaggtgaagaatgatcaatactacgttgatgggctttatttggtctcgcgtgcgcttaggcatgcggaccaggcactcatgccaggctatacaacacaaatacagtccctgattttactaacacaatattcaacccttgacccggcacattttgatagttggcatctaatcgggttcacatgccgtgctgttatagatatggggtttcaccaggatcctccacctgagcagctatcagataaagcagtgttggacatgcggcggaaaaccttctactgcgtgtactcgctagatcgctccatcagcatggttctcacgcgagccttttccttcacagatgctgcgacaaatgtagcctggccaaggacatcttcgttcagccgcagagcatctataactggacagtacctatccgggtctgaacctgcttttctactctttcaactgcggcgtgcccagtcgcattggtatcaagcgttgtttgaagcggatccaactccgctcccagactcgacattcatctggcaaatgtgccaggatatgcgggaatgggcagaagcactccccaatacgttaccaataggcatgagagagcttttcgatctcgaagtgagatacagttatgtttactgcatatctccttctgctaaagctccagcccctactgactacggaagagttctcatatttgagcacgccctttcctacttggatcgcatctatgagatagcacacagcggaaagaacacggctttctattcgtatcatgatgctctacgggtctatttcatggccagccaatttgttgcggttctacgcgatgctgaaggacttcttctcgctggaatcacaccaccaccccctccattcgatatgaataaggcaatgcctccaccactgccgcacagagcaggcgggccggggatcgacaacctcgaaagaagccttggatgcctagagcggactaaattgaccttagcgaggtacggcgagagatgggacgactcaaaatcgctaaaaagtagttttgaaatgatgtctcacgacattatcgagaaactacgtttgcgccaacagatgcaaatgagacagcgggcatcgccacctcagatgatgcagacgcagatgcgatgggttgacgtaaacgttgaagctatgatgagaggaaatgtcaatggctcgagaagctga

SEQ ID NO: 34566 - protein, 640 aa, Muscodor strobelii
  misc_feature: SGI Peptide ID NO. 571949
  misc_feature (19)..(60): Pfam Id: PF00172 Pfam Desc: Fungal Zn(2)-Cys(6) binuclear cluster domain
  misc_feature (274)..(370): Pfam Id: PF04082 Pfam Desc: Fungal specific transcription factor domain
  misc_feature (1)..(635): NCBI GI: 256734500 Blast Desc: NECHADRAFT_57399 [Nectria haematococca mpVI 77-13-4]
  misc_feature (1)..(604): NCBI GI: 261357793 Blast Desc: Zn(II)2Cys6 cluster transcripitional activator [Verticillium albo-atrum VaMs.102]
  misc_feature (1)..(605): NCBI GI: 10998378 Blast Desc: AF190427_1 GAL4-like transcriptional activator [Glomerella lindemuthiana]
  misc_feature (1)..(598): NCBI GI: 145616415 Blast Desc: MGG_10529 [Magnaporthe grisea 70-15] gi|56694675|gb|AAW23036.1| Zn(II)2Cys6 cluster transcripitional activator [Magnaporthe grisea] gi|145010172|gb|EDJ94828.1| grisea
  misc_feature (5)..(601): NCBI GI: 154315166 Blast Desc: BC1G_04622 [Botryotinia fuckeliana B05.10] gi|150847585|gb|EDN22778.1| BC1G_04622 [Botryotinia fuckeliana B05.10]
  misc_feature (1)..(582): NCBI GI: 116196760 Blast Desc: CHGG_04978 [Chaetomium globosum CBS 148.51] gi|88180891|gb|EAQ88359.1| CHGG_04978 [Chaetomium globosum CBS 148.51]
  misc_feature (1)..(634): NCBI GI: 46107380 Blast Desc: FG00573.1 [Gibberella zeae PH-1]
  misc_feature (1)..(578): NCBI GI: 164633069 Blast Desc: Zn(II)2Cys6 cluster transcriptional activator [Cryphonectria parasitica]
  misc_feature (3)..(604): NCBI GI: 171676766 Blast Desc: protein product [Podospora anserina] gi|170936450|emb|CAP61107.1| protein product [Podospora anserina]
  misc_feature (8)..(609): NCBI GI: 85105391 Blast Desc: NCU08652 [Neurospora crassa OR74A] gi|28923541|gb|EAA32717.1| [Neurospora crassa OR74A]
MGRSSFSDNPLLRVSRPVSACSRCRAAKVKCDGKLPACTACEKAGRETECSAANDQFARGKERSYVAALELRIEKMERRLAFARSRKASLVQHGTESLPPIPETDRKDSLAAIRDAIYRKAVRSRENSDVNSLMSDFGFLSINATTRDFEPLSSNMTFARLVLAAAQNDPLPIEHENWNMPSRQDALSLVQYYMTNVYSLYPAFSETVLFNALDQVYSMQDRIVKDTEYWLLYMVLAIGSSAQSQVKNDQYYVDGLYLVSRALRHADQALMPGYTTQIQSLILLTQYSTLDPAHFDSWHLIGFTCRAVIDMGFHQDPPPEQLSDKAVLDMRRKTFYCVYSLDRSISMVLTRAFSFTDAATNVAWPRTSSFSRRASITGQYLSGSEPAFLLFQLRRAQSHWYQALFEADPTPLPDSTFIWQMCQDMREWAEALPNTLPIGMRELFDLEVRYSYVYCISPSAKAPAPTDYGRVLIFEHALSYLDRIYEIAHSGKNTAFYSYHDALRVYFMASQFVAVLRDAEGLLLAGITPPPPPFDMNKAMPPPLPHRAGGPGIDNLERSLGCLERTKLTLARYGERWDDSKSLKSSFEMMSHDIIEKLRLRQQMQMRQRASPPQMMQTQMRWVDVNVEAMMRGNVNGSRS

SEQ ID NO: 34567 - DNA, 2204 bp, Muscodor strobelii
  misc_feature: SGI EST ID NO. CUFF.82130.0
  misc_feature: Variant of the nucleotide sequence at SEQ ID NO 34565
tggcaaattaccagcctgcacagcttgtgaaaaggctggccgggaaacagaatgctcggcagccaacgatcagttcgcaaggggtaaggagagaagctatgtcgctgcgcttgagctccgcatagagaagatggagagacggcttgcttttgcgcgctccaggaaggcatcactcgtgcaacacggaactgaatcactacctcctatcccagaaacagataggaaagactcactcgcggccattcgtgatgccatttatcggaaggcggtaaggagccgggagaattctgatgttaactcgcttatgtccgattttggtttcctctcaatcaacgcaacgaccagggattttgaaccattgtcgagcaacatgacctttgctcgactagtgctagccgctgcccaaaacgaccccttacccattgaacatgaaaattggaacatgccgtctaggcaagacgccctttctcttgttcaatactacatgacaaacgtttattctctatatcccgctttctccgaaactgttctgttcaatgctctagatcaagtgtactcaatgcaagaccgcattgtgaaagataccgaatattggctactttacatggttttggccattggctcgagcgcacaaagtcaggtgaagaatgatcaatactacgttgatgggctttatttggtctcgcgtgcgcttaggcatgcggaccaggcactcatgccaggctatacaacacaaatacagtccctgattttactaacacaatattcaacccttgacccggcacattttgatagttggcatctaatcgggttcacatgccgtgctgttatagatatggggtttcaccaggatcctccacctgagcagctatcagataaagcagtgttggacatgcggcggaaaaccttctactgcgtgtactcgctagatcgctccatcagcatggttctcacgcgagccttttccttcacagatgctgcgacaaatgtagcctggccaaggacatcttcgttcagccgcagagcatctataactggacagtacctatccgggtctgaacctgcttttctactctttcaactgcggcgtgcccagtcgcattggtatcaagcgttgtttgaagcggatccaactccgctcccagactcgacattcatctggcaaatgtgccaggatatgcgggaatgggcagaagcactccccaatacgttaccaataggcatgagagagcttttcgatctcgaagtgagatacagttatgtttactgcatatctccttctgctaaagctccagcccctactgactacggaagagttctcatatttgagcacgccctttcctacttggatcgcatctatgagatagcacacagcggaaagaacacggctttctattcgtatcatgatgctctacgggtctatttcatggccagccaatttgttgcggttctacgcgatgctgaaggacttcttctcgctggaatcacaccaccaccccctccattcgatatgaataaggcaatgcctccaccactgccgcacagagcaggcgggccggggatcgacaacctcgaaagaagccttggatgcctagagcggactaaattgaccttagcgaggtacggcgagagatgggacgactcaaaatcgctaaaaagtagttttgaaatgatgtctcacgacattatcgagaaactacgtttgcgccaacagatgcaaatgagacagcgggcatcgccacctcagatgatgcagacgcagatgcgatgggttgacgtaaacgttgaagctatgatgagaggaaatgtcaatggctcgagaagctgaagcgattttggcatcgagaaagtttccttgtgcgacgaataaattagacaatgatctagcaccaattttgtggtggtggtcttctatatatcagctcagtttcgtatttggtcgatataggacggtatcagcgcggtgtccggtcacaggaatttgttgtcatcaaactatggtgatggcgtagaggtggctgcgtgctgaaataatcaacttattcttctacggagtatgaagtaacaaggctgtcctgcatcagcatggatggaaacatggttcaggattcaagtgtcaagattattggaaagtgggtttggtctagaagaaatatatgactattgatggaaccaactacgacaacttttatgtttgtgtgaac

SEQ ID NO: 34568 - DNA, 1680 bp, Muscodor strobelii
  misc_feature: SGI cDNA ID NO. 571950
  misc_feature: Elevated expression when VOC is produced
  misc_feature: Encodes the peptide sequence at SEQ ID NO 34569
aacggtgatagtgctagattggctgtacggaagtctcagtaccacttcggctgggattggggtccgactcttatcacctgtgggccttggagacccatccatctcgaactatacgaatctcggatcactgatatatggtgcaacgtcgaggtcgacgaatcactcaagaaggccgtggtccatactcgtgtgtcggtagagggcgaagcttcgactgtacgcttggatatctctctcggtgccagtttgaaggggtctgtcgagttcaagccaggagaagaaatccacatggcaatcgatgatcccgagctccgactcgtgcaaagaaagcttgaagggcaacctggtacttcattcttcttcgaagtcaacaacatacctattttctacggaggcagtgactggatccccgcagacaacttcattccccgtattggcaaggacaggtattatgattgggtcaagcttgctgcagatggaaatcaaaacataatacgcgtttggggcggaggcatatacgaagagcaagcattttacaatgcgtacgacgaactcggcattcttgtctggcaagacttcgtgttcagatgtggcaactatcccgcttggccggagcttctagattctatcaagcgcgaagccaaagagaacgtaaaacttttacgtcaccatccttacattgtactctgggctggaaataatgaagattatcagtttgctgaagatacgaaactcaaatgggaccccaagaacacggattctgagagctggcttgagaccgaattcccagcaaggacacaaaagaagtaccaaaacttcgacaagctcgtaggacgattcgtatcggaatttggcatagaggcgttcccttcgatcaagactattgatgcatttttactcggaggtaaagacgacccggatcgctatgctcagtcttcaactgtcgacttccacaataaggcagatggccataagcgccgaatcgctttatacctcgttgagaacttccgatacgcacctgaccccttcaaacagttctccatttataactattatctacggccaaagcatgcttattacaccgtaaagcgggacatggccccgctgactattggtataacacggcataagcatcacgaacctccaacaaacaagtactctcgtatcgataaaacaacgtcaaaaatcgaggtctgggcgggtaatttcacccttgacgaagtaaaagtggactgctcgatccgtggtttcgatgtcgagactaagaaggagctatacgacgagacgatcgctggcctcactctcgcaccgaaccagtcaacagaaatcacaaacaagaacgttgcacgaaggaaggagcattacgaacggcgtattgttatcgctgcttatctcacatcgtcgtcgacgccgcttgcacggtacatcaactggcctgagcccttgaaatacttgcatctccaacgtcccaaagacctcaaatttgagcttagcgaagagactgactccgtgtcaatcagcgctggggtgcccatcaagggactcgctgtagaatgcgaggacgatgtcacgttcaaagataaccttattgatattgtgcccggagagacggtacgtattggggttcgaggcgcaaagaagggcaccaagtttactggtcggtatttggggatggaataa

SEQ ID NO: 34569 - protein, 559 aa, Muscodor strobelii
  misc_feature: SGI Peptide ID NO. 571950
  misc_feature (1)..(558): NCBI GI: 156054258 Blast Desc: SS1G_05977 [Sclerotinia sclerotiorum 1980] gi|154703757|gb|EDO03496.1| SS1G_05977 [Sclerotinia sclerotiorum 1980]
  misc_feature (1)..(558): NCBI GI: 154303355 Blast Desc: BC1G_09426 [Botryotinia fuckeliana B05.10] gi|150854989|gb|EDN30181.1| BC1G_09426 [Botryotinia fuckeliana B05.10]
  misc_feature (1)..(558): NCBI GI: 85115055 Blast Desc: NCU00890 [Neurospora crassa OR74A] gi|28926600|gb|EAA35570.1| NCU00890 [Neurospora crassa OR74A]
  misc_feature (1)..(559): NCBI GI: 46107848 Blast Desc: FG00807.1 [Gibberella zeae PH-1]
  misc_feature (1)..(558): NCBI GI: 261361356 Blast Desc: beta-mannosidase [Verticillium albo-atrum VaMs.102]
  misc_feature (1)..(557): NCBI GI: 145614054 Blast Desc: MGG_01178 [Magnaporthe grisea 70-15] gi|145021032|gb|EDK05161.1| MGG_01178 [Magnaporthe grisea 70-15]
  misc_feature (1)..(558): NCBI GI: 171694832 Blast Desc: protein product [Podospora anserina] gi|170947658|emb|CAP59820.1| protein product [Podospora anserina]
  misc_feature (1)..(558): NCBI GI: 256735520 Blast Desc: NECHADRAFT_90428 [Nectria haematococca mpVI 77-13-4]
  misc_feature (1)..(558): NCBI GI: 116182672 Blast Desc: CHGG_01964 [Chaetomium globosum CBS 148.51] gi|88186261|gb|EAQ93729.1| CHGG_01964 [Chaetomium globosum CBS 148.51]
  misc_feature (1)..(557): NCBI GI: 239611445 Blast Desc: beta-mannosidase [Ajellomyces dermatitidis ER-3]
  misc_feature (9)..(236): SWISSPROT Homolog: EC 3.2.1.25 Beta-mannosidase
  misc_feature: Useful for introducing or modulating the production of volatile compounds
NGDSARLAVRKSQYHFGWDWGPTLITCGPWRPIHLELYESRITDIWCNVEVDESLKKAVVHTRVSVEGEASTVRLDISLGASLKGSVEFKPGEEIHMAIDDPELRLVQRKLEGQPGTSFFFEVNNIPIFYGGSDWIPADNFIPRIGKDRYYDWVKLAADGNQNIIRVWGGGIYEEQAFYNAYDELGILVWQDFVFRCGNYPAWPELLDSIKREAKENVKLLRHHPYIVLWAGNNEDYQFAEDTKLKWDPKNTDSESWLETEFPARTQKKYQNFDKLVGRFVSEFGIEAFPSIKTIDAFLLGGKDDPDRYAQSSTVDFHNKADGHKRRIALYLVENFRYAPDPFKQFSIYNYYLRPKHAYYTVKRDMAPLTIGITRHKHHEPPTNKYSRIDKTTSKIEVWAGNFTLDEVKVDCSIRGFDVETKKELYDETIAGLTLAPNQSTEITNKNVARRKEHYERRIVIAAYLTSSSTPLARYINWPEPLKYLHLQRPKDLKFELSEETDSVSISAGVPIKGLAVECEDDVTFKDNLIDIVPGETVRIGVRGAKKGTKFTGRYLGME

SEQ ID NO: 34570 - DNA, 2085 bp, Muscodor strobelii
  misc_feature: SGI EST ID NO. CUFF.82159.0
  misc_feature: Variant of the nucleotide sequence at SEQ ID NO 34568
ctcagtaccacttcggctgggattggggtccgactcttatcacctgtgggccttggagacccatccatctcgaactatacgaatctcggatcactgatatatggtgcaacgtcgaggtcgacgaatcactcaagaaggccgtggtccatactcgtgtgtcggtagagggcgaagcttcgactgtacgcttggatatctctctcggtgccagtttgaaggggtctgtcgagttcaagccaggagaagaaatccacatggcaatcgatgatcccgagctccggtatccgaatcaatatgggaattaaccactgtatacagtgacggctaccatcttgatagatggccaacccatagatagcatgagaaagcgcataggactacgacgtgccagactcgtgcaaagaaagcttgaagggcaacctggtacttcattcttcttcgaagtcaacaacatacctattttctacggaggcagtgactggatccccgcagacaacttcattccccgtattggcaaggacaggtattatgattgggtcaagcttgctgcagatggaaatcaaaacataatacgcgtttggggcggaggcatatacgaagagcaagcattttacaatgcgtacgacgaactcggcattcttgtctggcaagacttcgtgttcagatgtggcaactatcccgcttggccggagcttctagattctatcaagcgcgaagccaaagagaacgtaaaacttttacgtcaccatccttacattgtactctgggctggaaataatgaagattatcagtttgctgaagatacgaaactcaaatgggaccccaagaacacggattctgagagctggcttgagaccgaattcccagcaaggtatatctacgaaaagatccttcccgatacgtgccgagagctctgtccgttggtggactaccatccaggtagcccctagggtggcgtcaccagtcgtaatccgacggtcggcgacatccatcaatagaacgtgtggcataggacacaaaagaagtaccaaaacttcgacaagctcgtaggacgattcgtatcggaatttggcatagaggcgttcccttcgatcaagactattgatgcatttttactcggaggtaaagacgacccggatcgctatgctcagtcttcaactgtcgacttccacaataaggcagatggccataagcgccgaatcgctttatacctcgttgagaacttccgatacgcacctgaccccttcaaacagttcgtatactgcacgcagctgatacagggcgaatgcctggcgtctgcatatcgtctatggcggcgttaatggaagggaccggatcgcgaatactgcggtggctcccttatggcagttgaatgactgctagcccgtgacctcttagtccatttataactattatctacggccaaagcatgcttattacaccgtaaagcgggacatggccccgctgactattggtataacacggcataagcatcacgaacctccaacaaacaagtactctcgtatcgataaaacaacgtcaaaaatcgaggtctgggcgggtaatttcacccttgacgaagtaaaagtggactgctcgatccgtggtttcgatgtcgagactaagaaggagctatacgacgagacgatcgctggcctcactctcgcaccgaaccagtcaacagaaatcacaaacaagaacgttgcacgaaggaaggagcattacgaacggcgtattgttatcgctgcttatctcacatcgtcgtcgacgccgcttgcacggtacatcaactggcctgagcccttgaaatacttgcatctccaacgtcccaaagacctcaaatttgagcttagcgaagagactgactccgtgtcaatcagcgctggggtgcccatcaagggactcgctgtagaatgcgaggacgatgtcacgttcaaagataaccttattgatattgtgcccggagagacggtacgtattggggttcgaggcgcaaagaagggcaccaagtttactggtcggtatttggggatggaataaacaatgtaataagcaatgaaaaagaaagcctaatagagcatctcc

SEQ ID NO: 34571 - DNA, 2064 bp, Muscodor strobelii
  misc_feature: SGI cDNA ID NO. 571951
  misc_feature: Encodes the peptide sequence at SEQ ID NO 34572
atgtcggccagctgtggcaactactctctcacccctggcgaatgcgctctcggccatgatttgggcaacagcgcttcgaagatttctatcgcttacgtcaattctcacgacaaccacgtgcggctgttccgtatcccgttccacggaggaagagatcatccggagacgtcagaccggccacacgagttcatttcttccgcagcttttgcgtcgaatggtgatatagttgttggcaggcaatctttggagcaggattcatattaccctctgaagacgatgctgacattcttatctttcatcgggccgacacgtaaaaagatcgccgaattgactccggagggacggagactcctagaagcaatcaaagagaaaaagatagacgaaagtcagatgaaagctgcacttagccagcacttcagagtcctgcgcgaatctgctatgacagccgcaaataactttaatgttcgaatcaaggtgatcatcatcacctacccgaactacttggcttctaacccaattgcctctgatgttgaatcatattgtcaaacttacctacgcctccttcgcccagtgtgggccgacagcatggttaacttagtgagtcgcgaactccgaaataacgagattttcaggggattaagccgcgagaccggactgaatctcctcgtcgcagatgtcggcgccagcactatgaatgtacaaggtctcaatgtgtacttctcagatgacggtgagatctctggtagctcttcgaacgtgccccatggtagcgtcactggtacacaaggtgggagccagacgtcgaatgatgtcatcaggaggatcatcgatactaaatgcatacgtccccttgtgcgtcagggtgagatatctgacggagactcagcctcgatgatacaggactgggaaaagcaaaagaggtcctatgactatgcgcatagtagaaagaatgtccacctgtggagcgagattaatcgatacttgaacgtggagctggaggctcaagaaatcagtcgagccttcgatgctgcttttgaaggcggtcttttgctgctacgcagggagatcgtgcgcatgattgcattggagaagaactttgcgatccttttctgtggagggagctactgtaacccagggctgtatcgcaaagtgaaggatctgatggcacgctaccaaagccttgctcacggcgagggcattgaattcacgtatactttcctgagagacgagatatactggtcgtcggctgtatcggcaggtgctgcgttatccatgattcaagtccctaagccactggacatcctcagtggctccgccatttgtatacaggagattacacgcaacgagagcggtagaggcatatggcaaggatcggacgaggctcgcgttttgttttctcggccgctggaagaagacgcctgtactgatgcgctcggtcatgcttgccctgtcaaggttgatatacctcgctgctgcgataaatggctccagttcttcttagtttgtgaccctcactatcgccatcaaaccatcgaaggagttcgaggggccgcgctgcccatgcaacaaacgatacgcattggcccaccagaagaagtcctgggcgggccgcatgggccttacgatcttgatatgacgattgaaaccagcaacattccagatggacctgttcagttcgatttacaaggactcaagccggagacggcgggggcggatgatgaccgcatcccgttcaaacttgcgtgtagcaaagtggcgccgaacctcgatggagaccaggacacagggatgggaaccgctcggacccggcagccagagacgaagcaatggcttttcttcatgaaaacagacccgttgacgaagctgttgcggatagacgacattagagagctgcccatttattgctacacgtgtgtgcatgaaatatcgcggaccgcagtggcgtgtcaagtgtgtgatggcgtgtcatattgcgccctctgcttcttggagggactggagcgtgggacgcttggacatgagggccatgaattccaacatcttcctataggcgcgctttcgtaa

SEQ ID NO: 34572 - protein, 687 aa, Muscodor strobelii
  misc_feature: SGI Peptide ID NO. 571951
MSASCGNYSLTPGECALGHDLGNSASKISIAYVNSHDNHVRLFRIPFHGGRDHPETSDRPHEFISSAAFASNGDIVVGRQSLEQDSYYPLKTMLTFLSFIGPTRKKIAELTPEGRRLLEAIKEKKIDESQMKAALSQHFRVLRESAMTAANNFNVRIKVIIITYPNYLASNPIASDVESYCQTYLRLLRPVWADSMVNLVSRELRNNEIFRGLSRETGLNLLVADVGASTMNVQGLNVYFSDDGEISGSSSNVPHGSVTGTQGGSQTSNDVIRRIIDTKCIRPLVRQGEISDGDSASMIQDWEKQKRSYDYAHSRKNVHLWSEINRYLNVELEAQEISRAFDAAFEGGLLLLRREIVRMIALEKNFAILFCGGSYCNPGLYRKVKDLMARYQSLAHGEGIEFTYTFLRDEIYWSSAVSAGAALSMIQVPKPLDILSGSAICIQEITRNESGRGIWQGSDEARVLFSRPLEEDACTDALGHACPVKVDIPRCCDKWLQFFLVCDPHYRHQTIEGVRGAALPMQQTIRIGPPEEVLGGPHGPYDLDMTIETSNIPDGPVQFDLQGLKPETAGADDDRIPFKLACSKVAPNLDGDQDTGMGTARTRQPETKQWLFFMKTDPLTKLLRIDDIRELPIYCYTCVHEISRTAVACQVCDGVSYCALCFLEGLERGTLGHEGHEFQHLPIGALS

SEQ ID NO: 34573 - DNA, 930 bp, Muscodor strobelii
  misc_feature: SGI cDNA ID NO. 571952
  misc_feature: Encodes the peptide sequence at SEQ ID NO 34574
atgacggataccatcgttcagagggaaatcatgcctcgtccgctatggacagacgtactttgtcagcttatgaaggaatttgatccactcaaattcacgcgttttggatgtttgatggagacacgtcatgccctcctttcctcctggctggagtccagaagacgatttttagactggcgccaacacgcggacaccgaagttgagaagctaaagctccagggggatgtcgaaggagcacggtgcttagatcttgagcttttgaagcacacgtccgcgtttgacaacgaaaagtatgccatcacccacctgactggcaacgggccagaagcgttcaccatctctggctctccagacctggtcatccctccagagctgggagctagttcagaagctacgcaacccctcgcggcaccgagaggaggcgaaggccgggatagttacgatcagctgttggctccgtacgcccatccaatcaacattgacctagacatcgacgagattcagaagctacccaccattacatttggccaggctcagagccaacggctttggatctgtcaagccacgtcaggggcctccgtctgcctagactgtccttattgcccttccctctggaaacagtcgttgcaatccacacaaaatgacaacagtacgcagtatgagcctatcccgagacaattccatctggatcccttgtcaacttcggaggcactgcgtcactttaccttaatgcatgccgaacacttcaatggatccatgaaagagatggtgacaacgtacgggaaacgagtggtattgatcacaacaaagatccggaagttcgccaaattgctgttcacaatttctcggtgcaggcgtggctttaccagaaaacccttgactgggacttggcccgagaatctgttcaaagagggaccggcctgctgctaa

SEQ ID NO: 34574 - protein, 309 aa, Muscodor strobelii
  misc_feature: SGI Peptide ID NO. 571952
MTDTIVQREIMPRPLWTDVLCQLMKEFDPLKFTRFGCLMETRHALLSSWLESRRRFLDWRQHADTEVEKLKLQGDVEGARCLDLELLKHTSAFDNEKYAITHLTGNGPEAFTISGSPDLVIPPELGASSEATQPLAAPRGGEGRDSYDQLLAPYAHPINIDLDIDEIQKLPTITFGQAQSQRLWICQATSGASVCLDCPYCPSLWKQSLQSTQNDNSTQYEPIPRQFHLDPLSTSEALRHFTLMHAEHFNGSMKEMVTTYGKRVVLITTKIRKFAKLLFTISRCRRGFTRKPLTGTWPENLFKEGPACC

SEQ ID NO: 34575 - DNA, 1039 bp, Muscodor strobelii
  misc_feature: SGI EST ID NO. CUFF.82173.0
  misc_feature: Variant of the nucleotide sequence at SEQ ID NO 34573
cgcagtatgagcctatcccgagacaattccatctggatcccttgtcaacttcggaggcactgcgtcactttaccttaatgcatgccgaacacttcaatggatccatgaaagagatggtgacaacgtacgggaaacgagtggtattgatcacaacaaagatccggaagttcgccaaattgctgttcacaatttctcggtgcaggcgtggctttaccagaaaacccttgactgggacttggcccgagaatctgttcaaagagggaccggcctgctgctaacaacttctgagcgatatatccacccatccatggttccgtccgggaccccagccattgttgaagagcatttgaagacttatcagagatgggtgttcttctgtcatgatctagactgtactaaaccaataatgcaagaagagcaggcatcccttatcaccgccgcgaatcttcattttgccacacacggtctaacactcacggggggagatcttcattctcgcttcggttacaaagtgaaagaaccatcgatcagtgatcgtggacctcgttcccggaaaacattactgtccgccaacacaaccgaaacacgaccactacaggcctaaatcaacaagaaaacagtggcacacagagtacttcgtcgcaaagaaaacatattcgtcaacctgctacttccaactcaagtcaagccatcaagacaacaaaagtcgcgaaacagcctgcacaggggactccatcccacaaaaagcgtgttcgacaacatgatagttccagctcagcacaagcaaaaaagaaaagcagggtcgcgaagcagcccacacagaacaagcccgttcaagcacagcagacaaccaagactatcgtgccagtcccgcaattaccttgctctaacgtaacacaaccccgtactaagtacgatggtcaatcaatcaatgggatacgagcagagttacatagccgaggcatcaagtttggtcgaacaacgaacaaaattgccttgctagaacttcttgtgtagtccgaaagacattaggagacgg

SEQ ID NO: 34576 - DNA, 1278 bp, Muscodor strobelii
  misc_feature: SGI cDNA ID NO. 571953
  misc_feature: Encodes the peptide sequence at SEQ ID NO 34577
atggagccgtccggcggttcagtcggtattgacttcggctgctataagtccaaaacagcactggcctacacggtcatgtttgcaggccgtgagcaaccagttgccatccgtgtgccttttcaacagtcgttcagcagcttcaacagagtggaattttcgagcactccatctgacacgctgtacgaattcattgcctatgcgacattggagaatgggcagttttaccaaggcaaacgatctctcaattccgatctcagctttccgctcaaaacaatggctttgcatcgagcaggcgtcacatctgcagctatcacccgactacccggcggcgtagagctccttcgggcctgcgaggaacaccaggttactcgctcaatggaggataaggtgctcatggagcattttacaatgctacacgatgcagcaacagccgaagcgaggaacgttggtgtagagatttccgatatcataacatcgtatccaaacttcatctgcccgaaagagtcgcctgacgatttcagaaagtacacgtcgtactaccaacgacttatgcgagcgatatggggacctagtttcaacctctatttgatcagcgaaggccacgcggcagcactctaccttagcgaacccttcatcaatcctcaaggcgggctataccaggaagaaatatggcagctgctgaacccagacaatgagccggaaatccttttgtttactccagatggtggaagcagctctctgaatctacaggttcaaactgttgccttcgacaaagctagcgagcttcttggtggccagtcagtcgacttccccgggcttataacaggaattgcgggaggtagcgattccgtcaattacgctgttcgagatatgatcgccgaaagtttgacactcgaaggacgaagccctgccggtcggatagcagccctcttatgtgatttcgagagacagaaatgtgaaataaactgggaaaaggatctccgccctatctatttgcatgcaaagggagaagactctgcgattgaactttcggtgcccgccttgcgcaatgctttccaaaaagttttcacagaaggcgtagaactcatccgagatcaattgcgcattctcttgaaagacaaacggaggttctgcgtcgtcttctgtgggggcagttacctttgtgaaagtcttcgcggatccatcgaagaagtaataagcaatgttgagcaagaggcacgagttcagtcgggctacatcagatatctatttctgcgagacaaggacccgcattggtaa

SEQ ID NO: 34577 - protein, 425 aa, Muscodor strobelii
  misc_feature: SGI Peptide ID NO. 571953
MEPSGGSVGIDFGCYKSKTALAYTVMFAGREQPVAIRVPFQQSFSSFNRVEFSSTPSDTLYEFIAYATLENGQFYQGKRSLNSDLSFPLKTMALHRAGVTSAAITRLPGGVELLRACEEHQVTRSMEDKVLMEHFTMLHDAATAEARNVGVEISDIITSYPNFICPKESPDDFRKYTSYYQRLMRAIWGPSFNLYLISEGHAAALYLSEPFINPQGGLYQEEIWQLLNPDNEPEILLFTPDGGSSSLNLQVQTVAFDKASELLGGQSVDFPGLITGIAGGSDSVNYAVRDMIAESLTLEGRSPAGRIAALLCDFERQKCEINWEKDLRPIYLHAKGEDSAIELSVPALRNAFQKVFTEGVELIRDQLRILLKDKRRFCVVFCGGSYLCESLRGSIEEVISNVEQEARVQSGYIRYLFLRDKDPHW

SEQ ID NO: 34578 - DNA, 1893 bp, Muscodor strobelii
  misc_feature: SGI cDNA ID NO. 571954
  misc_feature: Encodes the peptide sequence at SEQ ID NO 34579
atgcgcctcttgaaactcgaaaacgacggacgtctcgcatttaccgacgttcttattaacaacatgccacgatacgccatactctcgcatacctgggggcctgacagccaggaagtcacattcaaagatatcttggagggtaccggtcgacacaaagatggttaccgcaagatagaattctgctctaatcagaccgcagccgatgatcttcgccatttctgggtcgatacctgctgtattgataaaccaaacaacaccgagctgtccgaagctatcaactcgatgttccggtggtacaaagatgccgagaaatgctacgtttgcttatccgatgtcgagaaagacgataccgcgcacaccgacgaaccgctgcgagctacttggaaagggcaatttcgtgcgagcagatggttcacgcgaggctggacccttcaggagcttattgcgccacaatcagtcgaattctttacgtcaaacgggcagcgactaggcgacaagaagtcactcgaacaactagtctgtgagataaccggtgtccccgttgatgccctacgaggacgtcgtccactggtccagtatagcatcgatacgcgaatgtcatggtcgaagcgacgcgagacgaagaagcaagaagacaaggcttactcgttgttgggcattttcggtgttcatatgcctttgatatatggcgagggagaggaaaaggcgttaggtcggctacggagagagattgatttacaattaggcaaaccaatactcgagaagcttcctatcgctgcgggcgccgctttcgattcccacgccgaagaacataattcgacttgccttcccaacacgagagttggccttctgcgcgaaataagggaatgggtggatagcccaacagccaaagccgtcttctggctgaacggcatggccggcacggggaagtcaaccatctcacggaccttagcccccctggcgacatacgtaaaggatgtcatcgagaccgatcctgccattctggacaaggcgatgcgggagcagttcaacaagctgatatttgagcctctctctaagctgtctttacgaaacaagaagcctatcaaccttgtcatcgtcgtagatgccctagatgaatgtgatcgggaagaggatgtcaagatgcttattcatctgctctctagtgctaatgccttcaagtcagcccgactaaggatcttcttgacgagtcggcccgagttgcctgttcgcctgggattttgtgacattaaaggtacatacaaaggtctgattctccacgagattgaacggtccatcattgagcaggatctctttgtctacttcaagcacgaacttgccaagatcagagaagagttcaataaaaccaggccacctgctcaacaattgccttcagaatggtcgaaacaatccgaaatgcagacactcgtgacgatggctgttccgctcttcatcttcgctgctactgtatgccggttctttgcagatcgtcggactggcactccaaggtctaagctagaacggatattggcgcatccaacgacgagcgaggattacaaacttgatgcaacatacttacctgttctcgagcagctcgtagtggacttgtcggataaacggaaaaccaaagcgttaacacttttcaaacgtcttgtcggctcaatcgtcctgcttgcaagccccttgccaacggctgctttaggacagctactcggtatatccctagatgacatcgattgccaacttgattttcttcactccgtcttgagtgttccttcttcaccaactgttcccgtacggctactgcacttgtcatttcgcgactttctcgttggtccgtcaaaacgtgggaagaacccattctgggtagacgagaaggaggtccacaagtag

SEQ ID NO: 34579 - protein, 630 aa, Muscodor strobelii
  misc_feature: SGI Peptide ID NO. 571954
  misc_feature (25)..(146): Pfam Id: PF06985 Pfam Desc: Heterokaryon incompatibility protein (HET)
  misc_feature (1)..(630): NCBI GI: 189209021 Blast Desc: vegetative incompatibility protein HET-E-1 [Pyrenophora tritici-repentis Pt-1C-BFP] gi|187976936|gb|EDU43562.1| vegetative incompatibility protein
  misc_feature (252)..(630): NCBI GI: 154310178 Blast Desc: BC1G_07009 [Botryotinia fuckeliana B05.10] gi|150851570|gb|EDN26763.1| BC1G_07009 [Botryotinia fuckeliana B05.10]
  misc_feature (253)..(630): NCBI GI: 116191741 Blast Desc: CHGG_05588 [Chaetomium globosum CBS 148.51] gi|88181501|gb|EAQ88969.1| CHGG_05588 [Chaetomium globosum CBS 148.51]
  misc_feature (253)..(630): NCBI GI: 116182430 Blast Desc: CHGG_01843 [Chaetomium globosum CBS 148.51] gi|88186140|gb|EAQ93608.1| CHGG_01843 [Chaetomium globosum CBS 148.51]
  misc_feature (250)..(626): NCBI GI: 46130696 Blast Desc: FG08952.1 [Gibberella zeae PH-1]
  misc_feature (255)..(630): NCBI GI: 171678525 Blast Desc: protein product [Podospora anserina] gi|170937332|emb|CAP61990.1| protein product [Podospora anserina]
  misc_feature (253)..(630): NCBI GI: 116199375 Blast Desc: CHGG_07843 [Chaetomium globosum CBS 148.51] gi|88179122|gb|EAQ86590.1| CHGG_07843 [Chaetomium globosum CBS 148.51]
  misc_feature (243)..(630): NCBI GI: 256723335 Blast Desc: NECHADRAFT_51778 [Nectria haematococca mpVI 77-13-4]
  misc_feature (256)..(630): NCBI GI: 154936828 Blast Desc: NWD2 [Podospora anserina]
  misc_feature (256)..(630): NCBI GI: 171676738 Blast Desc: protein product [Podospora anserina] gi|170936436|emb|CAP61093.1| protein product [Podospora anserina]
MRLLKLENDGRLAFTDVLINNMPRYAILSHTWGPDSQEVTFKDILEGTGRHKDGYRKIEFCSNQTAADDLRHFWVDTCCIDKPNNTELSEAINSMFRWYKDAEKCYVCLSDVEKDDTAHTDEPLRATWKGQFRASRWFTRGWTLQELIAPQSVEFFTSNGQRLGDKKSLEQLVCEITGVPVDALRGRRPLVQYSIDTRMSWSKRRETKKQEDKAYSLLGIFGVHMPLIYGEGEEKALGRLRREIDLQLGKPILEKLPIAAGAAFDSHAEEHNSTCLPNTRVGLLREIREWVDSPTAKAVFWLNGMAGTGKSTISRTLAPLATYVKDVIETDPAILDKAMREQFNKLIFEPLSKLSLRNKKPINLVIVVDALDECDREEDVKMLIHLLSSANAFKSARLRIFLTSRPELPVRLGFCDIKGTYKGLILHEIERSIIEQDLFVYFKHELAKIREEFNKTRPPAQQLPSEWSKQSEMQTLVTMAVPLFIFAATVCRFFADRRTGTPRSKLERILAHPTTSEDYKLDATYLPVLEQLVVDLSDKRKTKALTLFKRLVGSIVLLASPLPTAALGQLLGISLDDIDCQLDFLHSVLSVPSSPTVPVRLLHLSFRDFLVGPSKRGKNPFWVDEKEVHK

SEQ ID NO: 34580 - DNA, 611 bp, Muscodor strobelii
  misc_feature: SGI EST ID NO. CUFF.82206.0
  misc_feature: Variant of the nucleotide sequence at SEQ ID NO 34578
ggaaaaggcgttaggtcggctacggagagagattgatttacaattaggcaaaccaatactcgagaagcttcctatcgctgcgggcgccgctttcgattcccacgccgaagaacataattcgacttgccttcccaacacgagagttggccttctgcgcgaaataagggaatgggtggatagcccaacagccaaagccgtcttctggctgaacggcatggccggcacggggaagtcaaccatctcacggaccttagcccgtgagtcgtccggtctgggccggctcggtgctagcttcttcttcaagaggggcgagggcgaccggggggagcgtccaaattcttctccacgatcgccgctcagctgattcagcatgagccagccctggcgacatacgtaaaggatgtcatcgagaccgatcctgccattctggacaaggcgatgcgggagcagttcaacaagctgatatttgagcctctctctaagctgtctttacgaaacaagaagcctatcaaccttgtcatcgtcgtagatgccctagatgaatgtgatcgggaagaggatgtcaagatgcttattcatctgctctctagtgctaatgccttcaagtcagc

SEQ ID NO: 34581 - DNA, 1056 bp, Muscodor strobelii
  misc_feature: SGI cDNA ID NO. 571955
  misc_feature: Encodes the peptide sequence at SEQ ID NO 34582
atgtctcaagttcccaccgagcaatgggcgcaggttattgagaagacaggtggcccacccgtttacaagaagattcctgtagccaagcctggcccagatgaggttctcgtcaacatcaaatattccggcgtctgccacacagatctccacgccatgaatggtgattggccgttgccagttaatctgccacttgtgggcggccatgagggcgctggtgtggtggttgcgcgtggtgagcttgttaaggatattgaaatcggcgaccacgttggcatcaagtggttgaatggatcgtgtatgagctgcagcttctgcagagtctctgatgagccattgtgcggtgatgcattactttccggatacactgtagacggtagcttccagcaatacgcaattgggaaagctgcgcacgtcgcacggatacctaaagaatgcgacctcgaggctatcgcacctgttttatgcgctggtatcaccgtctacaaaggtctcaaggaatcaggagtgaagcctggccaggatattgcaattgtcggagctgggggtggtctcggcagtatggctctgcaatacgccaaagccatgggcctccacacaatcgctatcgacggtggagcggagaagggcgaagtttgcaagaaactcggcgccgccgcttatgtcgatttcatgagctcggagaacctcaccaaggaagtgaagaaggccagtctggagggcgagggtcctcatggcgtcctgctcgtcgccgtaaacgagaagccattccaacaggcaagcgagtacgtgcgcagcaggggtgccatcgtctgcattggtttgcctgcaaacgcttacctcaaggcacctgtcttcgaaacggtaatccggatgatcaacatcaagggaagttatgttggcaacagacaggatactgccgaagctattgagttctttagacggggcgtaatcaaggcaccattcaagactgtcggattaagcaagctcgcagacatatacgaattgatggagaagggtcaaatttcgggccgttatgttgtcgataccagtaaatag

SEQ ID NO: 34582 - protein, 351 aa, Muscodor strobelii
  misc_feature: SGI Peptide ID NO. 571955
  misc_feature (32)..(141): Pfam Id: PF08240 Pfam Desc: Alcohol dehydrogenase GroES-like domain
  misc_feature (171)..(314): Pfam Id: PF00107 Pfam Desc: Zinc-binding dehydrogenase
  misc_feature (2)..(351): NCBI GI: 261357028 Blast Desc: alcohol dehydrogenase [Verticillium albo-atrum VaMs.102]
  misc_feature (1)..(351): NCBI GI: 88766407 Blast Desc: alcohol dehydrogenase I [Metarhizium anisopliae]
  misc_feature (3)..(351): NCBI GI: 226529167 Blast Desc: LOC100274539 [Zea mays] gi|194708462|gb|ACF88315.1| [Zea mays]
  misc_feature (3)..(351): NCBI GI: 85083747 Blast Desc: alcohol dehydrogenase I [Neurospora crassa OR74A] gi|14285342|sp|Q9P6C8.1|ADH1_NEUCR RecName: Full=Alcohol dehydrogenase 1; AltName: Full=Alcohol dehydrogenase I ALCOHOL I
  misc_feature (3)..(351): NCBI GI: 116204603 Blast Desc: alcohol dehydrogenase I [Chaetomium globosum CBS 148.51] gi|88176313|gb|EAQ83781.1| alcohol dehydrogenase I [Chaetomium globosum CBS 148.51]
  misc_feature (1)..(351): NCBI GI: 118429501 Blast Desc: Can a 1 allergen-like [Cochliobolus lunatus]
  misc_feature (1)..(351): NCBI GI: 86278351 Blast Desc: alcohol dehydrogenase [Cochliobolus lunatus]
  misc_feature (4)..(351): NCBI GI: 171689220 Blast Desc: protein product [Podospora anserina] gi|170944572|emb|CAP70683.1| protein product [Podospora anserina]
  misc_feature (1)..(351): NCBI GI: 154310831 Blast Desc: BC1G_06394 [Botryotinia fuckeliana B05.10] gi|150851193|gb|EDN26386.1| BC1G_06394 [Botryotinia fuckeliana B05.10]
  misc_feature (1)..(351): NCBI GI: 189205889 Blast Desc: alcohol dehydrogenase 1 [Pyrenophora tritici-repentis Pt-1C-BFP] gi|187975372|gb|EDU41998.1| alcohol dehydrogenase 1 [Pyrenophora tritici-repentis Pt-1C-BFP]
  misc_feature (3)..(351): SWISSPROT Homolog: EC 1.1.1.1 Alcohol dehydrogenase
MSQVPTEQWAQVIEKTGGPPVYKKIPVAKPGPDEVLVNIKYSGVCHTDLHAMNGDWPLPVNLPLVGGHEGAGVVVARGELVKDIEIGDHVGIKWLNGSCMSCSFCRVSDEPLCGDALLSGYTVDGSFQQYAIGKAAHVARIPKECDLEAIAPVLCAGITVYKGLKESGVKPGQDIAIVGAGGGLGSMALQYAKAMGLHTIAIDGGAEKGEVCKKLGAAAYVDFMSSENLTKEVKKASLEGEGPHGVLLVAVNEKPFQQASEYVRSRGAIVCIGLPANAYLKAPVFETVIRMINIKGSYVGNRQDTAEAIEFFRRGVIKAPFKTVGLSKLADIYELMEKGQISGRYVVDTSK

SEQ ID NO: 34583 - DNA, 792 bp, Muscodor strobelii
  misc_feature: SGI EST ID NO. CUFF.82214.0
  misc_feature: Variant of the nucleotide sequence at SEQ ID NO 34581
tggcaagctaggatgtacgcgggggctttagagtgttcgaggctgcaacatacacgtattaatgacatcgcatgaacaatattgcaatgggcaatgacgctgactataatagggacagctgtcccgcatgctcttgtccaagtcggctctatgtccttcatcaagcagtgattcaatctactctccccctataagcttcacaatactcgaaaacataccatcgaacgttattccctcacattcagcaaagatgtctcaagttcccaccgagcaatgggcgcaggttattgagaagacaggtggcccacccgtttacaagaagattcctgtagccaagcctggcccagatgaggttctcgtcaacatcaaatattccggcgtctgccacacagatctccacgccatgaatggtgattggccgttgccagttaatctgccacttgtgggcggccatgagggcgctggtgtggtggttgcgcgtggtgagcttgttaaggatattgaaatcggcgaccacgttggcatcaagtggttgaatggatcgtgtatgagctgcagcttctgcagagtctctgatgagccattgtgcggtgatgcattactttccggatacactgtagacggtagcttccagcaatacgcaattgggaaagctgcgcacgtcgcacggatacctaaagaatgcgacctcgaggctatcgcacctgttttatgcgctggtatcaccgtctacaaaggtctcaaggaatcaggagtgaagcctggccaggatattgcaattgtcggagctgg

SEQ ID NO: 34584 - DNA, 1167 bp, Muscodor strobelii
  misc_feature: SGI cDNA ID NO. 571956
  misc_feature: Encodes the peptide sequence at SEQ ID NO 34585
atggttgggcaaataccccctggcaaaagcggcaatggagagagtatactcaagatccaaacaccagtcgaagtcaaggagataagaggcggatggacgaaactcgggatctgctataagccgggcgttgcgatcaccgcacatacgccacgcggcacaatatcccgagatggctgggagttggccgtgcaggtcgtgggccggatggactcccatgaacgatctgagcagatggtacaagagcttctgcaagacgtggtaaaaaatatcgacgaggactctcgcacaaccgtcgacaagatttggaccttgttgaatgatctcggcatgattaacttcgccgaagaaacagcagagactcttggtgacattcttgctgaagacactttccgcttcggcgagacattgtggaattatgcccttgcacaccgaccaggcaaagttcgagacgttctcaacatcctcatgtctctctcacttgttgaatctaccgcatatccccaagataaggaactagacgaaaccctgcgagggctactcaaagagagaacggctacactagaggatttcgcgaaacaggatctggaggctgccgagcttcttggcaagatattaagtggatatgcaacgttaagaagattctatgagcttcgcgacggcgacggtaaaagcaataagagatctcttcttcgacgccaacaagccgccgccgccttgacaactgttatcgccagtgccgatgacaacattcgaggcggcttatacgacgatacacgtgatgccgtcgttagcgaagacttccttctcgccttactgggcgaaatgtctgtcttcactgtcgacagtagagtgtaccaagcagccgatggattctttaagatcgtccttacaccaggccaaggaaagggatctatacctgcaaacctctttagccagtcgacgtcgtcgctaagtggaagttacgtaatgacgggtagttccatgattgcctctcatctttacaagtctgtaattaagagcggtatgatccagggaagagttcagagagcgtgggactggcgaactactgtatttgccggcagtagctctgctgatgtgctgaagaagctgagattaggtctgacgagggatttgacgaacctatggcttgagcagcggattcggtga

SEQ ID NO: 34585 - protein, 388 aa, Muscodor strobelii
  misc_feature: SGI Peptide ID NO. 571956
  misc_feature (56)..(384): NCBI GI: 46137367 Blast Desc: FG10199.1 [Gibberella zeae PH-1]
  misc_feature (56)..(384): NCBI GI: 256731747 Blast Desc: [Nectria haematococca mpVI 77-13-4]
  misc_feature (54)..(385): NCBI GI: 116180184 Blast Desc: CHGG_00720 [Chaetomium globosum CBS 148.51] gi|88185017|gb|EAQ92485.1| CHGG_00720 [Chaetomium globosum CBS 148.51]
  misc_feature (55)..(383): NCBI GI: 18307434 Blast Desc: [Neurospora crassa]
  misc_feature (57)..(385): NCBI GI: 39976115 Blast Desc: MGG_06016 [Magnaporthe grisea 70-15] gi|145011709|gb|EDJ96365.1| MGG_06016 [Magnaporthe grisea 70-15]
  misc_feature (54)..(383): NCBI GI: 171692045 Blast Desc: protein product [Podospora anserina] gi|170945971|emb|CAP72772.1| protein product [Podospora anserina]
  misc_feature (54)..(385): NCBI GI: 156065771 Blast Desc: SS1G_00896 [Sclerotinia sclerotiorum 1980] gi|154691755|gb|EDN91493.1| SS1G_00896 [Sclerotinia sclerotiorum 1980]
  misc_feature (45)..(385): NCBI GI: 154301813 Blast Desc: BC1G_10058 [Botryotinia fuckeliana B05.10] gi|150855720|gb|EDN30912.1| BC1G_10058 [Botryotinia fuckeliana B05.10]
  misc_feature (55)..(383): NCBI GI: 85099986 Blast Desc: NCU06649 [Neurospora crassa OR74A] gi|28922412|gb|EAA31646.1| [Neurospora crassa OR74A]
  misc_feature (147)..(385): NCBI GI: 261352058 Blast Desc: conserved [Verticillium albo-atrum VaMs.102]
MVGQIPPGKSGNGESILKIQTPVEVKEIRGGWTKLGICYKPGVAITAHTPRGTISRDGWELAVQVVGRMDSHERSEQMVQELLQDVVKNIDEDSRTTVDKIWTLLNDLGMINFAEETAETLGDILAEDTFRFGETLWNYALAHRPGKVRDVLNILMSLSLVESTAYPQDKELDETLRGLLKERTATLEDFAKQDLEAAELLGKILSGYATLRRFYELRDGDGKSNKRSLLRRQQAAAALTTVIASADDNIRGGLYDDTRDAVVSEDFLLALLGEMSVFTVDSRVYQAADGFFKIVLTPGQGKGSIPANLFSQSTSSLSGSYVMTGSSMIASHLYKSVIKSGMIQGRVQRAWDWRTTVFAGSSSADVLKKLRLGLTRDLTNLWLEQRIR

SEQ ID NO: 34586 - DNA, 1146 bp, Muscodor strobelii
  misc_feature: SGI cDNA ID NO. 571957
  misc_feature: Elevated expression when VOC is produced
  misc_feature: Encodes the peptide sequence at SEQ ID NO 34587
atggttgacaccgttggcaagacaatcacctgcaaggccgctgtcgcctgggaagctggcaaggacctgagcatcgaggatatcgaggtcgcacccccgaaggcgcatgaggtgcgcatccagatctactacacaggcgtttgccacaccgatgcctacacattatctggcaaggacccggagggcgcattccccatcgtcttgggccatgaaggagctggtatcgtcgagtcggtcggtgacggcgtgactaacgtcaagcctggtgaccatgttgtcgccctctacacaccagaatgcaaggaatgcaagttctgcaagtccagcaagacgaatttgtgtggaaagattcgcgcgacacaagggaaaggcgtgatgccggacgggacatcgagattcaagtgtaagggcaaggacctgctacatttcatgggcacatcaaccttctcccagtacaccgtcgttgccgacatctccgttgtcgccgttcagcaggatgctcctatggaccgaacatgcttgttaggctgcggtatcaccaccggttacggtgcggccaggatcaccgccaactgcgaagagggatccaatgtcgccattttcggtgctggctgtgtcggtttgtccgtcgtccaaggtgccgttatacagaaggccggcaagatcatcgtcgtcgacgttaacccgacaaaggaagagtgggccaagaaattcggggctaccgacttcgtgaatcctaccaagttaccggaggggcagactattgtagataagctgattgagatgactggcggaggctgtgactatactttcgactgcaccggtaacgtcattgtcatgcgtgctgctcttgaggcttgccacaagggctggggacagagtatcgttatcggagtcgctgctgctggtcaggaggttgccacccgaccattccaactggttaccggtcgtgtgtggaagggttgcgccttcggtggtgtaaaaggtcgatcacagctgggcggcctcgtttcagattacctcgacggcaagttgaaggtcgatgagttcattacccaccgtcaatcgctggccaacatcaacactgcttttgagcagatgaaggcaggagactgcatccgctgcgtcgtaacgatgaaggaatga

SEQ ID NO: 34587 - protein, 381 aa, Muscodor strobelii
  misc_feature: SGI Peptide ID NO. 571957
  misc_feature (35)..(163): Pfam Id: PF08240 Pfam Desc: Alcohol dehydrogenase GroES-like domain
  misc_feature (194)..(338): Pfam Id: PF00107 Pfam Desc: Zinc-binding dehydrogenase
  misc_feature (1)..(381): NCBI GI: 238494678 Blast Desc: formaldehyde dehydrogenase [Aspergillus flavus NRRL3357] gi|220695225|gb|EED51568.1| formaldehyde dehydrogenase [Aspergillus flavus NRRL3357]
  misc_feature (1)..(381): NCBI GI: 261204519 Blast Desc: S-(hydroxymethyl)glutathione dehydrogenase/class III alcohol dehydrogenase [Ajellomyces dermatitidis SLH14081] gi|239587258|gb|EEQ69901.1| S-(hydroxymethyl)glutathione III III
  misc_feature (1)..(379): NCBI GI: 115433246 Blast Desc: S-(hydroxymethyl)glutathione dehydrogenase [Aspergillus terreus NIH2624] gi|114189612|gb|EAU31312.1| S-(hydroxymethyl)glutathione dehydrogenase [Aspergillus terreus
  misc_feature (1)..(379): NCBI GI: 119497815 Blast Desc: formaldehyde dehydrogenase [Neosartorya fischeri NRRL 181] gi|119413829|gb|EAW23768.1| formaldehyde dehydrogenase [Neosartorya fischeri NRRL 181]
  misc_feature (1)..(380): NCBI GI: 255951254 Blast Desc: Pc22g25070 [Penicillium chrysogenum Wisconsin 54-1255] gi|211593411|emb|CAP99795.1| Pc22g25070 [Penicillium chrysogenum Wisconsin 54-1255]
  misc_feature (1)..(379): NCBI GI: 121711090 Blast Desc: formaldehyde dehydrogenase [Aspergillus clavatus NRRL 1] gi|119401311|gb|EAW11735.1| formaldehyde dehydrogenase [Aspergillus clavatus NRRL 1]
  misc_feature (2)..(377): NCBI GI: 126276198 Blast Desc: Glutathione-dependent formaldehyde dehydrogenase (FDH) (FALDH) (FLD) [Pichia stipitis CBS 6054]
  misc_feature (2)..(377): NCBI GI: 149388952 Blast Desc: Glutathione-dependent formaldehyde dehydrogenase (FDH) (FALDH) (FLD) [Pichia stipitis CBS 6054]
  misc_feature (1)..(381): NCBI GI: 169777521 Blast Desc: [Aspergillus oryzae RIB40] gi|83771963|dbj|BAE62093.1| protein product [Aspergillus oryzae]
  misc_feature (2)..(380): NCBI GI: 145603502 Blast Desc: MGG_06011 [Magnaporthe grisea 70-15] gi|145011714|gb|EDJ96370.1| MGG_06011 [Magnaporthe grisea 70-15]
  misc_feature (4)..(379): SWISSPROT Homolog: EC 1.1.1.284 S-(hydroxymethyl)glutathione dehydrogenase
  misc_feature: Useful for introducing or modulating the production of volatile compounds
MVDTVGKTITCKAAVAWEAGKDLSIEDIEVAPPKAHEVRIQIYYTGVCHTDAYTLSGKDPEGAFPIVLGHEGAGIVESVGDGVTNVKPGDHVVALYTPECKECKFCKSSKTNLCGKIRATQGKGVMPDGTSRFKCKGKDLLHFMGTSTFSQYTVVADISVVAVQQDAPMDRTCLLGCGITTGYGAARITANCEEGSNVAIFGAGCVGLSVVQGAVIQKAGKIIVVDVNPTKEEWAKKFGATDFVNPTKLPEGQTIVDKLIEMTGGGCDYTFDCTGNVIVMRAALEACHKGWGQSIVIGVAAAGQEVATRPFQLVTGRVWKGCAFGGVKGRSQLGGLVSDYLDGKLKVDEFITHRQSLANINTAFEQMKAGDCIRCVVTMKE

SEQ ID NO: 34588 - DNA, 1697 bp, Muscodor strobelii
  misc_feature: SGI EST ID NO. CUFF.82244.0
  misc_feature: Variant of the nucleotide sequence at SEQ ID NO 34586
ctgggatacagagctgtggtgcccacaaattcacgttgacaacgatccttcgtacgcgtacagggggtatttgcccaaccattgttgccgtgttatacatggagatatgtttgccatctccgattctaggagaggcagtgttgcaccctacacaaccgctttgctgcgcgcttaaggcatgacatcagaataactctatggttaatatgccgactccccacttgctgcgtgcccagatggatgcatgaaacaagtcggcctcatatacacatcatatccagcggggtaaaaccttgtcgcctccgcagcaagccgtcgctcagtcaataaagtagttgcattcctaaaaccttgaaacaatcttgcttttttaccgtctttatcttacgccctccatctcccaattattcgccgtttcaatcttcgcagaaaatcgacctaatcaaagacttccacgacgatggttgacaccgttggcaagacaatcacctgcaaggccgctgtcgcctgggaagctggcaaggacctgagcatcgaggatatcgaggtcgcacccccgaaggcgcatgaggtgcgcatccagatctactacacaggcgtttgccacaccgatgcctacacattatctggcaaggacccggagggcgcattccccatcgtcttgggccatgaaggagctggtatcgtcgagtcggtcggtgacggcgtgactaacgtcaagcctggtgaccatgttgtcgccctctacacaccagaatgcaaggaatgcaagttctgcaagtccagcaagacgaatttgtgtggaaagattcgcgcgacacaagggaaaggcgtgatgccggacgggacatcgagattcaagtgtaagggcaaggacctgctacatttcatgggcacatcaaccttctcccagtacaccgtcgttgccgacatctccgttgtcgccgttcagcaggatgctcctatggaccgaacatgcttgttaggctgcggtatcaccaccggttacggtgcggccaggatcaccgccaactgcgaagagggatccaatgtcgccattttcggtgctggctgtgtcggtttgtccgtcgtccaaggtgccgttatacagaaggccggcaagatcatcgtcgtcgacgttaacccgacaaaggaagagtgggccaagaaattcggggctaccgacttcgtgaatcctaccaagttaccggaggggcagactattgtagataagctgattgagatgactggcggaggctgtgactatactttcgactgcaccggtaacgtcattgtcatgcgtgctgctcttgaggcttgccacaagggctggggacagagtatcgttatcggagtcgctgctgctggtcaggaggttgccacccgaccattccaactggttaccggtcgtgtgtggaagggttgcgccttcggtggtgtaaaaggtcgatcacagctgggcggcctcgtttcagattacctcgacggcaagttgaaggtcgatgagttcattacccaccgtcaatcgctggccaacatcaacactgcttttgagcagatgaaggcaggagactgcatccgctgcgtcgtaacgatgaaggaatgaacatgtgaaaaaaagtagtctgtaaatagggatcgaggtgtttgcattaatgaaaaaagggcaatgaataatatctgattttcaacatgat

SEQ ID NO: 34589 - DNA, 965 bp, Muscodor strobelii
  misc_feature: SGI cDNA ID NO. 571959
  misc_feature: Reduced expression when VOC is produced
  misc_feature: Encodes the peptide sequence at SEQ ID NO 34590
atggcatatgtcagtcttgacgatgccgtcttttggacccctccgccaacagcaggtttaaggcctgcgcaccaaaatcttaagagaccaagcgtcccgcattctgcaacttcttccaagaaccagagtacgccttgggtagagagcagggcgcaagatgctcaatctctaagggatgttacaagcaagcctatctttatcgacgacgagagcagcgatggagaggatagggacgataagaccgatgcccaatccgacatatcaagcaacaccatggatccgtgcaacccgagtactgctttcgacggggttaacataggagaactgccccctacaggtatggcagaaccgacccaacatatggcatcgagcaaagagccaccatgccaaacctcggaaaatataactgccttaattcctatgtccggccaaccgcaccacccggccggggagtggtcgtctccctctccaacgcctcttcagacggatcaatctacaatacaccaggcggaggatcttatatacagaggcggccatgctcccgagactgtcgacaccaaagacgagcaagaggtaccggaacccgcaatggaagatgagttactcggattgcacgggaatagaccacaaaaccccagctaccacctacggcaatgcgatgaggatacttgtcaagaaggcagaccatgtgattggtgcactcgattcccaagactatctgcgatgttcaaacgcctccgtgggaaacccgccacccgtagggagacgagcggagaagctaaatcgctggaggtcgaggtagaatcccaccttgacaagactactcttgactctatctgcctgccacacgggccactctacccctctgaagatgagcgtgaaacagagcatgagcctgacggcggccagccgccaacacatcgtggccacggaaatgataatacgaatgatccaggaccccttta

SEQ ID NO: 34590 - protein, 321 aa, Muscodor strobelii
  misc_feature: SGI Peptide ID NO. 571959
  misc_feature: Useful for introducing or modulating the production of volatile compounds
MAYVSLDDAVFWTPPPTAGLRPAHQNLKRPSVPHSATSSKNQSTPWVESRAQDAQSLRDVTSKPIFIDDESSDGEDRDDKTDAQSDISSNTMDPCNPSTAFDGVNIGELPPTGMAEPTQHMASSKEPPCQTSENITALIPMSGQPHHPAGEWSSPSPTPLQTDQSTIHQAEDLIYRGGHAPETVDTKDEQEVPEPAMEDELLGLHGNRPQNPSYHLRQCDEDTCQEGRPCDWCTRFPRLSAMFKRLRGKPATRRETSGEAKSLEVEVESHLDKTTLDSICLPHGPLYPSEDERETEHEPDGGQPPTHRGHGNDNTNDPGPL

SEQ ID NO: 34591 - DNA, 1554 bp, Muscodor strobelii
  misc_feature: SGI EST ID NO. CUFF.82269.0
  misc_feature: Variant of the nucleotide sequence at SEQ ID NO 34589
tattgggagcggcgcattggagggacgagcttgctaagccgccctgtctcctttctaccccatcagagatgtgataggcagaatggctcgtcgtctgatcctgatcctgctcctgcaactgcaactgcaacctgatcgggggagtggacgaggtctacaagagcgccaggagagtctgcgccttgttttccgacctgtctagccgcttttaggccatgtttggaaataccgaaggtgccgcgttttaacccgagcaagtaattcgcgacaagggcgaggaagagttgcttgcgcctctaaccgcgtcgggctggttccatgggtgaatgattggcagacatacgagagaagagtgactggtatactgaggagctcctggctccagcgggaaatctgcagacgaatacgccccttgccactcttttggaagcggaatgccttgtgcctggaatttgtcttcaaaccaatatgggcgaaacacatatatttctccggaatccgcccttacaactcgagtagcatccttctgcatcgtccacctttgggaaaaccttattcactataccttctgctcccatttactcaacacaatggcatatgtcagtcttgacgatgccgtcttttggacccctccgccaacagcaggtttaaggcctgcgcaccaaaatcttaagagaccaagcgtcccgcattctgcaacttcttccaagaaccagagtacgccttgggtagagagcagggcgcaagatgctcaatctctaagggatgttacaagcaagcctatctttatcgacgacgagagcagcgatggagaggatagggacgataagaccgatgcccaatccgacatatcaagcaacaccatggatccgtgcaacccgagtactgctttcgacggggttaacataggagaactgccccctacaggtatggcagaaccgacccaacatatggcatcgagcaaagagccaccatgccaaacctcggaaaatataactgccttaattcctatgtccggccaaccgcaccacccggccggggagtggtcgtctccctctccaacgcctcttcagacggatcaatctacaatacaccaggcggaggatcttatatacagaggcggccatgctcccgagactgtcgacaccaaagacgagcaagaggtaccggaacccgcaatggaagatgagttactcggattgcacgggaatagaccacaaaaccccagctaccacctacggcaatgcgatgaggatacttgtcaagaaggcagaccatgtgattggtgcactcgattcccaagactatctgcgatgttcaaacgcctccgtgggaaacccgccacccgtagggagacgagcggagaagctaaatcgctggaggtcgaggtagaatcccaccttgacaagactactcttgactctatctgcctgccacacgggccactctacccctctgaagatgagcgtgaaacagagcatgagcctgacggcggccagccgccaacacatcgtggccacggaaatgataatacgaatgatccaggaccccttt

SEQ ID NO: 34592 - DNA, 452 bp, Muscodor strobelii
  misc_feature: SGI cDNA ID NO. 571960
  misc_feature: Elevated expression when VOC is produced
  misc_feature: Encodes the peptide sequence at SEQ ID NO 34593
atgaccgagccaaagagcttgaaggtgatcattgccggtggcggcgtcgttggcctaacattggctaacgccttggagcgtgctgggatcgactttatcctgctcgagaagaggcagatcgcgcccgacctcggcgcatccatctccctgctctgccacaatgcaaaggtgtacgagcagctcgggatagttgacctcttcaacgcggcgaccgtgccactacttgaccgacatcatttcgatcgggacggtcacctgttcgaagacggcggggtgctgaagggcataagtgtcaagacggaacgaccttttcggttcatggagaggcgcttccaccttcagaccctgtttgacaacctgcgcgacaagtccaagatccgcactcaagcttgtgtgcaatcatttgtcgagaacgaacacgggattaccgtgttcacggacaacggggatcg

SEQ ID NO: 34593 - protein, 150 aa, Muscodor strobelii
  misc_feature: SGI Peptide ID NO. 571960
  misc_feature (8)..(41): Pfam Id: PF01266 Pfam Desc: FAD dependent oxidoreductase
  misc_feature (6)..(38): Pfam Id: PF01494 Pfam Desc: FAD binding domain
  misc_feature (1)..(150): NCBI GI: 154324026 Blast Desc: BC1G_00412 [Botryotinia fuckeliana B05.10] gi|150842641|gb|EDN17834.1| BC1G_00412 [Botryotinia fuckeliana B05.10]
  misc_feature (1)..(139): NCBI GI: 146324709 Blast Desc: FAD-dependent monooxygenase [Aspergillus fumigatus Af293] gi|129555457|gb|EBA27209.1| FAD-dependent monooxygenase, [Aspergillus fumigatus Af293] gi|159123852|gb|EDP48971.1| A1163]
  misc_feature (1)..(150): NCBI GI: 119483958 Blast Desc: FAD binding domain protein [Neosartorya fischeri NRRL 181] gi|119410038|gb|EAW19985.1| FAD binding domain protein [Neosartorya fischeri NRRL 181]
  misc_feature (6)..(149): NCBI GI: 119483518 Blast Desc: FAD binding domain protein [Neosartorya fischeri NRRL 181] gi|119409818|gb|EAW19765.1| FAD binding domain protein [Neosartorya fischeri NRRL 181]
  misc_feature (7)..(149): NCBI GI: 238492247 Blast Desc: FAD-dependent monooxygenase, [Aspergillus flavus NRRL3357] gi|220695854|gb|EED52196.1| FAD-dependent monooxygenase, [Aspergillus flavus NRRL3357]
  misc_feature (7)..(149): NCBI GI: 169782614 Blast Desc: [Aspergillus oryzae RIB40] gi|83774513|dbj|BAE64636.1| protein product [Aspergillus oryzae]
  misc_feature (5)..(149): NCBI GI: 238505172 Blast Desc: zeaxanthin epoxidase, [Aspergillus flavus NRRL3357] gi|220689929|gb|EED46279.1| zeaxanthin epoxidase, [Aspergillus flavus NRRL3357]
  misc_feature (5)..(149): NCBI GI: 169780646 Blast Desc: [Aspergillus oryzae RIB40] gi|83773527|dbj|BAE63654.1| protein product [Aspergillus oryzae]
  misc_feature (1)..(148): NCBI GI: 256729398 Blast Desc: NECHADRAFT_47426 [Nectria haematococca mpVI 77-13-4]
  misc_feature (1)..(149): NCBI GI: 258575331 Blast Desc: [Uncinocarpus reesii 1704] gi|237902113|gb|EEP76514.1| [Uncinocarpus reesii 1704]
  misc_feature: Useful for introducing or modulating the production of volatile compounds
MTEPKSLKVIIAGGGVVGLTLANALERAGIDFILLEKRQIAPDLGASISLLCHNAKVYEQLGIVDLFNAATVPLLDRHHFDRDGHLFEDGGVLKGISVKTERPFRFMERRFHLQTLFDNLRDKSKIRTQACVQSFVENEHGITVFTDNGD

SEQ ID NO: 34594 - DNA, 503 bp, Muscodor strobelii
  misc_feature: SGI EST ID NO. CUFF.82247.0
  misc_feature: Variant of the nucleotide sequence at SEQ ID NO 34592
agacggtcgagccgtgcctagaatcctatacctctagcactggtcccagccatgaccgagccaaagagcttgaaggtgatcattgccggtggcggcgtcgttggcctaacattggctaacgccttggagcgtgctgggatcgactttatcctgctcgagaagaggcagatcgcgcccgacctcggcgcatccatctccctgctctgccacaatgcaaaggtgtacgagcagctcgggatagttgacctcttcaacgcggcgaccgtgccactacttgaccgacatcatttcgatcgggacggtcacctgttcgaagacggcggggtgctgaagggcataagtgtcaagacggaacgaccttttcggttcatggagaggcgcttccaccttcagaccctgtttgacaacctgcgcgacaagtccaagatccgcactcaagcttgtgtgcaatcatttgtcgagaacgaacacgggattaccgtgttcacggacaacggggatcg

SEQ ID NO: 34595 - DNA, 1494 bp, Muscodor strobelii
  misc_feature: SGI cDNA ID NO. 571961
  misc_feature: Encodes the peptide sequence at SEQ ID NO 34596
agtaaggttaacgacggtctatttcggggcaacctgacccaacacgacgacgaggatgacctgatccacatggccagggaaatgtcggggggcagcgagatcgttcatgcgaagtatgtcattggctgtgatggcgctcgtagttgggttaggcgagcgctggacatcgagctgcaaggcgatgctaccgatttcatatggggagtcatggacattattccgattacggactttcatatacgaatgagatgcgccatccactcggccgacaacggcagtttgatggtcattccgcgagaaaacagacttgtacgactttatattcaactcaaagaggtggttccagacgcttccgggagagtagaccgatcgaagattgctcccgaactcatcttcgctgcggcgaagaagatcttggccccctacaagattaattacgagtactgcgactggtggacagcataccagatcggacagagagtcgggaaaagcttcgacgctcacagccgtgttttcctcgccggcgatgcggtccacactcactcgcccaaggccggccagggcatgaacgtgtcgatgcaggattgctacaatctgggttggaaggtcggcctcgttgtccgtggcatcgcaaagccgaacatcttgtgtacgtatcagatggagcgccgtcgcgtcgcactagacttgatcgagtttgatcgccgtttcagtcgtctattttccgggcgaccggccaaggatctcatggatatcgaaggagtcagcatgggagagttcaaagctgtcttcgagaagggcaacattttcgcgtccgggctatcggtgaactacggaccaagcaatattaccgtgaagccttgcgatgcgtccgcctggggtgacgacggcgatgacgtcgctgtggacatggcgagcatctccgctgaagacttcgacaagaagcaggcgctggcggccggtctccccgttggcatgcgctttgacagcttcagggtgctcaaccaggccagcgcccagccatttgagttccagcagaggctgaaggccgatggccgcttccgcgtcgtacttttcgcaggtgatatcctcaacgccgaccagaaagcgcgcgtgaacgcgttgtgtgacgacttagagaagcccgagagcttttaccaggcgatgacggcgggcagggtgagggtaagggacaacgtcgtcgagatcctcacaatccattcgtccaagcgtaaggaggtcgaaatcctacgggacttccccgagaccctgcgcccgtttgatcctcatgccggctggaactacgacatgatctatgtcgatgatgagagctatcacgaaggatatggcgatgcgtatcgcaagtacggcgttgataagcgacgcggatgcgttgttgctgtccggccagatcagcatgtcgcatgggtcggagacctggaggatgtgtctgagctgcaggggtattttgagggatgtcttaatctggtctga

SEQ ID NO: 34596 - protein, 497 aa, Muscodor strobelii
  misc_feature: SGI Peptide ID NO. 571961
  misc_feature (1)..(234): Pfam Id: PF01494 Pfam Desc: FAD binding domain
  misc_feature (270)..(463): Pfam Id: PF07976 Pfam Desc: Phenol hydroxylase, C-terminal dimerisation domain
  misc_feature (35)..(234): Pfam Id: PF01494 Pfam Desc: FAD binding domain
  misc_feature (5)..(496): NCBI GI: 85104998 Blast Desc: NCU11294 [Neurospora crassa OR74A] gi|28923431|gb|EAA32615.1| NCU11294 [Neurospora crassa OR74A] gi|40882278|emb|CAF06102.1| phenol 2-monooxygenase [Neurospora
  misc_feature (1)..(494): NCBI GI: 171683651 Blast Desc: protein product [Podospora anserina] gi|170941785|emb|CAP67439.1| protein product [Podospora anserina]
  misc_feature (1)..(496): NCBI GI: 256724396 Blast Desc: [Nectria haematococca mpVI 77-13-4]
  misc_feature (1)..(494): NCBI GI: 46114714 Blast Desc: FG03199.1 [Gibberella zeae PH-1]
  misc_feature (1)..(494): NCBI GI: 189194177 Blast Desc: phenol 2-monooxygenase [Pyrenophora tritici-repentis Pt-1C-BFP] gi|187978991|gb|EDU45617.1| phenol 2-monooxygenase [Pyrenophora tritici-repentis Pt-1C-BFP]
  misc_feature (5)..(490): NCBI GI: 145602957 Blast Desc: MGG_04639 [Magnaporthe grisea 70-15] gi|145011303|gb|EDJ95959.1| MGG_04639 [Magnaporthe grisea 70-15]
  misc_feature (3)..(496): NCBI GI: 119497919 Blast Desc: FAD binding domain protein [Neosartorya fischeri NRRL 181] gi|119413881|gb|EAW23820.1| FAD binding domain protein [Neosartorya fischeri NRRL 181]
  misc_feature (3)..(495): NCBI GI: 70988883 Blast Desc: FAD monooxygenase [Aspergillus fumigatus Af293] gi|66846924|gb|EAL87255.1| FAD monooxygenase, [Aspergillus fumigatus Af293]
  misc_feature (3)..(495): NCBI GI: 159128707 Blast Desc: FAD monooxygenase, [Aspergillus fumigatus A1163]
  misc_feature (3)..(494): NCBI GI: 256724174 Blast Desc: [Nectria haematococca mpVI 77-13-4]
  misc_feature (2)..(494): SWISSPROT Homolog: EC 1.14.13.7 Phenol 2-monooxygenase
SKVNDGLFRGNLTQHDDEDDLIHMAREMSGGSEIVHAKYVIGCDGARSWVRRALDIELQGDATDFIWGVMDIIPITDFHIRMRCAIHSADNGSLMVIPRENRLVRLYIQLKEVVPDASGRVDRSKIAPELIFAAAKKILAPYKINYEYCDWWTAYQIGQRVGKSFDAHSRVFLAGDAVHTHSPKAGQGMNVSMQDCYNLGWKVGLVVRGIAKPNILCTYQMERRRVALDLIEFDRRFSRLFSGRPAKDLMDIEGVSMGEFKAVFEKGNIFASGLSVNYGPSNITVKPCDASAWGDDGDDVAVDMASISAEDFDKKQALAAGLPVGMRFDSFRVLNQASAQPFEFQQRLKADGRFRVVLFAGDILNADQKARVNALCDDLEKPESFYQAMTAGRVRVRDNVVEILTIHSSKRKEVEILRDFPETLRPFDPHAGWNYDMIYVDDESYHEGYGDAYRKYGVDKRRGCVVAVRPDQHVAWVGDLEDVSELQGYFEGCLNLV

SEQ ID NO: 34597 - DNA, 1881 bp, Muscodor strobelii
  misc_feature: SGI EST ID NO. CUFF.82253.0
  misc_feature: Variant of the nucleotide sequence at SEQ ID NO 34595
aacgacggtctatttcggggcaacctgacccaacacgacgacgaggatgacctgatccacatggccagggaaatgtcggggggcagcgagatcgttcatgcgaagtatgtcattggctgtgatggcgctcgtagttgggttaggcgagcgctggacatcgagctgcaaggcgatgctaccgatttcatatggggagtcatggacattattccgattacggactttcgtatgtgagatgagtcataatcagtacgaggtatttctaacccagagtagcagatatacgaatgagatgcgccatccactcggccgacaacggcagtttgatggtcattccgcgagaaaacagacttgtacgactttatattcaactcaaagaggtggttccagacgcttccgggagagtagaccgatcgaagattgctcccgaactcatcttcgctgcggcgaagaagatcttggccccctacaagattaattacgagtactgcgactggtggacagcataccagatcggacagagagtcgggaaaagcttcgacgctcacagccgtgttttcctcgccggcgatgcggtccacactcactcgcccaaggccggccagggcatgaacgtgtcgatgcaggattgctacaatctgggttggaaggtcggcctcgttgtccgtggcatcgcaaagccgaacatcttgtgtacgtatcagatggagcgccgtcgcgtcgcactagacttgatcgagtttgatcgccgtttcagtcgtctattttccgggcgaccggccaaggatctcatggatatcgaaggagtcagcatgggagagttcaaagctgtcttcgagaagggcaacattttcgcgtccgggctatcggtgaactacggaccaagcaatattaccgtgaagccttgcgatgcgtccgcctggggtgacgacggcgatgacgtcgctgtggacatggcgagcatctccgctgaagacttcgacaagaagcaggcgctggcggccggtctccccgttggcatgcgctttgacagcttcagggtgctcaaccaggccagcgcccagccatttgagttccagcagaggctgaaggccgatggccgcttccgcgtcgtacttttcgcaggtgatatcctcaacgccgaccagaaagcgcgcgtgaacgcgttgtgtgacgacttagagaagcccgagagcttttaccaggcgatgacggcgggcagggtgagggtaagggacaacgtcgtcgagatcctcacaatccattcgtccaagcgtaaggaggtcgaaatcctacgggacttccccgagaccctgcgcccgtttgatcctcatgccggctggaactacgacatgatctatgtcgatgatgagagctatcacgaaggatatggcgatgcgtatcgcaagtacggcgttgataagcgacgcggatgcgttgttgctgtccggccagatcagcatgtcgcatgggtcggagacctggaggatgtgtctgagctgcaggggtattttgagggatgtcttaatctggtctgattccgcatgtctggcaagcagacttgtaaatgtagatactgtatgcttcagcccttcaagccggcttctggccccttcgctctggctagagttaagcagtagccgcatgcacacctcgacaagtcatgacgtaggcactcatatactgtaacccgagtatatctcgcagcgaaatagtcacgaaactgctcgctccttacatagacacttcccgagatattccattttcttatgtttcacgcctttataatgaatctagatgccttacccaaacaaaaccctgatggcatatacccatccagatatctacagccaaaacatcccgcaaatataagtcccaaaa

SEQ ID NO: 34598 - DNA, 1638 bp, Muscodor strobelii
  misc_feature: SGI cDNA ID NO. 571962
  misc_feature: Elevated expression when VOC is produced
  misc_feature: Encodes the peptide sequence at SEQ ID NO 34599
atgccaaaaagatttgcgctacttgtcggagtggacttgtatcttcaggacggttcgaggcagctgccaaatggcaggattgtggctctgaagaacctgcaaggggctgtcaacgatgttgcaaacatagcattgcttctggacaaatttcagttcaatgaagtagcccgcctcacttgttctccatccctaatcgatcataaggttcccaacgaacacgaggacagctggcctactcatgccaacatcaagacggcttttgaaggcatacaaagcaagacctgcgctggagatttgttcttctttcacttttccggacatggggcgcagttgcgtgcgactcctaattcattggtccatggtcgctctacagagccatccttgatgactgctgactactgctgcggcgagccggcgattcgcggatgggaactcaacgagtggctatggcaattgaatgagaaaggagttcgggttgttgttctgctcgacagttgctactctgggggggcttggcggatcgggctgagaaacatccgatctcccgaggactggaccccgcctccaaacctgcccgctgatgaaacggcagtgcagggaacacagaaaaagcctggccaccgcgatgcagatctcgacgtctcgtgggatatcaatccgaaagacttcactgtcttagcggcttgtcagagcaaacaagtcgcggcagagaaaacggaggacggggcagcgtacggcgcgtttacgcttgctctatcgcagtatttccaagaccgaacaaactcgccaacgtcaacataccacaccattcgcgatcatacggctaagctcattgaatcatgggagctggcacagacaccccagatttttggtcgagacagactggcttctcttgaagactatgagccagtctcagtggccccgatctttgggcgcatagaagaggacgccatcactcttcctgttggcaatatccacggtgttagcctagggacagaattcataacagttgcgaatcactccacggctatggtctccgtttccgcagtgaccgatctcgagagcgagacaaagatgctggaaggatctgttcaagatctgtcgcaacccattcaggtcgttccattccggtggtgctccgggaagaccttaaccattgtcattgacccaaaccttggtcactcgttccgggagaggcttgccacttatctgggagatagaattgctagtagcattcgatacaccgaaacatctccgtcaaacaacagtatagaccccgaagttacctggctttggttcggactctcgtttttcaagaggatcatcaactacttcgggagttggaccactggtgatatgcggaacgtagaggatgcagattctacaaacagcgacaactctgaagcaacctggttccggctagggcagagagagaatggcggcattaagatcaccggagcaacttggttattaggggctcaaggatctgtacgaggttggaatgcaaagggagagactgaagatgaaagagctagggaatcggccgttgcattggcccatctgttcaggtttgagcagattttcaacttacaaaccgagtctgagattgagccgccattccagatgacaatcagacca

SEQ ID NO: 34599 - protein, 546 aa, Muscodor strobelii
  misc_feature: SGI Peptide ID NO. 571962
  misc_feature (4)..(298): Pfam Id: PF00656 Pfam Desc: Caspase domain
  misc_feature (1)..(335): NCBI GI: 119474521 Blast Desc: caspase, [Neosartorya fischeri NRRL 181] gi|119407289|gb|EAW17239.1| caspase, [Neosartorya fischeri NRRL 181]
  misc_feature (5)..(355): NCBI GI: 119490224 Blast Desc: Peptidase C14, caspase catalytic subunit p20 [Lyngbya sp. PCC 8106] gi|119454110|gb|EAW35263.1| Peptidase C14, caspase catalytic subunit p20 [Lyngbya sp. PCC 8106]
  misc_feature (4)..(334): NCBI GI: 256728431 Blast Desc: NECHADRAFT_87859 [Nectria haematococca mpVI 77-13-4]
  misc_feature (2)..(452): NCBI GI: 159030615 Blast Desc: protein product [Microcystis aeruginosa PCC 7806]
  misc_feature (4)..(334): NCBI GI: 256730384 Blast Desc: NECHADRAFT_101119 [Nectria haematococca mpVI 77-13-4]
  misc_feature (5)..(334): NCBI GI: 119490219 Blast Desc: Peptidase C14, caspase catalytic subunit p20 [Lyngbya sp. PCC 8106] gi|119454105|gb|EAW35258.1| Peptidase C14, caspase catalytic subunit p20 [Lyngbya sp. PCC 8106]
  misc_feature (5)..(335): NCBI GI: 119487607 Blast Desc: L8106_27162 [Lyngbya sp. PCC 8106] gi|119455776|gb|EAW36912.1| L8106_27162 [Lyngbya sp. PCC 8106]
  misc_feature (63)..(335): NCBI GI: 46109678 Blast Desc: FG01721.1 [Gibberella zeae PH-1]
  misc_feature (2)..(334): NCBI GI: 154310164 Blast Desc: BC1G_07002 [Botryotinia fuckeliana B05.10] gi|150851563|gb|EDN26756.1| BC1G_07002 [Botryotinia fuckeliana B05.10]
  misc_feature (4)..(340): NCBI GI: 46120498 Blast Desc: FG04896.1 [Gibberella zeae PH-1]
  misc_feature: Useful for introducing or modulating the production of volatile compounds
MPKRFALLVGVDLYLQDGSRQLPNGRIVALKNLQGAVNDVANIALLLDKFQFNEVARLTCSPSLIDHKVPNEHEDSWPTHANIKTAFEGIQSKTCAGDLFFFHFSGHGAQLRATPNSLVHGRSTEPSLMTADYCCGEPAIRGWELNEWLWQLNEKGVRVVVLLDSCYSGGAWRIGLRNIRSPEDWTPPPNLPADETAVQGTQKKPGHRDADLDVSWDINPKDFTVLAACQSKQVAAEKTEDGAAYGAFTLALSQYFQDRTNSPTSTYHTIRDHTAKLIESWELAQTPQIFGRDRLASLEDYEPVSVAPIFGRIEEDAITLPVGNIHGVSLGTEFITVANHSTAMVSVSAVTDLESETKMLEGSVQDLSQPIQVVPFRWCSGKTLTIVIDPNLGHSFRERLATYLGDRIASSIRYTETSPSNNSIDPEVTWLWFGLSFFKRIINYFGSWTTGDMRNVEDADSTNSDNSEATWFRLGQRENGGIKITGATWLLGAQGSVRGWNAKGETEDERARESAVALAHLFRFEQIFNLQTESEIEPPFQMTIRP

SEQ ID NO: 34600 - DNA, 7437 bp, Muscodor strobelii
  misc_feature: SGI cDNA ID NO. 571963
  misc_feature: Reduced expression when VOC is produced
  misc_feature: Encodes the peptide sequence at SEQ ID NO 34601
atggtggcttggggatgcacccaaggcccggccgtacgtcgagctacaacgtcgtcgccaagctcgtcccatcctcctcgtgcgacagcacaggacggcttcgatctgtctctgcccactcgcggctcgcctccctcgtcacccttctcgagtacttcgactgtcgaagccggcgaatcgtcctcgcccattcttccgccgctcgaggcaccgcgactgcccgaccgagccttggaatttcttcgcacaccgcctcagtcgactcgaggaaccgacgaaggaaactacgtgactacgagctggggttctccatatccgcacgccgaaggccagcagtttagaagattgagctttagcagcagtgagacgtcagacgaggaatcacccttgcatcagctcgagcttgacacgcgattcttgcgaccagctcctgaggccgagcctgaattaccacccctgaattcgtcactttctggaactgccgctgtgcttgtaaaccgcgtacggcgaccattgggtggtattacggaagattggatccgtcaacacacaacgcacactcccagctccgagcatcatcattggtttagcgacggcgagaacgagagcgagcactcttcattgagcggctcggttgcgagcgacgaagcgggctggtttgaagagaacgatcctcgaaccccacgcgcttccaatacctctctacaagtattgaattctgtatcccgttcgcatccccgaaaccggtcgagcatcgaaacgttgaggcaggccgcgctgaatcgcgccgctagccgtgttgcaagtatggactctgtagaaatggaaaagggggcaaccccggatgcggcgagcattcacaccgtagactcgaattcggagtcaacaccgagacctgcgactcctacaaaaatgagcgagccagatatgaatggttcggcagaagctggtgttccacaacctgtacttcctatgactccagcaaagccgaccaagacgactatctctcagacacccagactcaagaagaaggtgccatggaaagggaagaatatcatggtgctgctacctcgggacgatgaacggggcagacccgggcaagcgcctctgccccttgatgccgtgcgcaccgaggatatgttccgcgcatgggaagagttagggtacaacatccgaggatttgatctcgagggattcccgggcacacacatcgtcgagagcaactcgaggagtcgcgatgaatggccaagagccgaagatattgtgaaagagcgatctcaacgccaatataatgtctctttacctgacttgaatgcatgggcagactacatgaacgagctcatcgaagccaagcttagagggcttggtgtgaccacggccgcagaggaacctgcaccgcaaccctcaatgtcaccagctccttccaacctgagccgcccggcttctacacagtttcctggcatgcccttctcgcccccattacctacgtcctcagccacaagtaccggtcctcaaggattcccatttgcggccaatttcctgcagaacggaccgcctgtgtcgcagagcccgggaattcctggggttgcttcaccggtattcaactcgcacccccctggcaagttcaacccacgagcttcgatttctgtgtcgcctcacgagttgggtttccacatgaacgggcaaccgtctcctatgggctggtccccgcagctgttgttgcaccagcaacagcttgggcgcagtggctcaccgtcctttatgatgtccccaggctctccattttcacctgaggccatgtctccagcaggcatccaccaaaggcaccaatctttacaatacccaatgctgcctcaccaattcttgcacaggcaagactcggcaagagcttctccgcgcttgcaggaagtgttggaagacgaagaagagactcagacaaatccatacgacgaaagtcctgctaagacccctgagccccagccgttcatccagcacaacgctagtaatagtctgcaaaaggagattgatgatgcagagtatcacctggaggagcagttccgttcgcaattggaacacgaagattacagcccccacaacgagatggtgcaacaacaagctggtcagcccgttgatgatatggctgaggccgcgcatgcaaggggaccctctgtgcacttcagtggcattggaatggattcagacgaaggcccgcagctgcatcacccgcaacctcatagtagaggccattccttgtcccaaaacccgtactttgataacgacgaagtccgtgacagcacagatgagggtagtgttagaaaacctcagcctcatcaaatggcaccaagtcaggacagttccttcgaagctggggcaaattccactcattttggtacaccaggccaaagtttcgattttggcaacaagtttcaccagagatcgttatcaactgcaagcaacccttgggctgattctgaaaccttctcggcctcggccagcaaacttcactctcgtcaagctagccacaatagcaagccttctctatcgaaactgaatgccggtgctgccgagttcaagttcaacccggcttccaacttcacgcctggtcagtttgtgtttggaggagcgaatccacaagcaccggcttttacacccgccggcttccaagcttcagccttctcacctgcgctcccccaatcagcgacttcgagccacttcagcaagccttcgaatgcttctacgactatgtcgaagatcaatccttcggctcctgccttctcaccgcacaagagcgatttcagcttctctacctcgggtcccaaattcaacccggatgccaaggccttccagcccatggcatcctttgcgtcatctgctaatagtgctgtcgactcagggaacgaaggcacagacacccgccccaactctatctttggcaatatcagtattgtcagctctgatatcgtgaagccggtcaagaagtccaaggctattcctattgtccgaccctcaagtcgacaatccccaacccctatctccacgccagctgctgatgtccctggtatcgtggaaggtgaagatggccgactcgaccgcggggatagtcgcgcgaagaagcaatttagagatcagaacgatgacggtaatgaggtacctcggttcgcggaaccgactcctgaacccgaatggatgaaggaaagctcacagcccatcgcatcccctgcgccagaggttgaggacaaagacgaagctgatgttcaggatgtatctatcgatgaaaaagtcgaggaagacgaggttgccgctgcagccgacaccacaatggcatccacagttctatcggaatccaccgatgggaaactgccttctgaatccaatgacacgaaagcaactacaagtccttcggcaacatcacccgatcctgataaggcgaactggagaccaatggaattcagaaatgatactgaaattcaggacttcaacaatgccagaccatttggtgaagacgagccgtcgttcacggagctctctaagccacatttctcagctactgcaaagccttttgtccccggaggaagcttcatgtttggtggtcaggataccaatatcacaccgtttgagccagacttcacgacgcaaccggcccaaatggccgagcaagccgacgactcagaggatgaccgtgctgggtcaccaactcccgggcctgactattttgcggctaaagatcgggagtcagagggacgccgcactgtgtctcctgaacccgcgtccgtgtcgtcgagaggcttgcttggctcccgatttgcatcccctccgccagctccaaagggactcaaagcctcgcggttcgctgctagcccttcaccaattaggaacaatgcctctccatctcccgtatcagaagagcaatctgcgacttatcccgagaccttgcgcagcgaagaagcttctgatgttcatagctacgagccgctgcctgtgagcccgccttcagatgctggcatgcaaatcccgacgaatgagatcgacggactcacgttcgaggaaattgattctgtcatgcaacaattggagatggatccttccatgggagttaagagagccgtggattcgcctaagtaccatcagccaagtcctgtgcggaaaatctctgtcgctgctctcactaactcgcccccctgtacaaatgccaaacattctatcgaattggaagatcctttcttggaccctccgcacagcgccgtctcgcagtctttcgatgctcccgtacaacgcctaaatgccgccgaagatctccctgagagcgaatgggacgatacctttagtgcggatgaacaagacaagcttgagcaacgtgttcaatacttcgatggtcgcgtcaacgatgttgttggcaacttacttgcctcgcgcatggatcctctggaaaagaccttgggttctatccagcatgttctgggccagctatctcgaagagcgccatccagtcgtcgggaccgtcgtagtctgtctgccgaggttcaggagagcgatgctgacgatgaagatgatgaggctcccgttcgtcggtcaatgagcccccgaagggacaagaagctcgaccagatcagacttgcagtcatggatgctatgaaccagcaccaaaccactcgcgctctccagccggctcagatcgaaccgaccgaagaagtcgaggataaggaggactccgctgttgtcaaggctttggaagagatgaaactacaaatcgtcgagagcatgcccaacttccgtggcgatgatctccggaatatcgttgaggaagcagtcaagaaccgcatgcctccgacaccgccccctgttatcaaagatgacgaggaggccaataaaaagctctcggagatgcaggctaagattaatgatctggagcagcgtcttcgaaccgaggagtctagaaccgagtcagaacgatggcgagttcaggagctcgaagacaaggtacggactggtgagagtagagttgaggaagaactggccactcgtcgcgccgccgaggaccgtacttccgagcttcgacgtcaactcgaacaagccgagactaaggtggaagtcgaaatcatgaaccgcagtgtattcgaccagcgaatccatgatctggaagatcgtctgaagagtcaggaaagtagagccgattctgagctttccggtcgtagagaggccgaagatagactctcagagatccaaagactacttcgtatctcttcagaggaggaggatcgtctccgatccgttctggaagaacgtgaccaaaagatcagggttatcgagcagtcctctggcaagacctctatgcgtctcgctctacttgaggccgctcacaagaatgccgaacaaactgaggccgagctcaaaaaccgtctcaacaatgctgaaactgaacttcgggattcccggcaacaagctcttcactggcgttctgaggccgagcaggcgagagaatctgcaactcgccaagctgacgacttcgtttcttctattaatgaaacgaagcaccttcacaagctcattgatacccttggcgttcaactggaagagaatgagcgtattagagataattggcgtgccaagttcgtgtccctgcaggacgatatggctcacgcagcccaggaaatcactgaagagaactcgcgacgtactaagaaagaacaagcacttattgcacgtcaagaagtcttggatgcacgtctccaggctgaagctcgcactcgtgagcggctcgaagttgaggtcgaacgattggaagcgcaagagcgttctgccatgagagccgtgagcgaatgcaagcgtctcgaagggatactcggtgagatgcgtactgagaaccacaacctccatcaagaagcactccgcactcagcgtgaagctcaagaagccagggatatggcaactgccgagaaggaacgcagtcaacttgacatccaggaagcccgagacgctgctgccgcagaggtgcaacgtgctcagcaactggttcaagaagcacatgatgcagctctcgtcgagactcaaacggttcgcgaatctgttgctgctgaactggcagttgctcgtgaccaggccaacatcgccaaggctgatttcgaggaagagttggccagggtcaaagctcaaatcgaccaagtccaaatggatgcagacactgccaaggctcaacacgagatgatgttcgaagaagctcacaataacaaacaggctgagctggaggctgcctacaacgctaagcagaccgaacttcaagaggcaactctcaaacatctgaatgacatcgaggatatgaaggctcgttacgagcgacagatcaacaacggtgctgaggatgcccaacgcacagagcaacatcttctagaacgtctgagcctttctgcgtctaagacagagcacctacaagagcgtgtggcacatctggaagaacggcttgagattgcccaagaggcagccaaggccgcggctaaggctgctgcacaagcctctaaaaatgtcatcatgcccgagcctgcacagcttgcacagccgggccctgttggtcagaccaagcaactcgcacaagctatgcagcttcccgaaaagatctcgccacaggccctccgtgagtcaatcatggttctccaggagcaactccaagctcgagagcagcggatcgaggaactcgaacagaccgtggctaagcttgatcccgaggcgccaacgaagatttctaagcgtgatgacgagattacatggctgcgcgaacttctggcagtgagacatggtgatcttcaagacatcatcactgcattgtcagccgaccgatacgatcgcgaagcagttaaagacgctactattcgcctcaaggccaacctgcagatggaagaacaagagcgggagcgtgctatgaatggcggctctgctctcaacttgcctaacattgctgctactatttccaaagcggctacccctcgagttgctcaggcagtcggtcctttagctgctgcttggggcaactggcgccgatcgaattcatctgcactcctgtctggcgctatgtcatcacccggtcctgggagaaatgcgactccctccaaatccaataatatcagctcacgcaaccgggagagttcactttctgggctgatgacaccgccggcttcgaacatccgcagcaccccggaaccgggatcgagtcaaacgcagccaactgctttcggcaacactggtcggcgactgactgctgagcagtttgctaacaggacccgtggcccgtcgctgacggcacgccaggccgagaaaatgcctcttgccactacacctccttcgcggcaacaaaaggcaccccaaacgccgcccatgatgcagtctcactcatacgacgcagatgcacgaatggaggagtttgacgacgcatcctttttcgacgattga

SEQ ID NO: 34601 - protein, 2478 aa, Muscodor strobelii
  misc_feature: SGI Peptide ID NO. 571963
  misc_feature (18)..(2478): NCBI GI: 149209961 Blast Desc: MGCH7_ch7g462 [Magnaporthe grisea 70-15] gi|86196417|gb|EAQ71055.1| MGCH7_ch7g462 [Magnaporthe grisea 70-15]
  misc_feature (18)..(2478): NCBI GI: 145610094 Blast Desc: MGG_02716 [Magnaporthe grisea 70-15] gi|145017477|gb|EDK01840.1| MGG_02716 [Magnaporthe grisea 70-15]
  misc_feature (76)..(2478): NCBI GI: 261353149 Blast Desc: conserved [Verticillium albo-atrum VaMs.102]
  misc_feature (23)..(2466): NCBI GI: 46128916 Blast Desc: FG08786.1 [Gibberella zeae PH-1]
  misc_feature (279)..(2478): NCBI GI: 256733507 Blast Desc: NECHADRAFT_67284 [Nectria haematococca mpVI 77-13-4]
  misc_feature (25)..(2422): NCBI GI: 85115685 Blast Desc: NCU09104 [Neurospora crassa OR74A] gi|28926718|gb|EAA35685.1| [Neurospora crassa OR74A]
  misc_feature (75)..(2478): NCBI GI: 171685041 Blast Desc: protein product [Podospora anserina] gi|170942481|emb|CAP68133.1| protein product [Podospora anserina]
  misc_feature (340)..(2472): NCBI GI: 156059194 Blast Desc: SS1G_03609 [Sclerotinia sclerotiorum 1980] gi|154701396|gb|EDO01135.1| SS1G_03609 [Sclerotinia sclerotiorum 1980]
  misc_feature (26)..(1193): NCBI GI: 116193499 Blast Desc: CHGG_06467 [Chaetomium globosum CBS 148.51] gi|88182380|gb|EAQ89848.1| CHGG_06467 [Chaetomium globosum CBS 148.51]
  misc_feature (89)..(2465): NCBI GI: 261203535 Blast Desc: myosin class II heavy chain [Ajellomyces dermatitidis SLH14081] gi|239586766|gb|EEQ69409.1| myosin class II heavy chain [Ajellomyces dermatitidis SLH14081]
  misc_feature: Useful for introducing or modulating the production of volatile compounds
MVAWGCTQGPAVRRATTSSPSSSHPPRATAQDGFDLSLPTRGSPPSSPFSSTSTVEAGESSSPILPPLEAPRLPDRALEFLRTPPQSTRGTDEGNYVTTSWGSPYPHAEGQQFRRLSFSSSETSDEESPLHQLELDTRFLRPAPEAEPELPPLNSSLSGTAAVLVNRVRRPLGGITEDWIRQHTTHTPSSEHHHWFSDGENESEHSSLSGSVASDEAGWFEENDPRTPRASNTSLQVLNSVSRSHPRNRSSIETLRQAALNRAASRVASMDSVEMEKGATPDAASIHTVDSNSESTPRPATPTKMSEPDMNGSAEAGVPQPVLPMTPAKPTKTTISQTPRLKKKVPWKGKNIMVLLPRDDERGRPGQAPLPLDAVRTEDMFRAWEELGYNIRGFDLEGFPGTHIVESNSRSRDEWPRAEDIVKERSQRQYNVSLPDLNAWADYMNELIEAKLRGLGVTTAAEEPAPQPSMSPAPSNLSRPASTQFPGMPFSPPLPTSSATSTGPQGFPFAANFLQNGPPVSQSPGIPGVASPVFNSHPPGKFNPRASISVSPHELGFHMNGQPSPMGWSPQLLLHQQQLGRSGSPSFMMSPGSPFSPEAMSPAGIHQRHQSLQYPMLPHQFLHRQDSARASPRLQEVLEDEEETQTNPYDESPAKTPEPQPFIQHNASNSLQKEIDDAEYHLEEQFRSQLEHEDYSPHNEMVQQQAGQPVDDMAEAAHARGPSVHFSGIGMDSDEGPQLHHPQPHSRGHSLSQNPYFDNDEVRDSTDEGSVRKPQPHQMAPSQDSSFEAGANSTHFGTPGQSFDFGNKFHQRSLSTASNPWADSETFSASASKLHSRQASHNSKPSLSKLNAGAAEFKFNPASNFTPGQFVFGGANPQAPAFTPAGFQASAFSPALPQSATSSHFSKPSNASTTMSKINPSAPAFSPHKSDFSFSTSGPKFNPDAKAFQPMASFASSANSAVDSGNEGTDTRPNSIFGNISIVSSDIVKPVKKSKAIPIVRPSSRQSPTPISTPAADVPGIVEGEDGRLDRGDSRAKKQFRDQNDDGNEVPRFAEPTPEPEWMKESSQPIASPAPEVEDKDEADVQDVSIDEKVEEDEVAAAADTTMASTVLSESTDGKLPSESNDTKATTSPSATSPDPDKANWRPMEFRNDTEIQDFNNARPFGEDEPSFTELSKPHFSATAKPFVPGGSFMFGGQDTNITPFEPDFTTQPAQMAEQADDSEDDRAGSPTPGPDYFAAKDRESEGRRTVSPEPASVSSRGLLGSRFASPPPAPKGLKASRFAASPSPIRNNASPSPVSEEQSATYPETLRSEEASDVHSYEPLPVSPPSDAGMQIPTNEIDGLTFEEIDSVMQQLEMDPSMGVKRAVDSPKYHQPSPVRKISVAALTNSPPCTNAKHSIELEDPFLDPPHSAVSQSFDAPVQRLNAAEDLPESEWDDTFSADEQDKLEQRVQYFDGRVNDVVGNLLASRMDPLEKTLGSIQHVLGQLSRRAPSSRRDRRSLSAEVQESDADDEDDEAPVRRSMSPRRDKKLDQIRLAVMDAMNQHQTTRALQPAQIEPTEEVEDKEDSAVVKALEEMKLQIVESMPNFRGDDLRNIVEEAVKNRMPPTPPPVIKDDEEANKKLSEMQAKINDLEQRLRTEESRTESERWRVQELEDKVRTGESRVEEELATRRAAEDRTSELRRQLEQAETKVEVEIMNRSVFDQRIHDLEDRLKSQESRADSELSGRREAEDRLSEIQRLLRISSEEEDRLRSVLEERDQKIRVIEQSSGKTSMRLALLEAAHKNAEQTEAELKNRLNNAETELRDSRQQALHWRSEAEQARESATRQADDFVSSINETKHLHKLIDTLGVQLEENERIRDNWRAKFVSLQDDMAHAAQEITEENSRRTKKEQALIARQEVLDARLQAEARTRERLEVEVERLEAQERSAMRAVSECKRLEGILGEMRTENHNLHQEALRTQREAQEARDMATAEKERSQLDIQEARDAAAAEVQRAQQLVQEAHDAALVETQTVRESVAAELAVARDQANIAKADFEEELARVKAQIDQVQMDADTAKAQHEMMFEEAHNNKQAELEAAYNAKQTELQEATLKHLNDIEDMKARYERQINNGAEDAQRTEQHLLERLSLSASKTEHLQERVAHLEERLEIAQEAAKAAAKAAAQASKNVIMPEPAQLAQPGPVGQTKQLAQAMQLPEKISPQALRESIMVLQEQLQAREQRIEELEQTVAKLDPEAPTKISKRDDEITWLRELLAVRHGDLQDIITALSADRYDREAVKDATIRLKANLQMEEQERERAMNGGSALNLPNIAATISKAATPRVAQAVGPLAAAWGNWRRSNSSALLSGAMSSPGPGRNATPSKSNNISSRNRESSLSGLMTPPASNIRSTPEPGSSQTQPTAFGNTGRRLTAEQFANRTRGPSLTARQAEKMPLATTPPSRQQKAPQTPPMMQSHSYDADARMEEFDDASFFDD

SEQ ID NO: 34602 - DNA, 8697 bp, Muscodor strobelii
  misc_feature: SGI EST ID NO. CUFF.82380.0
  misc_feature: Variant of the nucleotide sequence at SEQ ID NO 34600
caacacctctggcacggggcaatttttcgaatcggggggcagattgcagttgatcgcttgctcgaacggggccctggcacacgtctacagtaacctggtatcttttttcctttttttccctccttcacgacactccacgacctcacctcctcccccaacgacacgacgcgcctcctcgttgttcgtccgccgtcgaagctccagttgtacatgcacctgtacaatcatccctcgagcctccgcctgctcacctcgccctctgcagcagtatatacctactgaactgctggaggtgctccacgacagcgcgactggacgttacatactcgatgcatgcatcaacttcattcattttaacttctcttttcactatttgatgtacatccatctgtgagcgagcgagcgagctactcgttgctgcgaaactagactcagtacgcgttggaaatccctttatactcgtaataatacctgtactcgtacttcgcatctttccaaaagtcaatctgcgacgacccgattcgacgcgattattattcggcctgtgtgttttgtacccgccgaattaagacaagacgcgatccatccaagctgtcgggcatcagaatagcaggcgactagcttatcgtctgctcttttgatctcgctcctacgtcgagctacaacgtcgtcgccaagctcgtcccatcctcctcgtgcgacagcacaggacggcttcgatctgtctctgcccactcgcggctcgcctccctcgtcacccttctcgagtacttcgactgtcgaagccggcgaatcgtcctcgcccattcttccgccgctcgaggcaccgcgactgcccgaccgagccttggaatttcttcgcacaccgcctcagtcgactcgaggaaccgacgaaggaaactacgtgactacgagctggggttctccatatccgcacgccgaaggccagcagtttagaagattgagctttagcagcagtgagacgtcagacgaggaatcacccttgcatcagctcgagcttgacacgcgattcttgcgaccagctcctgaggccgagcctgaattaccacccctgaattcgtcactttctggaactgccgctgtgcttgtaaaccgcgtacggcgaccattgggtggtattacggaagattggatccgtcaacacacaacgcacactcccagctccgagcatcatcattggtttagcgacggcgagaacgagagcgagcactcttcattgagcggctcggttgcgagcgacgaagcgggctggtttgaagagaacgatcctcgaaccccacgcgcttccaatacctctctacaagtattgaattctgtatcccgttcgcatccccgaaaccggtcgagcatcgaaacgttgaggcaggccgcgctgaatcgcgccgctagccgtgttgcaagtatggactctgtagaaatggaaaagggggcaaccccggatgcggcgagcattcacaccgtagactcgaattcggagtcaacaccgagacctgcgactcctacaaaaatgagcgagccagatatgaatggttcggcagaagctggtgttccacaacctgtacttcctatgactccagcaaagccgaccaagacgactatctctcagacacccagactcaagaagaaggtgccatggaaagggaagaatatcatggtgctgctacctcgggacgatgaacggggcagacccgggcaagcgcctctgccccttgatgccgtgcgcaccgaggatatgttccgcgcatgggaagagttagggtacaacatccgaggatttgatctcgagggattcccgggcacacacatcgtcgagagcaactcgaggagtcgcgatgaatggccaagagccgaagatattgtgaaagagcgatctcaacgccaatataatgtctctttacctgacttgaatgcatgggcagactacatgaacgagctcatcgaagccaagcttagagggcttggtgtgaccacggccgcagaggaacctgcaccgcaaccctcaatgtcaccagctccttccaacctgagccgcccggcttctacacagtttcctggcatgcccttctcgcccccattacctacgtcctcagccacaagtaccggtcctcaaggattcccatttgcggccaatttcctgcagaacggaccgcctgtgtcgcagagcccgggaattcctggggttgcttcaccggtattcaactcgcacccccctggcaagttcaacccacgagcttcgatttctgtgtcgcctcacgagttgggtttccacatgaacgggcaaccgtctcctatgggctggtccccgcagctgttgttgcaccagcaacagcttgggcgcagtggctcaccgtcctttatgatgtccccaggctctccattttcacctgaggccatgtctccagcaggcatccaccaaaggcaccaatctttacaatacccaatgctgcctcaccaattcttgcacaggcaagactcggcaagagcttctccgcgcttgcaggaagtgttggaagacgaagaagagactcagacaaatccatacgacgaaagtcctgctaagacccctgagccccagccgttcatccagcacaacgctagtaatagtctgcaaaaggagattgatgatgcagagtatcacctggaggagcagttccgttcgcaattggaacacgaagattacagcccccacaacgagatggtgcaacaacaagctggtcagcccgttgatgatatggctgaggccgcgcatgcaaggggaccctctgtgcacttcagtggcattggaatggattcagacgaaggcccgcagctgcatcacccgcaacctcatagtagaggccattccttgtcccaaaacccgtactttgataacgacgaagtccgtgacagcacagatgagggtagtgttagaaaacctcagcctcatcaaatggcaccaagtcaggacagttccttcgaagctggggcaaattccactcattttggtacaccaggccaaagtttcgattttggcaacaagtttcaccagagatcgttatcaactgcaagcaacccttgggctgattctgaaaccttctcggcctcggccagcaaacttcactctcgtcaagctagccacaatagcaagccttctctatcgaaactgaatgccggtgctgccgagttcaagttcaacccggcttccaacttcacgcctggtcagtttgtgtttggaggagcgaatccacaagcaccggcttttacacccgccggcttccaagcttcagccttctcacctgcgctcccccaatcagcgacttcgagccacttcagcaagccttcgaatgcttctacgactatgtcgaagatcaatccttcggctcctgccttctcaccgcacaagagcgatttcagcttctctacctcgggtcccaaattcaacccggatgccaaggccttccagcccatggcatcctttgcgtcatctgctaatagtgctgtcgactcagggaacgaaggcacagacacccgccccaactctatctttggcaatatcagtattgtcagctctgatatcgtgaagccggtcaagaagtccaaggctattcctattgtccgaccctcaagtcgacaatccccaacccctatctccacgccagctgctgatgtccctggtatcgtggaaggtgaagatggccgactcgaccgcggggatagtcgcgcgaagaagcaatttagagatcagaacgatgacggtaatgaggtacctcggttcgcggaaccgactcctgaacccgaatggatgaaggaaagctcacagcccatcgcatcccctgcgccagaggttgaggacaaagacgaagctgatgttcaggatgtatctatcgatgaaaaagtcgaggaagacgaggttgccgctgcagccgacaccacaatggcatccacagttctatcggaatccaccgatgggaaactgccttctgaatccaatgacacgaaagcaactacaagtccttcggcaacatcacccgatcctgataaggcgaactggagaccaatggaattcagaaatgatactgaaattcaggacttcaacaatgccagaccatttggtgaagacgagccgtcgttcacggagctctctaagccacatttctcagctactgcaaagccttttgtccccggaggaagcttcatgtttggtggtcaggataccaatatcacaccgtttgagccagacttcacgacgcaaccggcccaaatggccgagcaagccgacgactcagaggatgaccgtgctgggtcaccaactcccgggcctgactattttgcggctaaagatcgggagtcagagggacgccgcactgtgtctcctgaacccgcgtccgtgtcgtcgagaggcttgcttggctcccgatttgcatcccctccgccagctccaaagggactcaaagcctcgcggttcgctgctagcccttcaccaattaggaacaatgcctctccatctcccgtatcagaagagcaatctgcgacttatcccgagaccttgcgcagcgaagaagcttctgatgttcatagctacgagccgctgcctgtgagcccgccttcagatgctggcatgcaaatcccgacgaatgagatcgacggactcacgttcgaggaaattgattctgtcatgcaacaattggagatggatccttccatgggagttaagagagccgtggattcgcctaagtaccatcagccaagtcctgtgcggaaaatctctgtcgctgctctcactaactcgcccccctgtacaaatgccaaacgtacctttccggagtgatggtccaagccccagtccccagcagtatagagctttgccaaaagattctatcgaattggaagatcctttcttggaccctccgcacagcgccgtctcgcagtctttcgatgctcccgtacaacgcctaaatgccgccgaagatctccctgagagcgaatgggacgatacctttagtgcggatgaacaagacaagcttgagcaacgtgttcaatacttcgatggtcgcgtcaacgatgttgttggcaacttacttgcctcgcgcatggatcctctggaaaagaccttgggttctatccagcatgttctgggccagctatctcgaagagcgccatccagtcgtcgggaccgtcgtagtctgtctgccgaggttcaggagagcgatgctgacgatgaagatgatgaggctcccgttcgtcggtcaatgagcccccgaagggacaagaagctcgaccagatcagacttgcagtcatggatgctatgaaccagcaccaaaccactcgcgctctccagccggctcagatcgaaccgaccgaagaagtcgaggataaggaggactccgctgttgtcaaggctttggaagagatgaaactacaaatcgtcgagagcatgcccaacttccgtggcgatgatctccggaatatcgttgaggaagcagtcaagaaccgcatgcctccgacaccgccccctgttatcaaagatgacgaggaggccaataaaaagctctcggagatgcaggctaagattaatgatctggagcagcgtcttcgaaccgaggagtctagaaccgagtcagaacgatggcgagttcaggagctcgaagacaaggtacggactggtgagagtagagttgaggaagaactggccactcgtcgcgccgccgaggaccgtacttccgagcttcgacgtcaactcgaacaagccgagactaaggtggaagtcgaaatcatgaaccgcagtgtattcgaccagcgaatccatgatctggaagatcgtctgaagagtcaggaaagtagagccgattctgagctttccggtcgtagagaggccgaagatagactctcagagatccaaagactacttcgtatctcttcagaggaggaggatcgtctccgatccgttctggaagaacgtgaccaaaagatcagggttatcgagcagtcctctggcaagacctctatgcgtctcgctctacttgaggccgctcacaagaatgccgaacaaactgaggccgagctcaaaaaccgtctcaacaatgctgaaactgaacttcgggattcccggcaacaagctcttcactggcgttctgaggccgagcaggcgagagaatctgcaactcgccaagctgacgacttcgtttcttctattaatgaaacgaagcaccttcacaagctcattgatacccttggcgttcaactggaagagaatgagcgtattagagataattggcgtgccaagttcgtgtccctgcaggacgatatggctcacgcagcccaggaaatcactgaagagaactcgcgacgtactaagaaagaacaagcacttattgcacgtcaagaagtcttggatgcacgtctccaggctgaagctcgcactcgtgagcggctcgaagttgaggtcgaacgattggaagcgcaagagcgttctgccatgagagccgtgagcgaatgcaagcgtctcgaagggatactcggtgagatgcgtactgagaaccacaacctccatcaagaagcactccgcactcagcgtgaagctcaagaagccagggatatggcaactgccgagaaggaacgcagtcaacttgacatccaggaagcccgagacgctgctgccgcagaggtgcaacgtgctcagcaactggttcaagaagcacatgatgcagctctcgtcgagactcaaacggttcgcgaatctgttgctgctgaactggcagttgctcgtgaccaggccaacatcgccaaggctgatttcgaggaagagttggccagggtcaaagctcaaatcgaccaagtccaaatggatgcagacactgccaaggctcaacacgagatgatgttcgaagaagctcacaataacaaacaggctgagctggaggctgcctacaacgctaagcagaccgaacttcaagaggcaactctcaaacatctgaatgacatcgaggatatgaaggctcgttacgagcgacagatcaacaacggtgctgaggatgcccaacgcacagagcaacatcttctagaacgtctgagcctttctgcgtctaagacagagcacctacaagagcgtgtggcacatctggaagaacggcttgagattgcccaagaggcagccaaggccgcggctaaggctgctgcacaagcctctaaaaatgtcatcatgcccgagcctgcacagcttgcacagccgggccctgttggtcagaccaagcaactcgcacaagctatgcagcttcccgaaaagatctcgccacaggccctccgtgagtcaatcatggttctccaggagcaactccaagctcgagagcagcggatcgaggaactcgaacagaccgtggctaagcttgatcccgaggcgccaacgaagatttctaagcgtgatgacgagattacatggctgcgcgaacttctggcagtgagacatggtgatcttcaagacatcatcactgcattgtcagccgaccgatacgatcgcgaagcagttaaagacgctactattcgcctcaaggccaacctgcagatggaagaacaagagcgggagcgtgctatgaatggcggctctgctctcaacttgcctaacattgctgctactatttccaaagcggctacccctcgagttgctcaggcagtcggtcctttagctgctgcttggggcaactggcgccgatcgaattcatctgcactcctgtctggcgctatgtcatcacccggtcctgggagaaatgcgactccctccaaatccaataatatcagctcacgcaaccgggagagttcactttctgggctgatgacaccgccggcttcgaacatccgcagcaccccggaaccgggatcgagtcaaacgcagccaactgctttcggcaacactggtcggcgactgactgctgagcagtttgctaacaggacccgtggcccgtcgctgacggcacgccaggccgagaaaatgcctcttgccactacacctccttcgcggcaacaaaaggcaccccaaacgccgcccatgatgcagtctcactcatacgacgcagatgcacgaatggaggagtttgacgacgcatcctttttcgacgattgaacatgagcattctcttttccgttcgcttcttcctgagatctggcatcatttggccactgagttacgatcttccgatttggcattgcaggtttggggcatataagaatttgcaatgtgctgtgataccgtttgtgtttttgcttggttgctttacgtacccgcgctagattgataccccataccatacgatacacataacccttttctcttgctagtggatggcaagaaaggatttaataaatctcacatatacacgctccttacctgaaaaccagactgggatgaatctcgagcatgtccgagattcattgatatctttttctttcctttgtcattgcatagtatgaggtgatgggtggtacactcttttacgagagaatgagagggtgagaagtgagggatgaggagctgtagatatatagtaattaccattcgttttatttctattgtcttgttatggtcgtgaatgtgtgagttgccttgcattggccgtcagcgagtggtaactagaagagcagagtcttgcactacctgagcccctgcaccgaatgtctcaatcactaacgaatgacaggcgatgaac

SEQ ID NO: 34603 - DNA, 858 bp, Muscodor strobelii
  misc_feature: SGI cDNA ID NO. 571964
  misc_feature: Reduced expression when VOC is produced
  misc_feature: Encodes the peptide sequence at SEQ ID NO 34604
atgtactcctcacggctggttcacatattgttggtcggcttggccttcctcctcgccaccagagcagcatggcagccgcgcaacgtcagtgctcgggatggtatcctcgacagccttctgcctggaggagccgccgacgatagcactacatccactcccgccgacccgactacctcttccgatcctactacttccagcgacccgccgacgtcaaccaccgattctaccaccagcgactcgtcaacatcgacaactgagtctactacttccactaccgacggcccgacatcaagcactcctcccccatcgtccactacttcgactaccgatgacggtggttcgaccaccagtacttcggctacgcaaggcccgacatcaaccacaccaagctcaacgacccaggatgaccagaccaccaagacgacgccctcgtccacaggaaagcccttcaccacatctaccactgtcgtgtacacgtccaccgatgcccagggacacacgtacacctcaagctcgttgtctcaggttgtccagactcccggcttctccggaagtggctcttccagcaagaataagggtctttccgacaaggacaagtccactgtgattggtgtcacggtcggtgtcggcggtgctatcatcctcgccgctctcggtgttctgttctggagactccgcagcaagagacgcagcaacgaagagcaagaggagttggtcagctacggtgctggattcggcggccctggcactgctgagaagacatcggagcccagcactggcgcatcccggagcccattccagagcacactcgagagctatcacgctccatcgtcaacgaacgctgcatccaacttttag

SEQ ID NO: 34604 - protein, 285 aa, Muscodor strobelii
  misc_feature: SGI Peptide ID NO. 571964
  misc_feature (101)..(285): NCBI GI: 226284306 Blast Desc: PAAG_02061 [Paracoccidioides brasiliensis Pb01]
  misc_feature (148)..(285): NCBI GI: 261353147 Blast Desc: [Verticillium albo-atrum VaMs.102]
  misc_feature (47)..(285): NCBI GI: 46128973 Blast Desc: FG08788.1 [Gibberella zeae PH-1]
  misc_feature (5)..(285): NCBI GI: 85074700 Blast Desc: NCU02187 [Neurospora crassa OR74A] gi|28926031|gb|EAA35021.1| NCU02187 [Neurospora crassa OR74A]
  misc_feature (169)..(285): NCBI GI: 149209957 Blast Desc: MGCH7_ch7g460 [Magnaporthe grisea 70-15] gi|86196415|gb|EAQ71053.1| MGCH7_ch7g460 [Magnaporthe grisea 70-15]
  misc_feature (1)..(285): NCBI GI: 256733506 Blast Desc: NECHADRAFT_99605 [Nectria haematococca mpVI 77-13-4]
  misc_feature (199)..(285): NCBI GI: 242784354 Blast Desc: cell wall protein, [Talaromyces stipitatus ATCC 10500] gi|218720517|gb|EED19936.1| cell wall protein, [Talaromyces stipitatus ATCC 10500]
  misc_feature (151)..(285): NCBI GI: 171685037 Blast Desc: protein product [Podospora anserina] gi|170942479|emb|CAP68131.1| protein product [Podospora anserina]
  misc_feature (117)..(285): NCBI GI: 115396324 Blast Desc: [Aspergillus terreus NIH2624] gi|114193370|gb|EAU35070.1| [Aspergillus terreus NIH2624]
  misc_feature (218)..(285): NCBI GI: 145232859 Blast Desc: An02g06660 [Aspergillus niger] gi|134056722|emb|CAL00664.1| [Aspergillus niger]
  misc_feature: Useful for introducing or modulating the production of volatile compounds
MYSSRLVHILLVGLAFLLATRAAWQPRNVSARDGILDSLLPGGAADDSTTSTPADPTTSSDPTTSSDPPTSTTDSTTSDSSTSTTESTTSTTDGPTSSTPPPSSTTSTTDDGGSTTSTSATQGPTSTTPSSTTQDDQTTKTTPSSTGKPFTTSTTVVYTSTDAQGHTYTSSSLSQVVQTPGFSGSGSSSKNKGLSDKDKSTVIGVTVGVGGAIILAALGVLFWRLRSKRRSNEEQEELVSYGAGFGGPGTAEKTSEPSTGASRSPFQSTLESYHAPSSTNAASNF

SEQ ID NO: 34605 - DNA, 2220 bp, Muscodor strobelii
  misc_feature: SGI cDNA ID NO. 571965
  misc_feature: Encodes the peptide sequence at SEQ ID NO 34606
atggcagaatctgataagtatgaggtgatggagaagatcggccatggctccttcggtgtcattcgaaaggtccggcgcaaggtcgatggtatggtcttatgtcgcaaagagatcagctacctcaaaatgtcccagaaagagcgagagcagttacacaccgagtttcagattctatcttccctccagcatcccaacatcgtcggttacttccatcgcgagcatctcaaacaatcacaagacctccatctctacatggaatattgcggtaatggcgatctgggcaaagtgatcaggaatcttactcgagacaataagtatgcagaggaagagttcgtctgggacgtcttttcgcaacttgtcaccgcgctgtacagatgccactatggcattgaccctccaggtgttggccggaatatccttatgagcggccccaagactagaccgaagactcctcccggagccatgaccattctgcatagagacctcaagccagagaatgtgtttctcggccaaaataactcggtcaaattgggtgactttggtctgtccaaaatgattcagtcgcatgactttgcctcgacatacgtcggaacaccattttacatgtctcctgagatttgtgcagcagaacgatacaccctcaagtctgatatctggtcgctgggttgcgtcatctacgagctgtgctccagagagcccccttttaatgccaagacccactatcagcttgtacagaagatcaaggagggcaaagttaccgtcttacctcgttgttactcctcggaactgatgactgtgattcgagactgtcttaaagtcaatcccgaccacagacctgacaccgcagctttgctcgacctacctgctgttagaataatgcgagcacagcgcgaaatggtggacatcaaaagcgatctcggtcgagagcacgcagcaatagacgcaaagaagaaagaagttgagaagaaattagcttcacttgagtcggagagagtctcaatgcggcagcaaatagagacttccttgaagcgggagtgggacacgacagccagatctgagatcgaggcttcgattcgaagagagtgggaagtgaaggcccgcttagagatcgatcgacttgtcaaagacgaaattgaacagcttcagaagcgtttcgaaggcgaagtccatgcgcgcgtacaggaagagttgcagaagaagtctgtgactttcggcagcgtcgagactttggagttcgactcgtcgctgtccaagtcagatttccctcagtctattgctggtacgagtaccgatggagagtttccatcaacgactgacataaccgaattttccgttgccgaatcgcctgaggaggctcccgctaagaaaggatcccgagcgccattcggacgtgcgcagactatgtttgagcgtaacggagggaccatcggaacgccaatggatgttgatatagcatccccattaccctcagcaccaattgcaattgcatctctgtccctatcgcccagacgaaccaattctactaaagcgccaaatgcgcaccagccctccatcttcgacgatgcaaacgacgaagcccgatggaagaaggctcgagagtcagaccctatgatatctgactctgaggatgatgacgatactcctgctatcccatcacccacacgaccaccccgttctaataagaacccctttgcacaacgacctgttctgacgtctatgaagacggcacctgccaatcgtcttcaaacccagaagacagtcagtgtcccggcctcacgcctcgacaagccaatgcctcctttacctaccagtgcaattcctgaattgcaattgaaaccacaggccagtgctggcgctcttcgcgagagagctacatcccccaaccgacgacttagcaagatcccatcagcagccaacctctctgcgccagccggagagaacggtcttgtccgcaagtcgtcattaaccaagaaagaccctgaagcctcgctcaacaagatggctgtcaagaacaatgttcgtggccgcactttaattgagctacagcaggctcgtgccggcggccgccccatcgaaaactccaatgtcagcccgaagcgcaccttcaaggagcgtgtcgttgataagttcatggagcccgccgctgtttgggaccctgagaaggacgagatgccctcgccctttattgtacgccgcaagaacgtgtctcgcggcagctaa

SEQ ID NO: 34606 - protein, 739 aa, Muscodor strobelii
  misc_feature: SGI Peptide ID NO. 571965
  misc_feature (7)..(290): Pfam Id: PF00069 Pfam Desc: Protein kinase domain
  misc_feature (166)..(279): Pfam Id: PF07714 Pfam Desc: Protein tyrosine kinase
  misc_feature (1)..(737): NCBI GI: 46135785 Blast Desc: FG09408.1 [Gibberella zeae PH-1]
  misc_feature (1)..(735): NCBI GI: 116193171 Blast Desc: CHGG_06303 [Chaetomium globosum CBS 148.51] gi|88182216|gb|EAQ89684.1| CHGG_06303 [Chaetomium globosum CBS 148.51]
  misc_feature (1)..(737): NCBI GI: 256727065 Blast Desc: [Nectria haematococca mpVI 77-13-4]
  misc_feature (1)..(704): NCBI GI: 1362515 Blast Desc: [Nectria haematococca mpVI 77-13-4]
  misc_feature (1)..(704): NCBI GI: 164427245 Blast Desc: G2-specific protein kinase nimA [Neurospora crassa OR74A] gi|161788965|sp|P48479.2|NIM1_NEUCR RecName: Full=G2-specific protein kinase nim-1 gi|157071666|gb|EAA36051.2|
  misc_feature (1)..(733): NCBI GI: 156055614 Blast Desc: SS1G_05159 [Sclerotinia sclerotiorum 1980] gi|154702943|gb|EDO02682.1| SS1G_05159 [Sclerotinia sclerotiorum 1980]
  misc_feature (1)..(737): NCBI GI: 169778877 Blast Desc: [Aspergillus oryzae RIB40] gi|83772642|dbj|BAE62770.1| protein product [Aspergillus oryzae]
  misc_feature (13)..(735): NCBI GI: 171684449 Blast Desc: protein product [Podospora anserina] gi|170942185|emb|CAP67837.1| protein product [Podospora anserina]
  misc_feature (3)..(737): NCBI GI: 261353295 Blast Desc: G2-specific protein kinase nim-1 [Verticillium albo-atrum VaMs.102]
  misc_feature (1)..(733): NCBI GI: 154300010 Blast Desc: BC1G_11194 [Botryotinia fuckeliana B05.10] gi|150856807|gb|EDN31999.1| BC1G_11194 [Botryotinia fuckeliana B05.10]
  misc_feature (1)..(704): SWISSPROT Homolog: EC 2.7.11.1 Non-specific serine/threonine protein kinase
MAESDKYEVMEKIGHGSFGVIRKVRRKVDGMVLCRKEISYLKMSQKEREQLHTEFQILSSLQHPNIVGYFHREHLKQSQDLHLYMEYCGNGDLGKVIRNLTRDNKYAEEEFVWDVFSQLVTALYRCHYGIDPPGVGRNILMSGPKTRPKTPPGAMTILHRDLKPENVFLGQNNSVKLGDFGLSKMIQSHDFASTYVGTPFYMSPEICAAERYTLKSDIWSLGCVIYELCSREPPFNAKTHYQLVQKIKEGKVTVLPRCYSSELMTVIRDCLKVNPDHRPDTAALLDLPAVRIMRAQREMVDIKSDLGREHAAIDAKKKEVEKKLASLESERVSMRQQIETSLKREWDTTARSEIEASIRREWEVKARLEIDRLVKDEIEQLQKRFEGEVHARVQEELQKKSVTFGSVETLEFDSSLSKSDFPQSIAGTSTDGEFPSTTDITEFSVAESPEEAPAKKGSRAPFGRAQTMFERNGGTIGTPMDVDIASPLPSAPIAIASLSLSPRRTNSTKAPNAHQPSIFDDANDEARWKKARESDPMISDSEDDDDTPAIPSPTRPPRSNKNPFAQRPVLTSMKTAPANRLQTQKTVSVPASRLDKPMPPLPTSAIPELQLKPQASAGALRERATSPNRRLSKIPSAANLSAPAGENGLVRKSSLTKKDPEASLNKMAVKNNVRGRTLIELQQARAGGRPIENSNVSPKRTFKERVVDKFMEPAAVWDPEKDEMPSPFIVRRKNVSRGS

SEQ ID NO: 34607 - DNA, 2778 bp, Muscodor strobelii
  misc_feature: SGI EST ID NO. CUFF.82288.1
  misc_feature: Variant of the nucleotide sequence at SEQ ID NO 34605
caggaatcttactcgagacaataagtatgcagaggaagagttcgtctgggacgtcttttcgcaacttgtcaccgcgctgtacagatgccactatggcattgaccctccaggtgttggccggaatatccttatgagcggccccaagactagaccgaagactcctcccggagccatgaccattctgcatagagacctcaagccagagaatgtgtttctcggccaaaataactcggtcaaattgggtgactttggtctgtccaaaatgattcagtcgcatgactttgcctcgacatacgtcggaacaccattttacatgtctcctgagatttgtgcagcagaacgatacaccctcaagtctgatatctggtcgctgggttgcgtcatctacgagctgtgctccagagagcccccttttaatgccaagacccactatcagcttgtacagaagatcaaggagggcaaagttaccgtcttacctcgttgttactcctcggaactgatgactgtgattcgagactgtcttaaagtcaatcccgaccacagacctgacaccgcagctttgctcgacctacctgctgttagaataatgcgagcacagcgcgaaatggtggacatcaaaagcgatctcggtcgagagcacgcagcaatagacgcaaagaagaaagaagttgagaagaaattagcttcacttgagtcggagagagtctcaatgcggcagcaaatagagacttccttgaagcgggagtgggacacgacagccagatctgagatcgaggcttcgattcgaagagagtgggaagtgaaggcccgcttagagatcgatcgacttgtcaaagacgaaattgaacagcttcagaagcgtttcgaaggcgaagtccatgcgcgcgtacaggaagagttgcagaagaagtctgtgactttcggcagcgtcgagactttggagttcgactcgtcgctgtccaagtcagatttccctcagtctattgctggtacgagtaccgatggagagtttccatcaacgactgacataaccgaattttccgttgccgaatcgcctgaggaggctcccgctaagaaaggatcccgagcgccattcggacgtgcgcagactatgtttgagcgtaacggagggaccatcggaacgccaatggatgttgatatagcatccccattaccctcagcaccaattgcaattgcatctctgtccctatcgcccagacgaaccaattctactaaagcgccaaatgcgcaccagccctccatcttcgacgatgcaaacgacgaagcccgatggaagaaggctcgagagtcagaccctatgatatctgactctgaggatgatgacgatactcctgctatcccatcacccacacgaccaccccgttctaataagaacccctttgcacaacgacctgttctgacgtctatgaagacggcacctgccaatcgtcttcaaacccagaagacagtcagtgtcccggcctcacgcctcgacaagccaatgcctcctttacctaccagtgcaattcctgaattgcaattgaaaccacaggccagtgctggcgctcttcgcgagagagctacatcccccaaccgacgacttagcaagatcccatcagcagccaacctctctgcgccagccggagagaacggtcttgtccgcaagtcgtcattaaccaagaaagaccctgaagcctcgctcaacaagatggctgtcaagaacaatgttcgtggccgcactttaattgagctacagcaggctcgtgccggcggccgccccatcgaaaactccaatgtcagcccgaagcgcaccttcaaggagcgtgtcgttgataagttcatggagcccgccgctgtttgggaccctgagaaggacgagatgccctcgccctttattgtacgccgcaagaacgtgtctcgcggcagctaattgatgccatgtgcaaccatagacggcgtggatgagagcaagcaagattcaatcattcattcattcgtctgcagtatggagagacgcggaaactcatcatacacaccatttgcatttctagctttcttctctctaagcttttacaccttttcttttgtcatggaatgatcggtctagaaatctaggcctgcaagtacgaacgcgcaagaagcaagtgattgaccggtctgagggaacgaatgaaaagcatggcggttgaagaaaggagataagacattggaagcgggcattagcataacgttcgtcgtttgtcccggaattgttggactgttgggttaaaaccatgtggaaggacttgattgatacgggacacgatgaaccggcgtttggttgtcgttgagaatttgtcggcattgtgcaataggcttgtcctgctggacaggtgttaagggcgtttttggttttcactttcgtgtaaactttgttcatcagccctgctctgggatgaaggaggggtgaggttctcatgcttggaccatgataggttctttgatggcctgtgtacacattgcctgtctaaggatagttgcattaatcacattcaaaacattcttgtgctttttagtaatttggtgtgcggctttccacagaaatgcctaccggatgaacctcaacctgttgactggttgtggtgatctaaggctggatccagtatcaactcctggtcattcagaatgttgtctggccttgaagttcagcacattcacggtacagacatccaacgttcacactagcaacagattagcaccgttatttccatccatatcatcacgaccctaatttagatg

SEQ ID NO: 34608 - DNA, 1914 bp, Muscodor strobelii
  misc_feature: SGI cDNA ID NO. 571966
  misc_feature: Encodes the peptide sequence at SEQ ID NO 34609
atggtattgcgtaagtttgagctcgaagccaagctgaaggacgatcttgagcttgtccagagtggcgtgctgcgtgaagacaatccgcttgactcgagcgaagagtttaaggagctcctcgaggcgtgcagacgaggagatctgaaacggacgcaggaactcatatccgccggtgttaatttgaatggaaaggacaaatttgattacactccactgattatcgcgagcttgtgtgggcactatgaattagtcgagcttctgcttgagtctggcgcattggctgagcgtgatacgtttcaaggcgaaagatgtatctataatgctctgaacgacaagattcgtaatctcttattgagatacgacttctcaaaatccactgacccgttgcaaccatgggcggctcatatcacctctctcctcacaagagagacaccaagcacttcagatatcacgctaatggaggctgctgagacatttgaacttcacaagttcatcctctctgccagatcgccctacttccaaaagaaacttgcagaagccccagagacgcctacgtggaaacttcctcaatccaagcctattgaatcgtttcggattgttctacgatacttgtatcttggcgacgtaccccgagaggtggttgacgtctggagttcaaacacagaggatgaggttctgcgaggtattgataagattagcaagcagctggaaattcctaagctgctagaggctattctgtcaggatccgatcggcgtcttgcgaggcaacgccagcaggacgaggttcaccgggcccaggaacaagtcgaagatttctacaagcgaagcgtcatcggtcacaagatggtagtcgacacggagaaagtttcgcgagttaaatggccacatgataactcgatattcgcagattgtttgctgcgagctgaccaggaacaggctcaagatatgcatcatgtccaacaggagtcaagctccatcccgattggacctgccacagggttgacacaacaaaatggtacatcaaagcgaagcaaatcgatattatatccagcccacaaagcaatgttaatacggagtccttatttcgagacgatgttctctagctccttcaaagaagctcaagactccgaacacctacatgtcatcaagattgactgcgcgccagaaatcctggaaatcatccttaactttatctataccgagcaggtggaatgccctctagatttagcgttggatctactctatgcatccgacatgctctttcttgacaaacttaagaataaagctgccgtcttaatttcctcgcttggcagcggtaacagcaacgttttgatcgatcgaacacatggtgcaggtgaccaaggcgaggttgaaatcgaaccgatcaatgtgtttgatgtcatacatgcagcttgggatctgcgcgtccaaagactcgaggaattcgctgcacgttatattgcatacagattagaagactatatcgacgaggaagagttcgccgagctaatacaggaaagcgccgcaagggttaaaaatagagaggagacggacacgattgagttgcttgacgacatccggtattacttagatgaacggtttagacttagattcgacgatgtaggtttggatgaggcgcttgaagaaagtgaggagatagcagaggagcaagctatcgtggccgcattgaatgggtctggcgaggcgccacaacttgaatcaatcgagtcaccgaagaacgcacccgcaacgacattcgagacaatttctacggagaagtcaggagtaattggtacaatcaggactctggacggcgaggttgcggaggatgaatttgcgtctgacgccatcaactaccaactcttgctgcagaagattgaccttatgctagagaacctaaagcttgacgcatag

SEQ ID NO: 34609 - protein, 637 aa, Muscodor strobelii
  misc_feature: SGI Peptide ID NO. 571966
  misc_feature (67)..(99): Pfam Id: PF00023 Pfam Desc: Ankyrin repeat
  misc_feature (292)..(437): Pfam Id: PF00651 Pfam Desc: BTB/POZ domain
  misc_feature (136)..(253): Pfam Id: PF00651 Pfam Desc: BTB/POZ domain
  misc_feature (67)..(92): Pfam Id: PF00023 Pfam Desc: Ankyrin repeat
  misc_feature (349)..(437): Pfam Id: PF00651 Pfam Desc: BTB/POZ domain
  misc_feature (136)..(210): Pfam Id: PF00651 Pfam Desc: BTB/POZ domain
  misc_feature (1)..(637): NCBI GI: 116193167 Blast Desc: CHGG_06301 [Chaetomium globosum CBS 148.51] gi|88182214|gb|EAQ89682.1| CHGG_06301 [Chaetomium globosum CBS 148.51]
  misc_feature (1)..(637): NCBI GI: 85117615 Blast Desc: NCU03186 [Neurospora crassa OR74A] gi|28927093|gb|EAA36050.1| conserved [Neurospora crassa OR74A]
  misc_feature (1)..(637): NCBI GI: 46136045 Blast Desc: FG09538.1 [Gibberella zeae PH-1]
  misc_feature (1)..(637): NCBI GI: 154300012 Blast Desc: BC1G_11195 [Botryotinia fuckeliana B05.10] gi|150856808|gb|EDN32000.1| BC1G_11195 [Botryotinia fuckeliana B05.10]
  misc_feature (2)..(637): NCBI GI: 145609742 Blast Desc: MGG_03027 [Magnaporthe grisea 70-15] gi|145017132|gb|EDK01495.1| MGG_03027 [Magnaporthe grisea 70-15]
  misc_feature (2)..(634): NCBI GI: 149210683 Blast Desc: MGCH7_ch7g814 [Magnaporthe grisea 70-15] gi|86196769|gb|EAQ71407.1| MGCH7_ch7g814 [Magnaporthe grisea 70-15]
  misc_feature (2)..(637): NCBI GI: 212537389 Blast Desc: ankyrin repeat and BTB/POZ domain protein [Penicillium marneffei ATCC 18224] gi|210068592|gb|EEA22683.1| ankyrin repeat and BTB/POZ domain protein [Penicillium marneffei ATCC 18224]
  misc_feature (2)..(637): NCBI GI: 189198742 Blast Desc: ankyrin repeat and BTB/POZ domain-containing protein 1 [Pyrenophora tritici-repentis Pt-1C-BFP] gi|187982807|gb|EDU48295.1| ankyrin repeat and BTB/POZ protein 1
  misc_feature (2)..(637): NCBI GI: 119467304 Blast Desc: ankyrin repeat and BTB/POZ domain protein [Neosartorya fischeri NRRL 181] gi|119405610|gb|EAW15561.1| ankyrin repeat and BTB/POZ domain protein [Neosartorya fischeri NRRL 181]
  misc_feature (2)..(637): NCBI GI: 145247226 Blast Desc: An12g08110 [Aspergillus niger] gi|134080594|emb|CAK41261.1| protein product [Aspergillus niger]
MVLRKFELEAKLKDDLELVQSGVLREDNPLDSSEEFKELLEACRRGDLKRTQELISAGVNLNGKDKFDYTPLIIASLCGHYELVELLLESGALAERDTFQGERCIYNALNDKIRNLLLRYDFSKSTDPLQPWAAHITSLLTRETPSTSDITLMEAAETFELHKFILSARSPYFQKKLAEAPETPTWKLPQSKPIESFRIVLRYLYLGDVPREVVDVWSSNTEDEVLRGIDKISKQLEIPKLLEAILSGSDRRLARQRQQDEVHRAQEQVEDFYKRSVIGHKMVVDTEKVSRVKWPHDNSIFADCLLRADQEQAQDMHHVQQESSSIPIGPATGLTQQNGTSKRSKSILYPAHKAMLIRSPYFETMFSSSFKEAQDSEHLHVIKIDCAPEILEIILNFIYTEQVECPLDLALDLLYASDMLFLDKLKNKAAVLISSLGSGNSNVLIDRTHGAGDQGEVEIEPINVFDVIHAAWDLRVQRLEEFAARYIAYRLEDYIDEEEFAELIQESAARVKNREETDTIELLDDIRYYLDERFRLRFDDVGLDEALEESEEIAEEQAIVAALNGSGEAPQLESIESPKNAPATTFETISTEKSGVIGTIRTLDGEVAEDEFASDAINYQLLLQKIDLMLENLKLDA

SEQ ID NO: 34610 - DNA, 2487 bp, Muscodor strobelii
  misc_feature: SGI EST ID NO. CUFF.82284.0
  misc_feature: Variant of the nucleotide sequence at SEQ ID NO 34608
aggggacatcccacttcgatagtgaatggctttaacgctcattggctaatgggtgtattattcaccatctcagacagttgccaccattctgggagcggagggaggaagagctgagtcccttaggcgcctactctcactagcagtgatgacatattcagagctgtttggagatacagtattctatcggacttatcggccaagaggttttcctcctcctaatagcttgatagcatcttattctacccttttcaatatttttcaaattgaggaattgttacattaaccaaggagttcttctagagtacatcactgaccatggtattgcgtaagtttgagctcgaagccaagctgaaggacgatcttgagcttgtccagagtggcgtgctgcgtgaagacaatccgcttgactcgagcgaagagtttaaggagctcctcgaggcgtgcagacgaggagatctgaaacggacgcaggaactcatatccgccggtgttaatttgaatggaaaggacaaatttgattacactccactgattatcgcgagcttgtgtgggcactatgaattagtcgagcttctgcttgagtctggcgcattggctgagcgtgatacgtttcaaggcgaaagatgtatctataatgctctgaacgacaagattcgtaatctcttattgagatacgacttctcaaaatccactgacccgttgcaaccatgggcggctcatatcacctctctcctcacaagagagacaccaagcacttcagatatcacgctaatggaggctgctgagacatttgaacttcacaagttcatcctctctgccagatcgccctacttccaaaagaaacttgcagaagccccagagacgcctacgtggaaacttcctcaatccaagcctattgaatcgtttcggattgttctacgatacttgtatcttggcgacgtaccccgagaggtggttgacgtctggagttcaaacacagaggatgaggttctgcgaggtattgataagattagcaagcagctggaaattcctaagctgctagaggctattctgtcaggatccgatcggcgtcttgcgaggcaacgccagcaggacgaggttcaccgggcccaggaacaagtcgaagatttctacaagcgaagcgtcatcggtcacaagatggtagtcgacacggagaaagtttcgcgagttaaatggccacatgataactcgatattcgcagattgtttgctgcgagctgaccaggaacaggctcaagatatgcatcatgtccaacaggagtcaagctccatcccgattggacctgccacagggttgacacaacaaaatggtacatcaaagcgaagcaaatcgatattatatccagcccacaaagcaatgttaatacggagtccttatttcgagacgatgttctctagctccttcaaagaagctcaagactccgaacacctacatgtcatcaagattgactgcgcgccagaaatcctggaaatcatccttaactttatctataccgagcaggtggaatgccctctagatttagcgttggatctactctatgcatccgacatgctctttcttgacaaacttaagaataaagctgccgtcttaatttcctcgcttggcagcggtaacagcaacgttttgatcgatcgaacacatggtgcaggtgaccaaggcgaggttgaaatcgaaccgatcaatgtgtttgatgtcatacatgcagcttgggatctgcgcgtccaaagactcgaggaattcgctgcacgttatattgcatacagattagaagactatatcgacgaggaagagttcgccgagctaatacaggaaagcgccgcaagggttaaaaatagagaggagacggacacgattgagttgcttgacgacatccggtattacttagatgaacggtttagacttagattcgacgatgtaggtttggatgaggcgcttgaagaaagtgaggagatagcagaggagcaagctatcgtggccgcattgaatgggtctggcgaggcgccacaacttgaatcaatcgagtcaccgaagaacgcacccgcaacgacattcgagacaatttctacggagaagtcaggagtaattggtacaatcaggactctggacggcgaggttgcggaggatgaatttgcgtctgacgccatcaactaccaactcttgctgcagaagattgaccttatgctagagaacctaaagcttgacgcatagaaaggcatctgcatctgaatagaatgaaattgtctacctcatcatggactgtgataaagcagcccgactgtattttgctcgtgcaaatggcatcgtacgcctcggaagtcgcattggggtcgtcgtcgtgaacaaatacttaagtagagcaccagaccagcatgccgacgctagctcaacgtggatataattcttttaaccttaagaggtaggttgggtcaggctaaggaacttgtgtctactcgtagaagagaataa

SEQ ID NO: 34611 - DNA, 1002 bp, Muscodor strobelii
  misc_feature: SGI cDNA ID NO. 571967
  misc_feature: Encodes the peptide sequence at SEQ ID NO 34612
atgaggattctcacagtggccactagctgtacgcagctcccggccatctataagtttatgatattcggcatcctagcgctgatactaatagccactctacagactggccctgtcgactttcgggagcattgggataagttccgcaacccgactaaggacaaggacgaagatgttggtatcggaggcggtatgcctattcgcctcatgtacatcggcgcctccatgacgctcggtgagcattcaacgggcgagaggggctaccgcgaacaagtccgaaattggctggtggaacagggaaatgaagtcaactgtgtcggccaaaatcgatacggtgacttcctggataacgatgtccaagcatttggtgcgcagccgattcggccgaccctcgataggtgcaagcagattgtgccgcagactcagccaaacttgatcctcattaacgccggatcaagtgactgtttccagccggaacattttggatccggtcttgtgcaccaaaagatgcgggctctcgtcgattacctattagaagcctcgccacgtgcgaccatcatcatgtcgacgattattccttccccatgggacggagtcgaggcatgtgttaaatcagcgaatgcgcaaattcgccaggtcgcttacgacatgatgcgcgagggtaaaccagttacactagtcgaaatgcactacgaccaaggcttgccaaatcgcgttgaattgaagcatatcggcaaagatgacatgcatcccatagacgaaggatatttcctcatgggcgatctgttcatagaagctattcaagaagttagtgcgaagggtttcttgcaacctcccgtcatcaatggtattgccaatgacggcgaggccgaaagacatgcacaagaactgaaagagaaagagaaggcgaaagaaaagaaacccgatgagaaaaagcccgaagagaagaagcctgaagaaaagaagccagaggaaaaacctgccaggaggcgcagacattcgtga

SEQ ID NO: 34612 - protein, 333 aa, Muscodor strobelii
  misc_feature: SGI Peptide ID NO. 571967
  misc_feature (60)..(280): NCBI GI: 261357824 Blast Desc: conserved [Verticillium albo-atrum VaMs.102]
  misc_feature (45)..(278): NCBI GI: 85082538 Blast Desc: NCU04526 [Neurospora crassa OR74A] gi|28918018|gb|EAA27701.1| [Neurospora crassa OR74A]
  misc_feature (60)..(287): NCBI GI: 171691426 Blast Desc: protein product [Podospora anserina] gi|170945661|emb|CAP71774.1| protein product [Podospora anserina]
  misc_feature (60)..(278): NCBI GI: 116195422 Blast Desc: CHGG_04309 [Chaetomium globosum CBS 148.51] gi|88180222|gb|EAQ87690.1| CHGG_04309 [Chaetomium globosum CBS 148.51]
  misc_feature (64)..(276): NCBI GI: 238482081 Blast Desc: conserved [Aspergillus flavus NRRL3357] gi|220700329|gb|EED56667.1| conserved [Aspergillus flavus NRRL3357]
  misc_feature (64)..(291): NCBI GI: 159130548 Blast Desc: esterase, [Aspergillus fumigatus A1163]
  misc_feature (64)..(291): NCBI GI: 115385427 Blast Desc: conserved [Aspergillus terreus NIH2624] gi|114187707|gb|EAU29407.1| conserved [Aspergillus terreus NIH2624]
  misc_feature (62)..(279): NCBI GI: 116203151 Blast Desc: CHGG_09460 [Chaetomium globosum CBS 148.51] gi|88177978|gb|EAQ85446.1| CHGG_09460 [Chaetomium globosum CBS 148.51]
  misc_feature (66)..(275): NCBI GI: 255931095 Blast Desc: Pc12g02110 [Penicillium chrysogenum Wisconsin 54-1255] gi|211581723|emb|CAP79838.1| Pc12g02110 [Penicillium chrysogenum Wisconsin 54-1255]
  misc_feature (64)..(291): NCBI GI: 70990436 Blast Desc: esterase [Aspergillus fumigatus Af293] gi|66847699|gb|EAL88029.1| esterase, [Aspergillus fumigatus Af293]
MRILTVATSCTQLPAIYKFMIFGILALILIATLQTGPVDFREHWDKFRNPTKDKDEDVGIGGGMPIRLMYIGASMTLGEHSTGERGYREQVRNWLVEQGNEVNCVGQNRYGDFLDNDVQAFGAQPIRPTLDRCKQIVPQTQPNLILINAGSSDCFQPEHFGSGLVHQKMRALVDYLLEASPRATIIMSTIIPSPWDGVEACVKSANAQIRQVAYDMMREGKPVTLVEMHYDQGLPNRVELKHIGKDDMHPIDEGYFLMGDLFIEAIQEVSAKGFLQPPVINGIANDGEAERHAQELKEKEKAKEKKPDEKKPEEKKPEEKKPEEKPARRRRHS

SEQ ID NO: 34613 - DNA, 1471 bp, Muscodor strobelii
  misc_feature: SGI EST ID NO. CUFF.82364.2
  misc_feature: Variant of the nucleotide sequence at SEQ ID NO 34611
aaaactttccccaattcttccaagtgtaagacaatatcactcgaaaatcatcgcgggcaatgcgacggttaccagcaagatgaggattctcacagtggccactagctgtacgcagctcccggccatctataagtttatgatattcggcatcctagcgctgatactaatagccactctacagactggccctgtcgactttcgggagcattgggataagttccgcaacccgactaaggacaaggacgaagatgttggtatcggaggcggtatgcctattcgcctcatgtacatcggcgcctccatgacgctcggtgagcattcaacgggcgagaggggctaccgcgaacaagtccgaaattggctggtggaacagggaaatgaagtcaactgtgtcggccaaaatcgatacggtgacttcctggataacgatgtccaagcatttggtgcgcagccgattcggccgaccctcgataggtgcaagcagattgtgccgcagactcagccaaacttgatcctcattaacgccggatcaagtgactgtttccagccggaacattttggatccggtcttgtgcaccaaaagatgcgggctctcgtcgattacctattagaagcctcgccacgtgcgaccatcatcatgtcgacgattattccttccccatgggacggagtcgaggcatgtgttaaatcagcgaatgcgcaaattcgccaggtcgcttacgacatgatgcgcgagggtaaaccagttacactagtcgaaatgcactacgaccaaggcttgccaaatcgcgttgaattgaagcatatcggcaaagatgacatgcatcccatagacgaaggatatttcctcatgggcgatctgttcatagaagctattcaagaagttagtgcgaagggtttcttgcaacctcccgtcatcaatggtattgccaatgacggcgaggccgaaagacatgcacaagaactgaaagagaaagagaaggcgaaagaaaagaaacccgatgagaaaaagcccgaagagaagaagcctgaagaaaagaagccagaggaaaaacctgccaggaggcgcagacattcgtgagactgtcaaaaccaacaatgcactggggttggggcttacaaattcatactcttatccaagacgaatcttagagctgaaagcatcttaacggggaatcaaagagatttgcatgagacctcgcggcaggggaacacaatatcaatgggaacatggcatggtgccacggcatggatggaaatccaaaaagaccctatggtcttgtattaatattactactatctcattaaggagtgtcgttgtcgttgtcgtcatgagggtcctgtaccaccactattaagcgaatgtcttctttccacaatccatcaattccccagctgctgtcaatatgcgtttcccattacaattattgcattcttccgatattttcccttctgatgatcataaggcgcg

SEQ ID NO: 34614 - DNA, 2151 bp, Muscodor strobelii
  misc_feature: SGI cDNA ID NO. 571968
  misc_feature: Encodes the peptide sequence at SEQ ID NO 34615
atgttgactaacattatccttgcgggtctcctcccggccgcgatggcgaaacccattttgccacgaaccgaggatctgctgcgcaacaacacgacgttgagtgacattattgccaatgccaccaacctcacggatcatatccatcgcccaattgcgtctctgactacggacatacctttgcccacggatataccccttgatatccctgtgatcaagagagctaagcccgcgaactctaccgagagcgacgacggagatgatgatgatggagatgaagatgccgacgcttgtggctgtggtgatgcttgctctactgaagttggggtacacgatacgatggtttgtgttgaagcctgtcttcaagcttgtcctcaagacgaagaagaaggagatgatgatgatgatgcggacgataaagatgacgacgacgacgatgacgataaagatgatggagatgacgaagagaaggccaagcgacagctcgccggaaactacctcgtagcacctccaccggtgtctatcccaggcaatcccttgatcgtcgtctctgagacagttctccctattccatctgtcggtccaagtgtacctgctagtattcccagcatacctgccagtgttcctagcatacccgccagcattcccagcgtcccggtcagcgtccccagcgtcccggtcagcattcccgcggcgcccgtgtcgacttttcccgtagctcctccgcctccgccggctctgtcggatctgcctccggtccccatcgagacaccaacgatcgcacctaacctccctgtcgaacccagtgttccagccatcatcgcatccagcccaggcgtgaccttgccatcggtctcaatcccaggcgtcccatatagcaagccttcgattctacctgatcctaagcctctcccggtcgatcctcctgttcctgttcctggcactactatccccggtacgactattcccggcaccagtgtccctggctccaacatcccaggcaccaccgtccccggttcgggatccaagtctgcctctcaatgcgtacagaaatgcagcatgaactgccaacatgcagatattggtttcgatgtctctcaatgcaagtccaattgccaggaagcctgcgccagcgtcacaacaaatactggtgtcggtagcaacctcccgatcaaagccgtcgctgcgcccgcaaatggagaaggttgcacttgcggcagcgccccttcgagcgacagcgccaacgtccctgttgtagattctgctcgtaaactcgctagctccgcactgagccgcatccctcgtggtcccccgaatgtgaaagccatcactgatgccccagcagttggcactggcatgatgatgtacgacgcctgtttgcaaggctgtacctccggctaccaatccgcagatatcggatacgatgtctctcaaggcgactccgactgcaagtcttcctgcacatcgtacatgggctccggcaccggtgccaccggcaagcgtgacgatctgcctctcggtcttgacggtgacgctccagaagagccaatcgacgttccctccacccccgcagttggcaccggcgctacctcttacgacgcctgtatggacggatgcagcagcgcctaccagagcgcaggcatcggcttcgacgtctcgaccggagagacgaactgcaagtcctcttgcgcctctttctccgccgatggcaccgggatcttgaacgagcgtcaggtcattcccaagttgcccgtccctattccaaccaccacacccaaactgtccgttcccgttcctaccaccacgcccaagctacccatttccattcctaccagcttgccaatctccatccctaccacttctctccctggcctgccatctgtcagcgtgacgcctaagcttccggtctctgtcacgacttccgctgtcggcactctgttgcccctacccagtgtcacacctccttcgcccaccaccattccctgcggctgcgcagtcaaatgcgctaaacagagcagcgtcgttgccatgttgctctgtctggagacttgtctcattgactgccctgacctaccccatgtgagcgtcaccccctccgtgacgacgcccacggtacccgctcccacgttgcctattacttcgatcaaggtttaa

SEQ ID NO: 34615 - protein, 716 aa, Muscodor strobelii
  misc_feature: SGI Peptide ID NO. 571968
  misc_feature (184)..(308): NCBI GI: 256778508 Blast Desc: ShygA5_26837 [Streptomyces hygroscopicus ATCC 53653]
MLTNIILAGLLPAAMAKPILPRTEDLLRNNTTLSDIIANATNLTDHIHRPIASLTTDIPLPTDIPLDIPVIKRAKPANSTESDDGDDDDGDEDADACGCGDACSTEVGVHDTMVCVEACLQACPQDEEEGDDDDDADDKDDDDDDDDKDDGDDEEKAKRQLAGNYLVAPPPVSIPGNPLIVVSETVLPIPSVGPSVPASIPSIPASVPSIPASIPSVPVSVPSVPVSIPAAPVSTFPVAPPPPPALSDLPPVPIETPTIAPNLPVEPSVPAIIASSPGVTLPSVSIPGVPYSKPSILPDPKPLPVDPPVPVPGTTIPGTTIPGTSVPGSNIPGTTVPGSGSKSASQCVQKCSMNCQHADIGFDVSQCKSNCQEACASVTTNTGVGSNLPIKAVAAPANGEGCTCGSAPSSDSANVPVVDSARKLASSALSRIPRGPPNVKAITDAPAVGTGMMMYDACLQGCTSGYQSADIGYDVSQGDSDCKSSCTSYMGSGTGATGKRDDLPLGLDGDAPEEPIDVPSTPAVGTGATSYDACMDGCSSAYQSAGIGFDVSTGETNCKSSCASFSADGTGILNERQVIPKLPVPIPTTTPKLSVPVPTTTPKLPISIPTSLPISIPTTSLPGLPSVSVTPKLPVSVTTSAVGTLLPLPSVTPPSPTTIPCGCAVKCAKQSSVVAMLLCLETCLIDCPDLPHVSVTPSVTTPTVPAPTLPITSIKV

SEQ ID NO: 34616 - DNA, 1377 bp, Muscodor strobelii
  misc_feature: SGI cDNA ID NO. 571969
  misc_feature: Encodes the peptide sequence at SEQ ID NO 34617
atgcattacgcttccaaactcctgggctcgctagccattgggtccctgggctctgttctcgccgccccttcgagcaatctggaggcccgacagatttccttgccgccactgattccgccaattcctggtgtgactataccactcggagacatcattcctccgcttcctattgtccaattcccaactccgcctcttgatagccctcctttcactgccagtaatatcaaaccaaagaagatcggttatttttggtctggagctggcgataaacagcacaaggacttcttggcaacttattcgcttgatgacgacacctttggtacccttctctgggtgactgatgtcccttcaagcggtaatgagccccatcattctggtccttccgctgatggcaagaccatcttcgcaggcggtcttctatctctactgaagacacaagacactgccttttactttgatacaacagatccttaccgtccgaccttcaaaaagagcaaccgcgcccttcttgccgctatcacggatgaagtcagagccaagcccgagggcggatttttcatcacctatatgggttccgcagccggtacgtcgcctgggcgcctagtcgagactgatgccgacttcaatatcatccatcagtggcctgaggatgtgcccggcgtgcttggcattttagaagagcagttcaatccacacggtctcagcattgattgggacaagaacctcattcttacgtctgactttattgagccggtgaccatcctgaagcctaccctcggccccaggcgtgcgaacacgcttcgcctctgggagttaagctcacgcaagataatcaacacgattaccattcccgatggccagggcattcaagatgtcaaattcatcccaggaaactcagagtccgctgctcttgcaacggctgttcaccttgggcaggtctggatcatctatccattcaggaaagacgccaacggaaaacagggcgttgccgaactcctgtatgaccttggtcccaaggctcgtgatacaatcgcaatttactctgatatttcatcagacggcaaatttgcttacttcacgctcacaacggccaatcacgtcgcagcgctcgatatctctgaccttgataacgtgaagcggctcgatgatcctgacgaggatcagccactgatcggcccccactatatcaagctcacaccagatcagaagcatctcgtcatcacagattactttctacaaaccggcgatatcggtatcataaacacgcctgccgacttcaaggtgcaatgccgtgaatttgagaaccgtggcggtggtcggccccactcggccgtcgtcttcgatttgagtgatccgaagaatcctatctactactag

SEQ ID NO: 34617 - protein, 458 aa, Muscodor strobelii
  misc_feature: SGI Peptide ID NO. 571969
  misc_feature (31)..(458): NCBI GI: 67526209 Blast Desc: AN3562.2 [Aspergillus nidulans FGSC A4] gi|40740580|gb|EAA59770.1| AN3562.2 [Aspergillus nidulans FGSC A4] gi|259481915|tpe|CBF75882.1| TPA: conserved [Aspergillus FGSC
  misc_feature (6)..(458): NCBI GI: 238507241 Blast Desc: conserved [Aspergillus flavus NRRL3357] gi|220689535|gb|EED45886.1| conserved [Aspergillus flavus NRRL3357]
  misc_feature (16)..(458): NCBI GI: 169614712 Blast Desc: SNOG_10503 [Phaeosphaeria nodorum SN15] gi|111060777|gb|EAT81897.1| SNOG_10503 [Phaeosphaeria nodorum SN15]
  misc_feature (13)..(458): NCBI GI: 256726703 Blast Desc: NECHADRAFT_99087 [Nectria haematococca mpVI 77-13-4]
  misc_feature (7)..(458): NCBI GI: 171676898 Blast Desc: protein product [Podospora anserina] gi|170936516|emb|CAP61176.1| protein product [Podospora anserina]
  misc_feature (104)..(458): NCBI GI: 116202347 Blast Desc: conserved [Chaetomium globosum CBS 148.51] gi|88177576|gb|EAQ85044.1| conserved [Chaetomium globosum CBS 148.51]
  misc_feature (146)..(346): NCBI GI: 169786263 Blast Desc: [Aspergillus oryzae RIB40] gi|83776340|dbj|BAE66459.1| protein product [Aspergillus oryzae]
  misc_feature (82)..(429): NCBI GI: 159481464 Blast Desc: CHLREDRAFT_151855 [Chlamydomonas reinhardtii] gi|158273510|gb|EDO99299.1| [Chlamydomonas reinhardtii]
  misc_feature (82)..(436): NCBI GI: 159471407 Blast Desc: [Chlamydomonas reinhardtii] gi|158283351|gb|EDP09102.1| [Chlamydomonas reinhardtii]
  misc_feature (82)..(429): NCBI GI: 159487162 Blast Desc: [Chlamydomonas reinhardtii] gi|158271545|gb|EDO97362.1| [Chlamydomonas reinhardtii]
MHYASKLLGSLAIGSLGSVLAAPSSNLEARQISLPPLIPPIPGVTIPLGDIIPPLPIVQFPTPPLDSPPFTASNIKPKKIGYFWSGAGDKQHKDFLATYSLDDDTFGTLLWVTDVPSSGNEPHHSGPSADGKTIFAGGLLSLLKTQDTAFYFDTTDPYRPTFKKSNRALLAAITDEVRAKPEGGFFITYMGSAAGTSPGRLVETDADFNIIHQWPEDVPGVLGILEEQFNPHGLSIDWDKNLILTSDFIEPVTILKPTLGPRRANTLRLWELSSRKIINTITIPDGQGIQDVKFIPGNSESAALATAVHLGQVWIIYPFRKDANGKQGVAELLYDLGPKARDTIAIYSDISSDGKFAYFTLTTANHVAALDISDLDNVKRLDDPDEDQPLIGPHYIKLTPDQKHLVITDYFLQTGDIGIINTPADFKVQCREFENRGGGRPHSAVVFDLSDPKNPIYY

SEQ ID NO: 34618 - DNA, 2451 bp, Muscodor strobelii
  misc_feature: SGI cDNA ID NO. 571970
  misc_feature: Encodes the peptide sequence at SEQ ID NO 34619
atgaaccgggtccaaaagaattctgtttctcgtcagaccatgggctccggaggtctcagtgagccccccttgtcggccaaacctgcagaaacgaatgcacaagcggctagtgatccgacccgcgaaacaaccccgcatattgggttcgttgccccacgaggtctttgcgacgtatgctctaccctcgatctggcagcctacttcagaaatgagatagattataagattttcgatggaggttgggttggcgctgccaaaggagcccgacaactcgggctcctcagagatatatgtcacaaagccgcgacatgctcgttttgctggatcgtggtgcaagctatatgcacgaccaacctccaccgtgaaatgttacctaacgcattactcgaaagagaggaactatctgatagcctcctagaatgctgcatctacagctactgtttcatgaaaaacgatcggatcgcagaggatgtgccccagtcaagagcagggcgactcggtatcgctactcgagtctcaacaggtgcagatacggacatggattcatcgagggattgggacatcacccagctaggagatatccagctcctgggtgaagatgcaatgaatttcatgaactctcagaccttttacggtcgtcgcatcgaccgaagactggatatgactctgccctctttctggctggatctctgccggtccaatcacgaagcttcatgcggatggaacgtccctgggctgcacatcgagcccaagaacatattcgttgtggactgtcttgagcaatgtgtagtcgagctcccgatgggagcaacatacttcgctctgagttattgttggccatctcgagaagcgctttgtctgactgaggctaacagaagtgtgctcttccaaccaagtgcacttaagcgactaaacaaggagctcccgactgtcatcttcgacgctatagagtttgtacacgaactgggagaaagatacatttgggttgacgcgctatgtattgttcaagacagcgatgaccataaagcgacgcagatcgcacagatggataagatctacatgacagctctaataacaatcgtaccactgattaactcaccagacgccgagaaggcgtgcgccggctttccaagatacaacccggatatcagatgtcgcgaacagaagaccgccttagtccaaggcatgaacctcgcagtccctttcgaggccgttacggggttcgtcggagaccggaagacacggtgggggggtagaggatggacattccaagaatgcctcctgtctcccaggaaactgttcctgacagaatcacaggcatacttcacctgtcgacgaagtatctactgcgaagacagtcagggagagatagacacgacagatgtgtacattgccccaggtacaaacctgtggaaccctgggtcaaactccaactctcttgggaagatcaatttatcgttcagctctctacatttacacagcgaaccatatccccgtgaccggatttcagtcatggggtatctcaactatgttcaggaatacactttgcggcaactaactaatgtgtccgacacattgaatgcatttacggggatcggcaatgttctcgagttcctcatgcacactcgtatccattacggcctcccggagaaatattgggacatagcactgctattcaacacgtacggccacctgcctcgctcaacacagcccggagacagttatccgcggaataggcggtttcctagttggtcgtgggcgggctggaactgcggtattgacaatggtaggtactttccaactttccagcagagcggcattcgccgcgaggtcgattggtttcttcttgtcgatcaacaaactccctatttcatagactcacgaggcgagcccgcgatcttcccgacagctgctggaaataaagagcttcgtctgagagaatcggcttccgcatcagttcattctctgttgttggacgcaagggctacagcacattataccaatagggtagatgatcatgcaggcccaatccttgcgtgcgggacacaggttgctaggttcaatgttgcaggtactgtcagcatcagatcaccgacatggaaatctacgaaacacctcgccatatggaacactcggcaagagtggatagggtccgtacttgtagagacattctgggtagagaagtcacttgatcgggagaagaaatacgatttcatagtcgtatcgaggtccgtgtctttgcaaacgggtgggatcgaggaccctggtggactttcaaattcatctgtcttcgacgattcgctgtttttgaagagggattggtgtctgttgaacgtcatgatgcttgagatgatgaagaacggcttctatgaacgtatcgggatcggtgtagtccacgaggatgcttggcttcgggctgaacctagaaaaatattcgctatgatacaatga

SEQ ID NO: 34619 - protein, 816 aa, Muscodor strobelii
  misc_feature: SGI Peptide ID NO. 571970
  misc_feature (272)..(425): Pfam Id: PF06985 Pfam Desc: Heterokaryon incompatibility protein (HET)
  misc_feature (272)..(361): Pfam Id: PF06985 Pfam Desc: Heterokaryon incompatibility protein (HET)
  misc_feature (50)..(808): NCBI GI: 39946810 Blast Desc: MGG_08495 [Magnaporthe grisea 70-15] gi|145012335|gb|EDJ96991.1| MGG_08495 [Magnaporthe grisea 70-15]
  misc_feature (55)..(809): NCBI GI: 168042178 Blast Desc: [Physcomitrella patens subsp. patens] gi|162675105|gb|EDQ61604.1| [Physcomitrella patens subsp. patens]
  misc_feature (194)..(614): NCBI GI: 156053255 Blast Desc: SS1G_06795 [Sclerotinia sclerotiorum 1980] gi|154704573|gb|EDO04312.1| SS1G_06795 [Sclerotinia sclerotiorum 1980]
  misc_feature (208)..(589): NCBI GI: 169768534 Blast Desc: [Aspergillus oryzae RIB40] gi|83766595|dbj|BAE56735.1| protein product [Aspergillus oryzae]
  misc_feature (216)..(816): NCBI GI: 115402181 Blast Desc: [Aspergillus terreus NIH2624] gi|114189013|gb|EAU30713.1| [Aspergillus terreus NIH2624]
  misc_feature (54)..(444): NCBI GI: 224419330 Blast Desc: HET protein [Pleurotus sp. 'Florida']
  misc_feature (214)..(803): NCBI GI: 256729492 Blast Desc: NECHADRAFT_84122 [Nectria haematococca mpVI 77-13-4]
  misc_feature (190)..(590): NCBI GI: 225678584 Blast Desc: conserved [Paracoccidioides brasiliensis Pb03]
  misc_feature (208)..(590): NCBI GI: 226285776 Blast Desc: conserved [Paracoccidioides brasiliensis Pb01]
  misc_feature (230)..(589): NCBI GI: 238497838 Blast Desc: conserved [Aspergillus flavus NRRL3357] gi|220693428|gb|EED49773.1| conserved [Aspergillus flavus NRRL3357]
MNRVQKNSVSRQTMGSGGLSEPPLSAKPAETNAQAASDPTRETTPHIGFVAPRGLCDVCSTLDLAAYFRNEIDYKIFDGGWVGAAKGARQLGLLRDICHKAATCSFCWIVVQAICTTNLHREMLPNALLEREELSDSLLECCIYSYCFMKNDRIAEDVPQSRAGRLGIATRVSTGADTDMDSSRDWDITQLGDIQLLGEDAMNFMNSQTFYGRRIDRRLDMTLPSFWLDLCRSNHEASCGWNVPGLHIEPKNIFVVDCLEQCVVELPMGATYFALSYCWPSREALCLTEANRSVLFQPSALKRLNKELPTVIFDAIEFVHELGERYIWVDALCIVQDSDDHKATQIAQMDKIYMTALITIVPLINSPDAEKACAGFPRYNPDIRCREQKTALVQGMNLAVPFEAVTGFVGDRKTRWGGRGWTFQECLLSPRKLFLTESQAYFTCRRSIYCEDSQGEIDTTDVYIAPGTNLWNPGSNSNSLGKINLSFSSLHLHSEPYPRDRISVMGYLNYVQEYTLRQLTNVSDTLNAFTGIGNVLEFLMHTRIHYGLPEKYWDIALLFNTYGHLPRSTQPGDSYPRNRRFPSWSWAGWNCGIDNGRYFPTFQQSGIRREVDWFLLVDQQTPYFIDSRGEPAIFPTAAGNKELRLRESASASVHSLLLDARATAHYTNRVDDHAGPILACGTQVARFNVAGTVSIRSPTWKSTKHLAIWNTRQEWIGSVLVETFWVEKSLDREKKYDFIVVSRSVSLQTGGIEDPGGLSNSSVFDDSLFLKRDWCLLNVMMLEMMKNGFYERIGIGVVHEDAWLRAEPRKIFAMIQ

SEQ ID NO: 34620 - DNA, 1067 bp, Muscodor strobelii
  misc_feature: SGI EST ID NO. CUFF.82309.0
  misc_feature: Variant of the nucleotide sequence at SEQ ID NO 34618
gcggcaactaactaatgtgtccgacacattgaatgcatttacggggatcggcaatgttctcgagttcctcatgcacactcgtatccattacggcctcccggagaaatattgggacatagcactgctattcaacacgtacggccacctgcctcgctcaacacagcccggagacagttatccgcggaataggcggtttcctagttggtcgtgggcgggctggaactgcggtattgacaatggtaggtactttccaactttccagcagagcggcattcgccgcgaggtcgattggtttcttcttgtcgatcaacaaactccctatttcatagactcacgaggcgagcccgcgatcttcccgacagctgctggaaataaagagcttcgtctgagagaatcggcttccgcatcagttcattctctgttgttggacgcaagggctacagcacattataccaatagggtagatgatcatgcaggcccaatccttgcgtgcgggacacaggttgctaggttcaatgttgcaggtactgtcagcatcagatcaccgacatggaaatctacgaaacacctcgccatatggaacactcggcaagagtggatagggtccgtacttgtagagacattctgggtagagaagtcacttgatcgggagaagaaatacgatttcatagtcgtatcgaggtccgtgtctttgcaaacgggtgggatcgaggaccctggtggactttcaaattcatctgtcttcgacgattcgctgtttttgaagagggattggtgtctgttgaacgtcatgatgcttgagatgatgaagaacggcttctatgaacgtatcgggatcggtgtagtccacgaggatgcttggcttcgggctgaacctagaaaaatattcgctatgatacaatgatagggtactgagcaggcaacaactgttctgatgcaaaacacgatcctctttgtggaacgtaaagtccaagcatcgctataatcctggcaaggtgggatgggaatagatggagcgctaaagcaggttgttttccagtaggtcttgcatctacactctaatatat

SEQ ID NO: 34621 - DNA, 4995 bp, Muscodor strobelii
  misc_feature: SGI cDNA ID NO. 571971
  misc_feature: Encodes the peptide sequence at SEQ ID NO 34622
atgcatctagctcgtctattgattctactttcctcacactcggggcttgtgtcggcggctgttccaccccgtgccctggatgtgacgccgtcagccgatgggcttccctatgatccgcggcctgcaccagcgtatatggtggacaatcaaaagaattatttccatgcagctcctgataagggaaaccaaaatggcccagcttggcgttactctggaagtctagacggctatctacgcaaccttcgtgatgggttcgttgtgcgcggtggctatgacaagtcaaacaggacgcaccgaacatctttcgagcccgctaaagagaagcggcaatcctcgtctgcctactggctctcggagctttcatcgcttggagaccaaccttttgcaggtgcggatggttaccagttctttcgcaatgtagtcgatgacttcaaagccgacaacacgggagactcggatacaactgaggcactcaatgccgccgtagcaagttggaacaaggattccattggaggctcccaaacaagatgtggcgaaaagtgtggcaatacattctcacagggggctattgtgtattttccaggaggcacctacaaaatctgctcgcccgtaatccaatactattacactcagtttataggagatcctaacgacatgcctatcatcaaaggttgcgatgattttcaaggtattgcgttatttgacaccgatccctacatccccggtggtgctggatcgcaatggtacatcaatcaaaatcaattcttccgtcagatccgtaattttcgcttcaatctgaaggatatgcctgaatcaacagctgagaatgaccaacctttggtaccgactggcattcactggcaagttgctcaagctacctcactgcagaacttgatatttgatatgccaactacaagcacgacaaccgcagtgggcattttcacagaaaatggcagcggcgggtttgtttccgacttaacattcaacggtggtaacataggttggcgtgccggatcgcaacagtttaccgcacgaaacttagagttcaatcagtgcaatactgccgtacagatggtctgggactggggctggaacttccaacaaatcacggtgaacggcggttccattgcgttcaacatatcaggagtaggcggcacggacaaccagggaataggcagtgtgtccattgtcgattctaaaatctcagacgttaaagtgggcgtgctaacaaacagccgctccacgtctcccaacatagttcttgacaacacagagttctcgagcgtagccaatccagtcatggtcgacggcggcagtacgttactttccggtacttctaacctctgggcaacaggcaagaggtacaacggctcgatgggatcaacagaaactggtgctgttacggcgccagacagaggcaaaggtctcactgattcgggaactggtcttctctatgtgcggtcccgaccacagtatgagactctaggcaagggttccttcttggtggcaaccagtgatggcaattgcaaaaatgacgcaacgggcgaccaggcgagctgcatcaattcgttcctacgggatgctttgaatcagaagaaagtcgctttctttcctgcgggtatctacgcggttgggagcaccgtcaatattcccacaggctccatcgttcaaggctcttcgtggtcccagatccagggctcggggttctacttcagtgatcttcagaacccgaaagtcatgatacaagtcggcaacaaaggagacataggttctatggagatcgtagagatgcttttctcggtacgtggcagcaccgcaggcgctattctcatggaatggaatgttgccgctggcgatgaccatcaaggagaggcggctatgtgggactcgcactttcgggtcggtggcgcgatggacacggatctaaacctcgcgaactgccccaaattcagtgtcaacgcagactgcattgctgctaccctcatgtttcgcgtaacatcccaggctagcggctacttcgaaaacgtctgggcatgggtaggagatcacgataacgatgagtccatctacaaccaacccgactctagttctacccaaatctcagtttttggagcacgtggcatgctgatcgagtctcaaggcccgtcgtggttctacggtggcggctccgagcattccgtgttctacaactaccttattagcggagcgcaaagcatttacatgggccatctgcagacagaatctccctattatcagcccgatccaggcccgccagcaccctttggtgcggctcctagctttccaaacgatccggattatagcgcttgcgagattgcggatgaggtgtgggacgaatcattcctccgtgtcaagtaccaggatatgtgccactacgcctggggtatgcggatcatcgactctaccgacgtcatgattcatactgctggcttttacagctttttcaatcagttttaccaggattgcgttgacacggacaattgccaagagcaggtcctggaagtcaaaggttcaaagggtgttgtcatcttcaacttgttcactgttggcgtaatagacatagccagtggtattgacaatacgaatgttccccagaatggaaaccagcgcggcttcacaactgaaatcagcgtgtggctaccacttcctggggatgacaacgtcgacattatctgggtaggaactgaggtttggaacacaccgacagtgacctgttcatcgccgccctgtatgctcatcattcccacaagctcgcttgaaagcaagaccaccatccaaccacatagttatgtgacttctttcgagtatggtggatatgggaccacgacaattggcggtgttgagacgactgtctttgtcacatcaactaccaccatcacaatctcgatcccttcaatcgtcacgggaggcattccctactccaacgtcaacattacatcgacgggtgttgctcccatcaccattattcccagtgtcaatctgccccccgcggttatcccattaccaaacggtagtggcggtacgacctcgagaactgttccactaccgccttggccacagatagagggcggacctagtgttggatattccgatccaggtacggtctcgacaggtagtaccagcacccccggtttgcccagcagtaccacctattatacgcccgtcggaatccccattactattactggcgctactgttaccacggtgacttttccggcgtcgaccggcgctgttacgatctcttgtccggctacaacgtccattgccttcgcaacaccggcaattgccattgctacaacctgtacagtctctgcgagcgtaacattgaatttcgcctgccctaccaccagagtcctcacatttctcgggccggcgacggcgacagcgacggtggactgctctttggttacatcttggactactggctcaacctctacgtcaacgccgctgccagtgtatactacatggcccccttacggtcggataatccccgagtccacgacgctaagtaagccggagccaacaactgacggcgttagagtgccctgtaccgcctggttcttctttttctgtatctcctggggtgagcttcacgtaggaacctggcactgggttttgcctccaggaatctacggacctggccctccgcccattggtctgattcatccccctcccggcgtgactatacagggaaacctacccaactggcccaagattaccatcgggagggataatcaaatcacaactgaggaggagccagagtgcgagacccaaacagcctcggcctgcaccactacaaacttcgtctctgcgggcactacaacatcatcatcaacaatgtgcgagaccatatccggttgctcgatttcggtctcggactccacgactaatactattggtaagcaaactgctgcaccgatcggtagttggggcgatgaagcatgggggaccatgaccctaggacaagactattcaaacatggtcttcgaagcattatcctcggcgctagctcgagaagacgccagcgctggcggcaccacgtttgaagtcacgagcgggcccacagccggtcctacgtgcaaaggtgccacgacggcatgcggcggaacaaaatgctcaggctactggtgcactccgtctccgacggggtacccgccagggttccaggaccccaaagatcccagctcaggcggctattcagcaccgacgacatcggtcggctcaacgactacgtcatcctcgagctcgggtcctacgacaagcgtgacgccactgacccgcggcccaatcaaatgtttcaatgaggacgacttcccgggccatgctgacatccaatctggggaccaggacgactactcggaggactttagcaatttggatacaagtgtagacactatcggaccgggcgatcccgcagtcacgcttcataagacagacagccatggtgtcaactatgattactcggctagttgggtgcctgggtgtgtcactacagttgatcgacaaagctttgggtttcctatgggcccgaactcgggcagcctggttacggcttatttgcttgttcgggaggactataccaagtgcaataatggtggcgaccgcttgttgaacttgaagaatgatgctgccatgatacgaaaggcggacgcattgagcaaagattatggcgcgcgtaagaagctcaaagaggcaatggattcgttcaaagacccgcttcacaaacatctgtccgcagagccggcgatgatagtcgctctagcggagcatagcatggcggagcatcctattgacatcgagaccatctccgaaaaggcagctacaaaggagattgggataagtgtcttgttcaatcttatgcccgtattcttcttatatatgaatcctactaagtttgaggatggtatgtgggacggtgttttcccttcgttcaaaggccctgccaaggtagtcatgacgagaggtatcccgatgtag

SEQ ID NO: 34622 - protein, 1664 aa, Muscodor strobelii
  misc_feature: SGI Peptide ID NO. 571971
  misc_feature (46)..(1312): NCBI GI: 171684561 Blast Desc: protein product [Podospora anserina] gi|170942241|emb|CAP67893.1| protein product [Podospora anserina]
  misc_feature (37)..(1302): NCBI GI: 225554237 Blast Desc: glucan 1,3-beta-glucosidase precursor [Ajellomyces capsulatus G186AR]
  misc_feature (37)..(1212): NCBI GI: 240280211 Blast Desc: exo-beta-1,3-glucanase [Ajellomyces capsulatus H143]
  misc_feature (37)..(1157): NCBI GI: 261199001 Blast Desc: exo-beta-1,3-glucanase [Ajellomyces dermatitidis SLH14081] gi|239595054|gb|EEQ77635.1| exo-beta-1,3-glucanase [Ajellomyces dermatitidis SLH14081]
  misc_feature (37)..(1179): NCBI GI: 239609834 Blast Desc: exo-beta-1,3-glucanase [Ajellomyces dermatitidis ER-3]
  misc_feature (56)..(1296): NCBI GI: 225677886 Blast Desc: glucan 1,3-beta-glucosidase [Paracoccidioides brasiliensis Pb03]
  misc_feature (123)..(1194): NCBI GI: 226279450 Blast Desc: glucan 1,3-beta-glucosidase [Paracoccidioides brasiliensis Pb01]
  misc_feature (41)..(1302): NCBI GI: 154278814 Blast Desc: [Ajellomyces capsulatus NAm1] gi|150412163|gb|EDN07550.1| [Ajellomyces capsulatus NAm1]
  misc_feature (3)..(1302): NCBI GI: 226287720 Blast Desc: glucan 1,3-beta-glucosidase [Paracoccidioides brasiliensis Pb18]
  misc_feature (37)..(986): NCBI GI: 226279071 Blast Desc: glucan 1,3-beta-glucosidase [Paracoccidioides brasiliensis Pb01]
MHLARLLILLSSHSGLVSAAVPPRALDVTPSADGLPYDPRPAPAYMVDNQKNYFHAAPDKGNQNGPAWRYSGSLDGYLRNLRDGFVVRGGYDKSNRTHRTSFEPAKEKRQSSSAYWLSELSSLGDQPFAGADGYQFFRNVVDDFKADNTGDSDTTEALNAAVASWNKDSIGGSQTRCGEKCGNTFSQGAIVYFPGGTYKICSPVIQYYYTQFIGDPNDMPIIKGCDDFQGIALFDTDPYIPGGAGSQWYINQNQFFRQIRNFRFNLKDMPESTAENDQPLVPTGIHWQVAQATSLQNLIFDMPTTSTTTAVGIFTENGSGGFVSDLTFNGGNIGWRAGSQQFTARNLEFNQCNTAVQMVWDWGWNFQQITVNGGSIAFNISGVGGTDNQGIGSVSIVDSKISDVKVGVLTNSRSTSPNIVLDNTEFSSVANPVMVDGGSTLLSGTSNLWATGKRYNGSMGSTETGAVTAPDRGKGLTDSGTGLLYVRSRPQYETLGKGSFLVATSDGNCKNDATGDQASCINSFLRDALNQKKVAFFPAGIYAVGSTVNIPTGSIVQGSSWSQIQGSGFYFSDLQNPKVMIQVGNKGDIGSMEIVEMLFSVRGSTAGAILMEWNVAAGDDHQGEAAMWDSHFRVGGAMDTDLNLANCPKFSVNADCIAATLMFRVTSQASGYFENVWAWVGDHDNDESIYNQPDSSSTQISVFGARGMLIESQGPSWFYGGGSEHSVFYNYLISGAQSIYMGHLQTESPYYQPDPGPPAPFGAAPSFPNDPDYSACEIADEVWDESFLRVKYQDMCHYAWGMRIIDSTDVMIHTAGFYSFFNQFYQDCVDTDNCQEQVLEVKGSKGVVIFNLFTVGVIDIASGIDNTNVPQNGNQRGFTTEISVWLPLPGDDNVDIIWVGTEVWNTPTVTCSSPPCMLIIPTSSLESKTTIQPHSYVTSFEYGGYGTTTIGGVETTVFVTSTTTITISIPSIVTGGIPYSNVNITSTGVAPITIIPSVNLPPAVIPLPNGSGGTTSRTVPLPPWPQIEGGPSVGYSDPGTVSTGSTSTPGLPSSTTYYTPVGIPITITGATVTTVTFPASTGAVTISCPATTSIAFATPAIAIATTCTVSASVTLNFACPTTRVLTFLGPATATATVDCSLVTSWTTGSTSTSTPLPVYTTWPPYGRIIPESTTLSKPEPTTDGVRVPCTAWFFFFCISWGELHVGTWHWVLPPGIYGPGPPPIGLIHPPPGVTIQGNLPNWPKITIGRDNQITTEEEPECETQTASACTTTNFVSAGTTTSSSTMCETISGCSISVSDSTTNTIGKQTAAPIGSWGDEAWGTMTLGQDYSNMVFEALSSALAREDASAGGTTFEVTSGPTAGPTCKGATTACGGTKCSGYWCTPSPTGYPPGFQDPKDPSSGGYSAPTTSVGSTTTSSSSSGPTTSVTPLTRGPIKCFNEDDFPGHADIQSGDQDDYSEDFSNLDTSVDTIGPGDPAVTLHKTDSHGVNYDYSASWVPGCVTTVDRQSFGFPMGPNSGSLVTAYLLVREDYTKCNNGGDRLLNLKNDAAMIRKADALSKDYGARKKLKEAMDSFKDPLHKHLSAEPAMIVALAEHSMAEHPIDIETISEKAATKEIGISVLFNLMPVFFLYMNPTKFEDGMWDGVFPSFKGPAKVVMTRGIPM

SEQ ID NO: 34623 - DNA, 2591 bp, Muscodor strobelii
  misc_feature: SGI EST ID NO. CUFF.82322.0
  misc_feature: Variant of the nucleotide sequence at SEQ ID NO 34621
gtgccactacgcctggggtatgcggatcatcgactctaccgacgtcatgattcatactgctggcttttacagctttttcaatcagttttaccaggattgcgttgacacggacaattgccaagagcaggtcctggaagtcaaaggttcaaagggtgttgtcatcttcaacttgttcactgttggcgtaatagacatagccagtggtattgacaatacgaatgttccccagaatggaaaccagcgcggcttcacaactgaaatcagcgtgtggctaccacttcctggggatgacaacgtcgacattatctgggtaggaactgaggtttggaacacaccgacagtgacctgttcatcgccgccctgtatgctcatcattcccacaagctcgcttgaaagcaagaccaccatccaaccacatagttatgtgacttctttcgagtatggtggatatgggaccacgacaattggcggtgttgagacgactgtctttgtcacatcaactaccaccatcacaatctcgatcccttcaatcgtcacgggaggcattccctactccaacgtcaacattacatcgacgggtgttgctcccatcaccattattcccagtgtcaatctgccccccgcggttatcccattaccaaacggtagtggcggtacgacctcgagaactgttccactaccgccttggccacagatagagggcggacctagtgttggatattccgatccaggtacggtctcgacaggtagtaccagcacccccggtttgcccagcagtaccacctattatacgcccgtcggaatccccattactattactggcgctactgttaccacggtgacttttccggcgtcgaccggcgctgttacgatctcttgtccggctacaacgtccattgccttcgcaacaccggcaattgccattgctacaacctgtacagtctctgcgagcgtaacattgaatttcgcctgccctaccaccagagtcctcacatttctcgggccggcgacggcgacagcgacggtggactgctctttggttacatcttggactactggctcaacctctacgtcaacgccgctgccagtgtatactacatggcccccttacggtcggataatccccgagtccacgacgctaagtaagccggagccaacaactgacggcgttagagtgccctgtaccgcctggttcttctttttctgtatctcctggggtgagcttcacgtaggaacctggcactgggttttgcctccaggaatctacggacctggccctccgcccattggtctgattcatccccctcccggcgtgactatacagggaaacctacccaactggcccaagattaccatcgggagggataatcaaatcacaactgaggaggagccagagtgcgagacccaaacagcctcggcctgcaccactacaaacttcgtctctgcgggcactacaacatcatcatcaacaatgtgcgagaccatatccggttgctcgatttcggtctcggactccacgactaatactattggtaagcaaactgctgcaccgatcggtagttggggcgatgaagcatgggggaccatgaccctaggacaagactattcaaacatggtcttcgaagcattatcctcggcgctagctcgagaagacgccagcgctggcggcaccacgtttgaagtcacgagcgggcccacagccggtcctacgtgcaaaggtgccacgacggcatgcggcggaacaaaatgctcaggctactggtgcactccgtctccgacggggtacccgccagggttccaggaccccaaagatcccagctcaggcggctattcagcaccgacgacatcggtcggctcaacgactacgtcatcctcgagctcgggtcctacgacaagcgtgacgccactgacccgcggcccaatcaaatgtttcaatgaggacgacttcccgggccatgctgacatccaatctggggaccaggacgactactcggaggactttagcaatttggatacaagtgtagacactatcggaccgggcgatcccgcagtcacgcttcataagacagacagccatggtgtcaactatgattactcggctagttgggtgcctgggtgtgtcactacagttgatcgacaaagctttgggtttcctatgggcccgaactcgggcagcctggttacggcttatttgcttgttcgggaggactataccaagtgcaataatggtggcgtaggtggctcatgtcaagttggatgtctgctgtataccttcgagggcgcactcggagactcaggatctgacccgtgcgatgatttcaattgctcgcagtgtggtactccattcgatccgcctcagtgccaggagtgctgtcaaggatgagtatggatcttgagaggagcgggctgggatcggccaatgtatatatagcttatctacgataccaagctacacttgaataccccttgaagctcgccttttcctggcagttttggggctctcagtgataccaattgttcaggcctgtacggtgactagtggcacaagattggtcgtcaaatagattaatttttacatacttgagcctgtc

SEQ ID NO: 34624 - DNA, 1194 bp, Muscodor strobelii
  misc_feature: SGI cDNA ID NO. 571972
  misc_feature: Encodes the peptide sequence at SEQ ID NO 34625
atggcgggcaataccttttgttttgctgttattgcagcttttctttacatcatttccgccgtaactgcggtgaacctcgatgaactcttcgaggtccagagcgggggtaccgacggaggttgcgatgcccactacaaccgggcagctcagtcgggtgttttggacgactgggtcaccgagtgtagcttcagtgtcgacaatgccatcacggcgatcgaaagctacaaccaggatgtgagagttcgaagggcaatgcaagcttggttcggcattcgcaacaatggtcccgccagaggaaatactgccactctggtcgaaaatgtgagacgggatattcaatacatccaggagtttttcaatagggccaccgatgacgacggcaccccctattatcctctggggcaacgctatttatactgcgacagcactttcctcgtccatcagtcggatgacacgcaagctttggatttccaggcaaacgatatcattgacgcacagggcaataatgttctgatcagggatgtgccggcttatgaagcggccctcgaagaagatggcgagaatgaagcttggtggtctggcttccttacagacaccaacggttactacttttccgatactggcggcgaatattgcgatggttccaatctcggattgacttcgaaaatacagccccttgttgcgggtccaaatggtcaagcgcagaacggggcgactctagagagcgtagttctttgtcccgtcgccttcacaaacccggcattacctgcgacctaccgaatagcgaacggaatgatcgccacgaacaccaatctcgccctcgtgatgcccagaagtactactctcctccatgagatgttccatgtcctccgtggagggggcgacgatgggtttcttgagcatacagcagagtttaaggatatcgccgaatgcacaagcgcagcgatgaatactcccgacctggcacgaagaaaccctgaaaattatgtcttcttcattgtacatatgtatcgatatcagtctcccaggacgctgtctagggaaataacaaaaatgttactgacgcagtgcctccggctaccagacctgcttgggacagacgagggtgatgctccggagtccatacctacgaattgggattttgcgccgacgggcgcgggccgggcgcggacttacggggccaaagctccctag

SEQ ID NO: 34625 - protein, 397 aa, Muscodor strobelii
  misc_feature: SGI Peptide ID NO. 571972
MAGNTFCFAVIAAFLYIISAVTAVNLDELFEVQSGGTDGGCDAHYNRAAQSGVLDDWVTECSFSVDNAITAIESYNQDVRVRRAMQAWFGIRNNGPARGNTATLVENVRRDIQYIQEFFNRATDDDGTPYYPLGQRYLYCDSTFLVHQSDDTQALDFQANDIIDAQGNNVLIRDVPAYEAALEEDGENEAWWSGFLTDTNGYYFSDTGGEYCDGSNLGLTSKIQPLVAGPNGQAQNGATLESVVLCPVAFTNPALPATYRIANGMIATNTNLALVMPRSTTLLHEMFHVLRGGGDDGFLEHTAEFKDIAECTSAAMNTPDLARRNPENYVFFIVHMYRYQSPRTLSREITKMLLTQCLRLPDLLGTDEGDAPESIPTNWDFAPTGAGRARTYGAKAP

SEQ ID NO: 34626 - DNA, 1664 bp, Muscodor strobelii
  misc_feature: SGI EST ID NO. CUFF.82342.1
  misc_feature: Variant of the nucleotide sequence at SEQ ID NO 34624
gagatactggtcgaacatttatccggagtcttgcggtgccatctatttcttgtacagcctgactgagtccttgaccgaccatgatatccgagattccgagaatggcgctggaatcaccccaataaggattgcaccttccatcttcgtactcccctgctcacgtcagaatatcgttcgtcgtccgtttaagtagggtaaccgacggctccgataattatggcatcaggcggcccccaactaatcaagcgctcccgacaggggtgagtcttcacgcgaagggccgatagcaacaacaacaacaacaacaacaacccctaggattgtggtgatgcgatcctctccgcagtcccgtctgaagggatttctcactctctcttcccctctgaacagaagttcctcggtcagcagcacaataaagagatccagaccactgatcctccaacgctaagacagttgcctcagctgcacgacctgcacaactcgcatgcggcgcggtgggcgtcggggtgttgtgggatcactctgctgaaattacgcgtgatcttttgtgatcagaatccaggtagcaaaataacggcctcaaaattgtccaaactcgaaagttcgtatgtcctgaagctgttgttctgctgccagattttgatgcaacgggaaacatggcgggcaataccttttgttttgctgttattgcagcttttctttacatcatttccgccgtaactgcggtgaacctcgatgaactcttcgaggtccagagcgggggtaccgacggaggttgcgatgcccactacaaccgggcagctcagtcgggtgttttggacgactgggtcaccgagtgtagcttcagtgtcgacaatgccatcacggcgatcgaaagctacaaccaggatgtgagagttcgaagggcaatgcaagcttggttcggcattcgcaacaatggtcccgccagaggaaatactgccactctggtcgaaaatgtgagacgggatattcaatacatccaggagtttttcaatagggccaccgatgacgacggcaccccctattatcctctggggcaacgctatttatactgcgacagcactttcctcgtccatcagtcggatgacacgcaagctttggatttccaggcaaacgatatcattgacgcacagggcaataatgttctgatcagggatgtgccggcttatgaagcggccctcgaagaagatggcgagaatgaagcttggtggtctggcttccttacagacaccaacggttactacttttccgatactggcggcgaatattgcgatggttccaatctcggattgacttcgaaaatacagccccttgttgcgggtccaaatggtcaagcgcagaacggggcgactctagagagcgtagttctttgtcccgtcgccttcacaaacccggcattacctgcgacctaccgaatagcgaacggaatgatcgccacgaacaccaatctcgccctcgtgatgcccagaagtactactctcctccatgagatgttccatgtcctccgtggagggggcgacgatgggtttcttgagcatacagcagagtttaaggatatcgccgaatgcacaagcgcagcgatgaatactcccgacctggcacgaagaaaccctgaaaattatgtcttcttcattgtacatatg

SEQ ID NO: 34627 - DNA, 900 bp, Muscodor strobelii
  misc_feature: SGI cDNA ID NO. 571973
  misc_feature: Encodes the peptide sequence at SEQ ID NO 34628
atggctcgcaccaaacaaaccccaaggcccttaacgggggagattaggaccacttggacccgatttcgactaccggttgagaaagacttgtcaacttggccagagagtggcgacaatgttcatcttaatccgcttgccgacgtaggaatatcgggttacatgaaggtatggctggggagaatgattcaggacccggagcaagccgccatcattatcgaatggagaacaatgcatgatctggagcagtttcaatcgtctcctgcttgcgcagcgtttctccaaagcctgtctccagacgagggtgacgaggcgcagactttaaacccaaagtcgcgatttaccgtcttcagagataccgaggctccttacaccggccccgtcgggggtcgcgtcactctgactgctctcatggtatcgcttcaggacgaatcaatgaaaggtccactatatcagaccgtaaaaagtgtcttcgactccttcgtgccgcgcgggtgcgaaaagatcacaacccgctggccgccccctcgccctcggcatttggcagcatggcattgggtaattggtgagagcgcttggacggcgaagctgttcagcgacgccaaatatatagacgaagacagtcataggcgagccctcctctgcgagtttcgcaggtggaatagtcacaacgacgccacgccagagcttgaagagtggtcagccaaggatccactggcgagggaatcatgggctcaggctgtggcgcgggtgacgcccccggtggtgggatgggtacaagagcgttgggacttgaaggaattgagtctttggtcccccgaagatgaggttgagctgggacctgaggaacctgagtacgaagagcagttggccgcctttagttcatcatcagctgcaccataa

SEQ ID NO: 34628 - protein, 299 aa, Muscodor strobelii
  misc_feature: SGI Peptide ID NO. 571973
MARTKQTPRPLTGEIRTTWTRFRLPVEKDLSTWPESGDNVHLNPLADVGISGYMKVWLGRMIQDPEQAAIIIEWRTMHDLEQFQSSPACAAFLQSLSPDEGDEAQTLNPKSRFTVFRDTEAPYTGPVGGRVTLTALMVSLQDESMKGPLYQTVKSVFDSFVPRGCEKITTRWPPPRPRHLAAWHWVIGESAWTAKLFSDAKYIDEDSHRRALLCEFRRWNSHNDATPELEEWSAKDPLARESWAQAVARVTPPVVGWVQERWDLKELSLWSPEDEVELGPEEPEYEEQLAAFSSSSAAP

SEQ ID NO: 34629 - DNA, 2032 bp, Muscodor strobelii
  misc_feature: SGI EST ID NO. CUFF.82346.3
  misc_feature: Variant of the nucleotide sequence at SEQ ID NO 34627
ggcccaatgaaataaacagaggacaacacttgctccatccatcatgtcgagcgctgactaccaaatttcatcaaatattcgtatttacaacgaagaggacagggtggctccaggcatcggcctgggcttcctatgtcaaatcctcgacgaacatttagtgacgtggtggttgggggcagggagtggggttttcgaggcggcagaagactcgaagtagcgttggactgctcgaagtcgcaatcaccgacacctcaatgcacgcaaagtcgaagagccgccggccgagagcaagaaaataatggcagcaaaacgagttcccccgagaaatttagcaagccaaatgtcaaaactttcgacacttattcacctaccatactaaccaatcagaggccgtattctccggaggcggtgctgttctggagagagtctgtcctctggtctgtcttaccttagtaattatagtaacaggtactacaggggttcgtttttgcgccccgttaccccagaaggtaatcggactttgtccactccattccatccagcacattcagactgtgcccaccactacaacagaggttcatactctcgcacgcgattcgactgtgatacctatcacagaaacatatacaggcgcaacgtgtatcatggctcgcaccaaacaaaccccaaggcccttaacgggggagattaggaccacttggacccgatttcgactaccggttgagaaagacttgtcaacttggccagagagtggcgacaatgttcatcttaatccgcttgccgacgtaggaatatcgggttacatgaaggtatggctggggagaatgattcaggacccggagcaagccgccatcattatcgaatggagaacaatgcatgatctggagcagtttcaatcgtctcctgcttgcgcagcgtttctccaaagcctgtctccagacgagggtgacgaggcgcagactttaaacccaaagtcgcgatttaccgtcttcagagataccgaggctccttacaccggccccgtcgggggtcgcgtcactctgactgctctcatggtatcgcttcaggacgaatcaatgaaaggtccactatatcagaccgtaaaaagtgtcttcgactccttcgtgccgcgcgggtgcgaaaagatcacaacccgctggccgccccctcgccctcggcatttggcagcatggcattgggtaattggtgagagcgcttggacggcgaagctgttcagcgacgccaaatatatagacgaagacagtcataggcgagccctcctctgcgagtttcgcaggtggaatagtcacaacgacgccacgccagagcttgaagagtggtcagccaaggatccactggcgagggaatcatgggctcaggctgtggcgcgggtgacgcccccggtggtgggatgggtacaagagcgttgggacttgaaggaattgagtctttggtcccccgaagatgaggttgagctgggacctgaggaacctgagtacgaagagcagttggccgcctttagttcatcatcagctgcaccataaacccggagactctttgccaccaaccaataatcactttgtatagctattcggattttctggggaatgcgattccagtacttgggtcacttgtgatgtttgattcagtcggtaatctatttggcatataacatttttgaactaattccacgtgtggtggtaagcataccgtgaaaacacaggaatagacgcgtgtgtgtatggttgtcaggctacttggttactgtcacgatgttgtctgcttatttcgggatcccatcggaagttgattcgggtgctccaggcagcaccagttgcagggttaattgtgtgtatatacagcggtcggcccttcgtctattcggtagataattgatctttcttggagcttccacaattacccctctcacctccgtgagaattagttacctagggagctttggccccgtaagtccgcgcccggcccgcgcccgtcggcgcaaaatcccaattcgtaggtatggactccggag

SEQ ID NO: 34630 - DNA, 810 bp, Muscodor strobelii
  misc_feature: SGI cDNA ID NO. 571974
  misc_feature: Encodes the peptide sequence at SEQ ID NO 34631
atgaggtttccaatttctgctgtttttattctagcaacgcagtcagtttctgtagtagctcaacaatgtaacttgcagttcgatggccgtgtgccatcgacattctctgctgcgactttcgacactgccaacggcgtcttcgaccccagcaatgtgtttggacaagacaccattccggttgaagtgtcgattgacgaccagtcaatctttgcgccgagcgccgacaacgtccagactggcttccggtgggctgaactgctcattgctagtaatgatggcacggatgcctccactacgggggttaagacgcttcattttagtgtgatgaaggatgttgcgaaaccattgaacctgaaccacgaataccaactggtgtttctggagagcaatgactttagcacgaaccaattcgtcttaaaaacgggcacgatacttggcaccgctacggcagatccagacacactacagctcgtaggcaatgtgaacgatagtccggtacaaacgctattcagtgcaccttttaccgaagatgtgtttcacaacttcgccgtgacacttgacttcgatgctcttactacacaggttttctactcgcaaaatgcagacgcactcgtcgcacagaccgaggccttggccaacgatgttagtggacagggacaattccatttcggagtactgaagaagggattgaatggaggtgatgacattgtcaagaatggagaacaggagtcgggcatcaacgagggtattatctttggtggcattttcgaagaagatagctctgcaggctgcgttagcttatcgccatag

SEQ ID NO: 34631 - protein, 269 aa, Muscodor strobelii
  misc_feature: SGI Peptide ID NO. 571974
  misc_feature (18)..(268): NCBI GI: 116179246 Blast Desc: CHGG_00251 [Chaetomium globosum CBS 148.51] gi|88184548|gb|EAQ92016.1| CHGG_00251 [Chaetomium globosum CBS 148.51]
  misc_feature (53)..(269): NCBI GI: 171688076 Blast Desc: protein product [Podospora anserina] gi|170944000|emb|CAP70110.1| protein product [Podospora anserina]
  misc_feature (6)..(268): NCBI GI: 39960667 Blast Desc: MGG_09321 [Magnaporthe grisea 70-15] gi|145010106|gb|EDJ94762.1| MGG_09321 [Magnaporthe grisea 70-15]
  misc_feature (9)..(260): NCBI GI: 156032718 Blast Desc: SS1G_13764 [Sclerotinia sclerotiorum 1980] gi|154699167|gb|EDN98905.1| SS1G_13764 [Sclerotinia sclerotiorum 1980]
  misc_feature (18)..(268): NCBI GI: 169625489 Blast Desc: SNOG_16017 [Phaeosphaeria nodorum SN15] gi|160705664|gb|EAT76596.2| SNOG_16017 [Phaeosphaeria nodorum SN15]
  misc_feature (14)..(266): NCBI GI: 256733740 Blast Desc: NECHADRAFT_67676 [Nectria haematococca mpVI 77-13-4]
  misc_feature (49)..(268): NCBI GI: 189208324 Blast Desc: conserved [Pyrenophora tritici-repentis Pt-1C-BFP] gi|187976588|gb|EDU43214.1| conserved [Pyrenophora tritici-repentis Pt-1C-BFP]
  misc_feature (13)..(267): NCBI GI: 46130606 Blast Desc: FG08907.1 [Gibberella zeae PH-1]
  misc_feature (109)..(260): NCBI GI: 154301586 Blast Desc: BC1G_10120 [Botryotinia fuckeliana B05.10] gi|150855782|gb|EDN30974.1| BC1G_10120 [Botryotinia fuckeliana B05.10]
  misc_feature (20)..(266): NCBI GI: 261356502 Blast Desc: conserved [Verticillium albo-atrum VaMs.102]
MRFPISAVFILATQSVSVVAQQCNLQFDGRVPSTFSAATFDTANGVFDPSNVFGQDTIPVEVSIDDQSIFAPSADNVQTGFRWAELLIASNDGTDASTTGVKTLHFSVMKDVAKPLNLNHEYQLVFLESNDFSTNQFVLKTGTILGTATADPDTLQLVGNVNDSPVQTLFSAPFTEDVFHNFAVTLDFDALTTQVFYSQNADALVAQTEALANDVSGQGQFHFGVLKKGLNGGDDIVKNGEQESGINEGIIFGGIFEEDSSAGCVSLSP

SEQ ID NO: 34632 - DNA, 707 bp, Muscodor strobelii
  misc_feature: SGI EST ID NO. CUFF.82361.0
  misc_feature: Variant of the nucleotide sequence at SEQ ID NO 34630
gggctgaactgctcattgctagtaatgatggcacggatgcctccactacgggggttaagacgcttcattttagtgtgatgaaggatgttgcgaaaccattgaacctgaaccacgaataccaactggtgtttctggagagcaatgactttagcacgaaccaattcgtcttaaaaacgggcacgatacttggcaccgctacggcagatccagacacactacagctcgtaggcaatgtgaacgatagtccggtacaaacgctattcagtgcaccttttaccgaagatgtgtttcacaacttcgccgtgacacttgacttcgatgctcttactacacaggttttctactcgcaaaatgcagacgcactcgtcgcacagaccgaggccttggccaacgatgttagtggacagggacaattccatttcggagtactgaagaagggattgaatggaggtgatgacattgtcaagaatggagaacaggagtcgggcatcaacgagggtattatctttggtggcattttcgaagaagatagctctgcaggctgcgttagcttatcgccatagagagtcctactgtcccaggacattgtcctcgtaaaccacccgagcatcttgcctaagccctactacggaccgctttggagccggacaaaatatgaaacagagaaggcaggaaacaggcttctatttcagtatatgtcatcagct

SEQ ID NO: 34633 - DNA, 2304 bp, Muscodor strobelii
  misc_feature: SGI cDNA ID NO. 571975
  misc_feature: Reduced expression when VOC is produced
  misc_feature: Encodes the peptide sequence at SEQ ID NO 34634
atgagtctcggcgtagacaatgttgagcccaatcgacagcagagatataacaaatctagcaatacttctacgaggagctcgccaccaccaaccgcctcgcagataacagttgttctcgatcggcagcccgatatcccaacgtcggcatctcagatgacggtggtaccctatgcgccaacaccaccctatgctccaacatacaattctgtaccgtccgacgacgagatctatggtccggaacgatactcgggtcactatcaccatgctcccattcccaatttcacttcaacggcttcaacgcctgcgccatctgtgcgtttcaacccgacagctttcatggcgggaaatcaatcagatcctttggcacagagagacttcaaggatgagctcacgagagctgctggagtagtcacgcccggagtatctgacgttccttacatccaatacgcactcgaagccttgacacgccgtcctgaagacgctcagggaacgtcgggaaatacatcttctgaaagcgatggcacacccatcgcaaggcatcaaattattccccaattcagcgtcaacatttctcgccctccggctgttcaccaacctccagttgctgtttatcacgacgaagaaatgaacgaggacgaagagagcattccagaacattggccactgccgccatcaaccaccaatattctagatgtagatcaacgacctgaagaacccttggccacagaaattccggtacccaagccggaacgagaaccgtcaccaaaacgtcgagactattggcaggagaatgcagaccggaatttcgagtatgtcaaacaattagccttgggcccacgcaaggtcatccttgctggcccttggcccgtctggatacccacatttgtcgtctggctgctgaactttacgatccctctcctgagtactctgttcactgttgagctcgttgacggtgtctggacttggtcaaccgttcagggtgtggcgtggacgttagtggctgtatacatggtttttctcttcacgattgttgtaatagtgatctactggcgacaaaggaagacagggatgatggatagatgggagatccggagtctcgcggacatcatctatcttgtggcgcaaagcaactcgcttccacagtaccgcgggctcgagacagcagcttcacgccgggaaatgagggaagtacttgacggtacagctgagaggcttgggtattggactactcctgaggtccccgaaaacgccgtgttctggagctttggagtacccactacggaggcggatatcgaagtagagaaaagacaaagacaacaccaagataccgaacggaaagacttgcgctcgtcacagctcactgacgtggagaagcaggcacagccatacgttgtgcgatcccggtatcttccttggtgtttccgcgacggccagatcatcttcttcactgtagctggcacgatacttcttgtggcattgcttgttgtgtccttcatccccgcaactgatgttcgtggcggattcattccgggtgtgtctgcaggcccagtgagagggtctttctccgcagccgactttttgtactcttttctgccctcgctgctgggtcttattttgtttcttggattccagtctctggaccttacgcttcgcgttctggctccatggggagagttggcacgggaagaagggtctcgcgctgaaacctcgcttttcttggattacgctgcgtgcctaccgtggcaatgcacctacaaggcgctaaagaatcgacactggcgtgtggcattcgtctcattcctgtcgccgcttttcattctaatacccgtactcagcggtggtatctttatggctctaacctccgacgctggggtagtacggatgtaccctaatgtcgttatcttcagcctcattctcgcccttctattcttctatcttggcgggctggtcagcctcgtcccgaatcgaaaacgcttccgtctaccacacgccgtgacctgtctcgcggaagttctgagcttctgctgcaacgagcaattgcgcacagacgaggctttcgaacagaagaaggattttcttcagcgcagccagctgagagcatctcttggttgtggcaaagactggcatcgacagggtcgctggacttttggcagtggcctgaataatgaggagagactcggcatcaagcatctcgccaagttcacggtgaacagcaagaagctgaagcagtatgatcggcttgtccgggggaagcccatctctggacccctccctcaagacagcatatcgttgtttggccattag

SEQ ID NO: 34634 - protein, 767 aa, Muscodor strobelii
  misc_feature: SGI Peptide ID NO. 571975
  misc_feature (267)..(735): NCBI GI: 149210651 Blast Desc: MGCH7_ch7g798 [Magnaporthe grisea 70-15] gi|86196753|gb|EAQ71391.1| MGCH7_ch7g798 [Magnaporthe grisea 70-15]
  misc_feature (267)..(735): NCBI GI: 145609752 Blast Desc: MGG_12538 [Magnaporthe grisea 70-15] gi|145017147|gb|EDK01510.1| MGG_12538 [Magnaporthe grisea 70-15]
  misc_feature (284)..(742): NCBI GI: 46128423 Blast Desc: FG08589.1 [Gibberella zeae PH-1]
  misc_feature (277)..(735): NCBI GI: 256733473 Blast Desc: NECHADRAFT_35407 [Nectria haematococca mpVI 77-13-4]
  misc_feature (286)..(742): NCBI GI: 85113767 Blast Desc: NCU03175 [Neurospora crassa OR74A] gi|28926368|gb|EAA35345.1| [Neurospora crassa OR74A] gi|38567242|emb|CAE76533.1| [Neurospora crassa]
  misc_feature (284)..(746): NCBI GI: 171684443 Blast Desc: protein product [Podospora anserina] gi|170942182|emb|CAP67834.1| protein product [Podospora anserina]
  misc_feature (286)..(733): NCBI GI: 156046097 Blast Desc: SS1G_09324 [Sclerotinia sclerotiorum 1980] gi|154693720|gb|EDN93458.1| SS1G_09324 [Sclerotinia sclerotiorum 1980]
  misc_feature (284)..(746): NCBI GI: 116193191 Blast Desc: CHGG_06313 [Chaetomium globosum CBS 148.51] gi|88182226|gb|EAQ89694.1| CHGG_06313 [Chaetomium globosum CBS 148.51]
  misc_feature (296)..(688): NCBI GI: 169595312 Blast Desc: SNOG_00394 [Phaeosphaeria nodorum SN15] gi|160701065|gb|EAT91889.2| SNOG_00394 [Phaeosphaeria nodorum SN15]
  misc_feature (295)..(733): NCBI GI: 255939279 Blast Desc: Pc15g01940 [Penicillium chrysogenum Wisconsin 54-1255] gi|211585031|emb|CAP83080.1| Pc15g01940 [Penicillium chrysogenum Wisconsin 54-1255]
  misc_feature: Useful for introducing or modulating the production of volatile compounds
MSLGVDNVEPNRQQRYNKSSNTSTRSSPPPTASQITVVLDRQPDIPTSASQMTVVPYAPTPPYAPTYNSVPSDDEIYGPERYSGHYHHAPIPNFTSTASTPAPSVRFNPTAFMAGNQSDPLAQRDFKDELTRAAGVVTPGVSDVPYIQYALEALTRRPEDAQGTSGNTSSESDGTPIARHQIIPQFSVNISRPPAVHQPPVAVYHDEEMNEDEESIPEHWPLPPSTTNILDVDQRPEEPLATEIPVPKPEREPSPKRRDYWQENADRNFEYVKQLALGPRKVILAGPWPVWIPTFVVWLLNFTIPLLSTLFTVELVDGVWTWSTVQGVAWTLVAVYMVFLFTIVVIVIYWRQRKTGMMDRWEIRSLADIIYLVAQSNSLPQYRGLETAASRREMREVLDGTAERLGYWTTPEVPENAVFWSFGVPTTEADIEVEKRQRQHQDTERKDLRSSQLTDVEKQAQPYVVRSRYLPWCFRDGQIIFFTVAGTILLVALLVVSFIPATDVRGGFIPGVSAGPVRGSFSAADFLYSFLPSLLGLILFLGFQSLDLTLRVLAPWGELAREEGSRAETSLFLDYAACLPWQCTYKALKNRHWRVAFVSFLSPLFILIPVLSGGIFMALTSDAGVVRMYPNVVIFSLILALLFFYLGGLVSLVPNRKRFRLPHAVTCLAEVLSFCCNEQLRTDEAFEQKKDFLQRSQLRASLGCGKDWHRQGRWTFGSGLNNEERLGIKHLAKFTVNSKKLKQYDRLVRGKPISGPLPQDSISLFGH

SEQ ID NO: 34635 - DNA, 3577 bp, Muscodor strobelii
  misc_feature: SGI EST ID NO. CUFF.82511.0
  misc_feature: Variant of the nucleotide sequence at SEQ ID NO 34633
cgattgttcacccgtcacatcctgacccttgccatcgcttgtttctttgccctgtcgcgggtggctggcgcaacgcagcccaaccacctacgacgcatcacaaccatcccgccacgcacaaataccatctgtcttaaaaaccagtgggcgcctgataccggagccatcatgcaatctacacctgcagatatcttgtgctgtgaaaccaattggtcgacatttccgaagcggaggaggtctttatcgctgttttttattcggacgtacagcacgtagagctaactaaacatgagtctcggcgtagacaatgttgagcccaatcgacagcagagatataacaaatctagcaatacttctacgaggagctcgccaccaccaaccgcctcgcagataacagttgttctcgatcggcagcccgatatcccaacgtcggcatctcagatgacggtggtaccctatgcgccaacaccaccctatgctccaacatacaattctgtaccgtccgacgacgagatctatggtccggaacgatactcgggtcactatcaccatgctcccattcccaatttcacttcaacggcttcaacgcctgcgccatctgtgcgtttcaacccgacagctttcatggcgggaaatcaatcagatcctttggcacagagagacttcaaggatgagctcacgagagctgctggagtagtcacgcccggagtatctgacgttccttacatccaatacgcactcgaagccttgacacgccgtcctgaagacgctcagggaacgtcgggaaatacatcttctgaaagcgatggcacacccatcgcaaggcatcaaattattccccaattcagcgtcaacatttctcgccctccggctgttcaccaacctccagttgctgtttatcacgacgaagaaatgaacgaggacgaagagagcattccagaacattggccactgccgccatcaaccaccaatattctagatgtagatcaacgacctgaagaacccttggccacagaaattccggtacccaagccggaacgagaaccgtcaccaaaacgtcgagactattggcaggagaatgcagaccggaatttcgagtatgtcaaacaattagccttgggcccacgcaaggtcatcgtcaatcaaagtccgccgcggacggttgatctttggcgggcgcaaccggacacgtttacaaagcaggatctcaaatcttggagataccctcaacggccatctaccctgacctacaaacccctcatcttgcgtactacctcactcttactactcttgttactctgtacattaatgataacggccttaattttttctgcgattttttccatcagccatgacgggtttacgacatacaaccacacgatttacggcgggcaatattttctgttcagagtattaccccaattagttggcgctttactactcatttatgcgcaatgcgtcatcgcagctgttttccgtgtataccccctctctgcaatggcttccaatgaccggaatgagcgacgaaacgctgttttcttgccactataccccaaatcatttctttggccacagcttgctggcccttggcccgtctggatacccacatttgtcgtctggctgctgaactttacgatccctctcctgagtactctgttcactgttgagctcgttgacggtgtctggacttggtcaaccgttcagggtgtggcgtggacgttagtggctgtatacatggtttttctcttcacgattgttgtaatagtgatctactggcgacaaaggaagacagggatgatggatagatgggagatccggagtctcgcggacatcatctatcttgtggcgcaaagcaactcgcttccacagtaccgcgggctcgagacagcagcttcacgccgggaaatgagggaagtacttgacggtacagctgagaggcttgggtattggactactcctgaggtccccgaaaacgccgtgttctggagctttggagtacccactacggaggcggatatcgaagtagagaaaagacaaagacaacaccaagataccgaacggaaagacttgcgctcgtcacagctcactgacgtggagaagcaggcacagccatacgttgtgcgatcccggtatcttccttggtgtttccgcgacggccagatcatcttcttcactgtagctggcacgatacttcttgtggcattgcttgttgtgtccttcatccccgcaactgatgttcgtggcggattcattccgggtgtgtctgcaggcccagtgagagggtctttctccgcagccgactttttgtactcttttctgccctcgctgctgggtcttattttgtttcttggattccagtctctggaccttacgcttcgcgttctggctccatggggagagttggcacgggaagaagggtctcgcgctgaaacctcgcttttcttggattacgctgcgtgcctaccgtggcaatgcacctacaaggcgctaaagaatcgacactggcgtgtggcattcgtctcattcctgtcgccgcttttcattctaatacccgtactcagcggtggtatctttatggctctaacctccgacgctggggtagtacggatgtaccctaatgtcgttatcttcagcctcattctcgcccttctattcttctatcttggcgggctggtcagcctcgtcccgaatcgaaaacgcttccgtctaccacacgccgtgacctgtctcgcggaagttctgagcttctgctgcaacgagcaattgcgcacagacgaggctttcgaacagaagaaggattttcttcagcgcagccagctgagagcatctcttggttgtggcaaagactggcatcgacagggtcgctggacttttggcagtggcctgaataatgaggagagactcggcatcaagcatctcgccaagttcacggtgaacagcaagaagctgaagcagtatgatcggcttgtccgggggaagcccatctctggacccctccctcaagacagcatatcgttgtttggccattagattgaagtgaacactgagagaagttcacagttggagactaagttgcttcatgattcaaagacgatctcattaggtccgcacgatttgacgactgaggggacgatgtaagaacatttatgcacataatgcaatatggacatgttttacggtaatggacatggtttaacggtttatgggaaatgggatttggaattgaggagttcggtttggttttgatggcttacaacaaaatgacaggatcagtcatgaggcctgaggttatggcgttacgagatacggtttagaatgaggcactcgtgtgcatgcggtatgtaattgaataaataaacctccgcgacggcaacggaggttatgaggtggcgtggaagtacgctgactgcgccctaccaattatcatggcgtaacaagcctgtctcatatcatgcacgcgacgataccggtgtttgcggtggtagttgccacccgcttacccgccttatgaagaatcccctcgagtcatcccacacttctggcaggagatcgagctaatatttatttctcatcgccg

SEQ ID NO: 34636 - DNA, 1017 bp, Muscodor strobelii
  misc_feature: SGI cDNA ID NO. 571976
  misc_feature: Reduced expression when VOC is produced
  misc_feature: Encodes the peptide sequence at SEQ ID NO 34637
atggctatcaagatcggtatcaatggtttcggccgcatcggacgtctcgtcctccgcgctgctctcgagcgcagcgacgtccaggtcgtcgccgtcaacgaccctttcattgacaccgagtatgccgtctacatgctcaagtatgactccactcacggccagtacaagggcactgtctccaaggagggcgccaacaagctcgtcgtcgatggcaaggccatctctttctacggcgagcgtgaccccgcggccatcccctggtccgagtccggcgctgagtacgtcgtcgagtccactggtgtcttcaccactcaggacaaggcctctgctcacttgaagggcggtgccaagaaggtcatcatctcggccccctctgctgacgctcccatgttcgtcgtcggtgtcaacgaggacaagtacaagtccgacatcaacgttctctctaacgcctcttgcaccaccaactgcttggctcccctcgccaaggtcatccacgagaagtatggtctcgaggagggtctcatgaccaccatccactcttacacggctacccagaagaccgtcgacggtccctctggcaaggactggagaggcggccgtgctgccgccaccaacatcattccctcttccactggtgccgctaaggccgtcggtaaggtcatccccgagctcaacggcaagctcaccggtatgtccatgcgtgtgcccacctccaatgtctccgttgtcgacttgacctgccgcctcaagactggcgctagctacgacgacatcaagaagaccatcaaggctgccgccgacggcgagctcaagggcatcatgagctacactgaggacgacatcgtctctagcgatctcaacggcgataagcactcttccatcttcgatgctaaggccggtatctccctcaacgacaacttcgtcaagcttgtctcctggtacgacaacgagaccggttactccaaccgtgtcatcgacctcatttcccacgtcgccaaggtctccggttccgcatga

SEQ ID NO: 34637 - protein, 338 aa, Muscodor strobelii
  misc_feature: SGI Peptide ID NO. 571976
  misc_feature (157)..(314): Pfam Id: PF02800 Pfam Desc: Glyceraldehyde 3-phosphate dehydrogenase, C-terminal domain
  misc_feature (3)..(152): Pfam Id: PF00044 Pfam Desc: Glyceraldehyde 3-phosphate dehydrogenase, NAD binding domain
  misc_feature (3)..(32): Pfam Id: PF01113 Pfam Desc: Dihydrodipicolinate reductase, N-terminus
  misc_feature (1)..(337): NCBI GI: 260918280 Blast Desc: glyceraldehyde 3-phosphate dehydrogenase [Penicillium canescens]
  misc_feature (3)..(337): NCBI GI: 46123759 Blast Desc: G3P_COLGL Glyceraldehyde 3-phosphate dehydrogenase (GAPDH) [Gibberella zeae PH-1]
  misc_feature (1)..(338): NCBI GI: 169597001 Blast Desc: SNOG_01278 [Phaeosphaeria nodorum SN15] gi|30580403|sp|Q9P8C0.1|G3P_PHANO RecName: Full=Glyceraldehyde-3-phosphate dehydrogenase; Short=GAPDH f. sp.
  misc_feature (1)..(338): NCBI GI: 34223326 Blast Desc: glyceraldehyde 3-phosphate dehydrogenase [Phaeosphaeria avenaria f. sp. triticae]
  misc_feature (1)..(338): NCBI GI: 195661028 Blast Desc: glyceraldehyde-3-phosphate dehydrogenase [Venturia inaequalis]
  misc_feature (1)..(334): NCBI GI: 145251966 Blast Desc: glyceraldehyde-3-phosphate dehydrogenase gpdA-Aspergillus niger gi|2494634|sp|Q12552.2|G3P_ASPNG RecName: Full=Glyceraldehyde-3-phosphate dehydrogenase; Short=GAPDH niger]
  misc_feature (3)..(337): NCBI GI: 256732953 Blast Desc: glyceraldehyde-3-phosphate dehydrogenase [Nectria haematococca mpVI 77-13-4]
  misc_feature (1)..(338): NCBI GI: 120691 Blast Desc: G3P_CURLU RecName: Full=Glyceraldehyde-3-phosphate dehydrogenase; Short=GAPDH gi|2601|emb|CAA41554.1| glyceraldehyd-3-phosphate dehydrogenase [Cochliobolus lunatus]
  misc_feature (4)..(334): NCBI GI: 30316336 Blast Desc: G3P_MONAN RecName: Full=Glyceraldehyde-3-phosphate dehydrogenase; Short=GAPDH gi|27497368|emb|CAA92807.3| glyceraldehyde-3-phosphate dehydrogenase [Monascus purpureus]
  misc_feature (4)..(334): NCBI GI: 115490909 Blast Desc: glyceraldehyde-3-phosphate dehydrogenase [Monascus pilosus]
  misc_feature (1)..(338): SWISSPROT Homolog: EC 1.2.1.12 Glyceraldehyde-3-phosphate dehydrogenase (phosphorylating)
  misc_feature: Useful for introducing or modulating the production of volatile compounds
MAIKIGINGFGRIGRLVLRAALERSDVQVVAVNDPFIDTEYAVYMLKYDSTHGQYKGTVSKEGANKLVVDGKAISFYGERDPAAIPWSESGAEYVVESTGVFTTQDKASAHLKGGAKKVIISAPSADAPMFVVGVNEDKYKSDINVLSNASCTTNCLAPLAKVIHEKYGLEEGLMTTIHSYTATQKTVDGPSGKDWRGGRAAATNIIPSSTGAAKAVGKVIPELNGKLTGMSMRVPTSNVSVVDLTCRLKTGASYDDIKKTIKAAADGELKGIMSYTEDDIVSSDLNGDKHSSIFDAKAGISLNDNFVKLVSWYDNETGYSNRVIDLISHVAKVSGSA

SEQ ID NO: 34638 - DNA, 1780 bp, Muscodor strobelii
  misc_feature: SGI EST ID NO. CUFF.85526.0
  misc_feature: Variant of the nucleotide sequence at SEQ ID NO 34636
cggcacccgccaagctgcacaagaacagcttcatgggacaggcccctccaaggagtctcgacgctgcttggctccagctaaggcattgcatggctacctctacatgtagatgctagtagtttcctggcgcattgattaagttgcatgtccacatccatacttccatcgacctccgtaaggtagccataggtagaatcttgctaggagactacccctcgcccctctttcccatcaacaatctcgagcaaacagcccaccttgttggtcagcgcgttacccctccaaaatccctcaacgacattacataaagtgcccctccctctcaacattgcatctgaaaagcttcgtagtctccatttctaatctccatccagatataaacaaaactacagccctcttccatctcttctacctcgccaggaacatctcattataccctctctcctatacccgcacacataaccaccaacaccatggctatcaagatcggtatcaatggtttcggccgcatcggacgtctcgtcctccgcgctgctctcgagcgcagcgacgtccaggtcgtcgccgtcaacgaccctttcattgacaccgagtatgccgtctacatgctcaagtatgactccactcacggccagtacaagggcactgtctccaaggagggcgccaacaagctcgtcgtcgatggcaaggccatctctttctacggcgagcgtgaccccgcggccatcccctggtccgagtccggcgctgagtacgtcgtcgagtccactggtgtcttcaccactcaggacaaggcctctgctcacttgaagggcggtgccaagaaggtcatcatctcggccccctctgctgacgctcccatgttcgtcgtcggtgtcaacgaggacaagtacaagtccgacatcaacgttctctctaacgcctcttgcaccaccaactgcttggctcccctcgccaaggtcatccacgagaagtatggtctcgaggagggtctcatgaccaccatccactcttacacggctacccagaagaccgtcgacggtccctctggcaaggactggagaggcggccgtgctgccgccaccaacatcattccctcttccactggtgccgctaaggccgtcggtaaggtcatccccgagctcaacggcaagctcaccggtatgtccatgcgtgtgcccacctccaatgtctccgttgtcgacttgacctgccgcctcaagactggcgctagctacgacgacatcaagaagaccatcaaggctgccgccgacggcgagctcaagggcatcatgagctacactgaggacgacatcgtctctagcgatctcaacggcgataagcactcttccatcttcgatgctaaggccggtatctccctcaacgacaacttcgtcaagcttgtctcctggtacgacaacgagaccggttactccaaccgtgtcatcgacctcatttcccacgtcgccaaggtctccggttccgcatgactagagccaaggctgtagactgaagccggcctcaatattactaaatgttgatgtttggcaactcgattttgaagatggtatgaatcatgagtaattagtatgtggtaaacgcgactaaattcggcggaactggtagaaaacctcgtttgacctgtgctttggtgtggctgtcgataaataataataaaaatacctgataattatgacacttcattgcctcacttgcaagcgaagaaatttgtgaactgtatctactcaattggctacgttgcaatattcctgctcaatag

SEQ ID NO: 34639 - DNA, 906 bp, Muscodor strobelii
  misc_feature: SGI cDNA ID NO. 571977
  misc_feature: Encodes the peptide sequence at SEQ ID NO 34640
atggcaaaagagccaaaagacctcaaaccctacgggggcgatacatattggcttgcacctgctcgcaacttcaagtcatcagcgcggctacgtcttcagcattatctttgccagaacacaattggattcctcctcgatcctcgaatcgaacaaagtctcgtgaataccagaccgattgctatcgctgatattggctgtggtaacggggtgtggctagttgaattagagcgcgagctctccaggaagggcgttgcagctcggttggatgggtatgatatcaacgcggtcaatttccctgcttctgcttatcttcccgtatcaatctcgctcaagcaattcgatgtgctatctacttggccggaggaccttgttggtatttatgacgtggtccatattcgtggtcttgcgagtcttgtcgtcgatttagacacagaacccctattatcctccgccttcgctcttctcaagcccggtggcataattcaatgggaagaaggtctcgccgagagacttcggattgatacgccgtctcctgatatctccacagaagcatgcgagaccattgcgcatatgctaaaggcaaacggcgaggctcgtggtcgcaaatatggctttgtcgagcaccttgataaacaccttattaagcacggtttcgaagatgtacagatacattcgtggggaaagccccagtacgatcttaaggcttggactgagaacttcctcatggtctgggatgagctctacatcaatttcccatctcagattgagcgtcctggggccctcatcactagggagaaatggttgggtatgtatgcagaggccgtaaaggagatagagcaaggagttgtaattcactatgggaaaatcatgactgccaccggacgcaaaactttgcgaagcttgtga

SEQ ID NO: 34640 - protein, 301 aa, Muscodor strobelii
  misc_feature: SGI Peptide ID NO. 571977
  misc_feature (62)..(161): Pfam Id: PF08242 Pfam Desc: Methyltransferase domain
  misc_feature (11)..(298): NCBI GI: 145252776 Blast Desc: An16g05930 [Aspergillus niger] gi|134083455|emb|CAK46933.1| protein product [Aspergillus niger]
  misc_feature (1)..(298): NCBI GI: 67527035 Blast Desc: AN3975.2 [Aspergillus nidulans FGSC A4] gi|40740256|gb|EAA59446.1| AN3975.2 [Aspergillus nidulans FGSC A4] gi|259481445|tpe|CBF74969.1| TPA: conserved [Aspergillus FGSC
  misc_feature (1)..(296): NCBI GI: 242827242 Blast Desc: conserved [Talaromyces stipitatus ATCC 10500] gi|218712048|gb|EED11476.1| conserved [Talaromyces stipitatus ATCC 10500]
  misc_feature (1)..(296): NCBI GI: 242811553 Blast Desc: conserved [Talaromyces stipitatus ATCC 10500] gi|218714112|gb|EED13535.1| conserved [Talaromyces stipitatus ATCC 10500]
  misc_feature (1)..(298): NCBI GI: 170940319 Blast Desc: protein product [Podospora anserina]
  misc_feature (22)..(288): NCBI GI: 70998775 Blast Desc: conserved [Aspergillus fumigatus Af293] gi|66851746|gb|EAL92071.1| conserved [Aspergillus fumigatus Af293] gi|159127128|gb|EDP52243.1| conserved [Aspergillus A1163]
  misc_feature (13)..(293): NCBI GI: 119489946 Blast Desc: NFIA_061940 [Neosartorya fischeri NRRL 181] gi|119411090|gb|EAW21033.1| conserved [Neosartorya fischeri NRRL 181]
  misc_feature (21)..(296): NCBI GI: 121701965 Blast Desc: conserved [Aspergillus clavatus NRRL 1] gi|119397390|gb|EAW07821.1| conserved [Aspergillus clavatus NRRL 1]
  misc_feature (23)..(299): NCBI GI: 115384358 Blast Desc: [Aspergillus terreus NIH2624] gi|114196418|gb|EAU38118.1| [Aspergillus terreus NIH2624]
  misc_feature (22)..(295): NCBI GI: 145240315 Blast Desc: An08g06890 [Aspergillus niger] gi|134077320|emb|CAK45659.1| protein product [Aspergillus niger]
MAKEPKDLKPYGGDTYWLAPARNFKSSARLRLQHYLCQNTIGFLLDPRIEQSLVNTRPIAIADIGCGNGVWLVELERELSRKGVAARLDGYDINAVNFPASAYLPVSISLKQFDVLSTWPEDLVGIYDVVHIRGLASLVVDLDTEPLLSSAFALLKPGGIIQWEEGLAERLRIDTPSPDISTEACETIAHMLKANGEARGRKYGFVEHLDKHLIKHGFEDVQIHSWGKPQYDLKAWTENFLMVWDELYINFPSQIERPGALITREKWLGMYAEAVKEIEQGVVIHYGKIMTATGRKTLRSL

SEQ ID NO: 34641 - DNA, 339 bp, Muscodor strobelii
  misc_feature: SGI cDNA ID NO. 571978
  misc_feature: Encodes the peptide sequence at SEQ ID NO 34642
atgcgcgcagcagttctctctctacttggcctcacggctttgacaacagcacagtgggaagattacggcgctctagtcattgagcgctacaccaattgctcgtctgctccctacaagaacacaaccgtcgtaccagaggatccttttgactaccggaacgacacactgttggcgcaagtctcgtccatctatcaggtcgaacctggtttcacatacttctgctttgcatccaaacccgatggaacttggtacagcgacgactggttcggtattggcaaaccattacatctgtcaaagcacaatgtgcctgtctcgtccatttcctgcagagtagaataa

SEQ ID NO: 34642 - protein, 112 aa, Muscodor strobelii
  misc_feature: SGI Peptide ID NO. 571978
MRAAVLSLLGLTALTTAQWEDYGALVIERYTNCSSAPYKNTTVVPEDPFDYRNDTLLAQVSSIYQVEPGFTYFCFASKPDGTWYSDDWFGIGKPLHLSKHNVPVSSISCRVE

SEQ ID NO: 34643 - DNA, 1843 bp, Muscodor strobelii
  misc_feature: SGI EST ID NO. CUFF.85582.0
  misc_feature: Variant of the nucleotide sequence at SEQ ID NO 34641
aaatgaggccccaagtctcgctcaccgtgactgattgaaggctgagttcacgataatagacgacgacttcaaatctccccttcctaccattattcgccagtcgcttgaaactctcaactaaaacaccacgattcgcccaacatgcgcgcagcagttctctctctacttggcctcacggctttgacaacagcacagtgggaagattacggcgctctagtcattgagcgctacaccaattgctcgtctgctccctacaagaacacaaccgtcgtaccagaggatccttttgactaccggaacgacacactgttggcgcaagtctcgtccatctatcaggtcgaacctggtttcacatacttctgctttgcatccaaacccgatggaacttggtacagcgacgactggttcggtattggcaaaccattacatctgtcaaagcacaatgtgcctgtctcgtccatttcctgcagagtagaataagtcaatcgattgaaaaggaaggcctaaagaaagttggagttggctgggcatctcggcgagttgggaacggtgatatcagttgtcaatttcgacctgctaggcttatggctctcggctatctgcaggccccagacatgtacatttggacctagagctcaccgaatgctcacagtgcgcgacgcttcggccaatcacaacacagcgccgtcttcccgagactcagaaaatggcgacgaacataacaataatgatagaaaccgatttctcaccatcctagtctgctaagaacattgaattttggcatgtttgccagaagatcgtcgttgttattgtgctgaacacctaccacctgactctacaaggttgtcatgatcaggtgcatatcaggttatatacttcacctgttgttgtatggcctatgaaagctacttaagatagtcaattcgaagtagctgccagaagggcgaatataacagaattgagtatcggcacggtacacagaagcttatcgatgagagatactcaggcgaaggattgaagtgcagcgatagtataataacgacactggatgtttcctcggagcctgtatgaggtggtaagatcttcgtgcgaacatacgcgaaagtcacgtagacttggctcgcgcatcgtcgtgtattttcatagtcctgtatcaacgcctagaagcaatagcttgacaaatgggcttgtgctccttgtgatgagcgacttgacattcacgaccacaatacctgactgccttacatctcccacacaaactcagcggccccgagtcttttccgcacttggcacacagcactggcgcggatgataaacttgcttcgatgctgacattcccactttccactgctgctaatagacttcccgctctcttcttcgctagcctgagtactcgctgttctcctagactgacataggccgcagcccatgcattgcctcccacaggatatgcatcattggcaagctgcttctctaacgtctccagttttatttcaaagccatcgagaatagcggagatagcttcttctaaaaatccgagaacttccgtttcatttgaacggctgacaatgcgcgatgctgcatttgcgcgttgaggcgctattgaagcaagttctgattcgtccaggcgctggatacgaaggtattgcaagactttttccggcagtggatcagtaagggtcagtgagatggtgggtgtcgaaccaagcgcggccaaatcccaaagcttaagcttctgctcatagagtggtgccgtcggatgagttgagagcacaaggtcataactgtcgttagggttgtctggaatgacaaagccatagaggcgtaaaagacgattgttggg

SEQ ID NO: 34644 - DNA, 1398 bp, Muscodor strobelii
  misc_feature: SGI cDNA ID NO. 571979
  misc_feature: Elevated expression when VOC is produced
  misc_feature: Encodes the peptide sequence at SEQ ID NO 34645
atggagagttggctaaagggtctaggggcgaagggcctagacagtctggcgcttgccgatttcccagttactgggcgcggtatccagactcgtcggagctttaaacaatgggacaagattttcaccatcccaaaagctgcgcttttgacggtaaagaaggcgtacgcagatcctttgatagggtcgactcttcgaacggctcagccatctttatccattgagaacatttttgttacatacatactttttatacagtcgcgcaaaacgggatacgaagggccgcgcgctcatattgccgcgctgcctcagagctattcctcgagtatcttcttcacagacgatgagctcaacatttgtgcaggatcttcgctctataacataacaaaacagctcgatttgcagatccagaatgactatagagaattagttatcagcgtgtttgctaaacacccagatcttttcccactggatctctttactatcgacagttataaatggggtctctgcactatatggagtcgcagcatggattttcaacagcccggcggggagtcgattcgactcttggcaccctttgcggacatgttgaatcactcacctgaggctaaacagtgccatgcctacgacttccaatccggggatctcacgattctcgctgggaaagattatcaagctctagatcaggtctatatctattatggagctattcccaacaatcgtcttttacgcctctatggctttgtcattccagacaaccctaacgacagttatgaccttgtgctctcaactcatccgacggcaccactctatgagcagaagcttaagctttgggatttggccgcgcttggttcgacacccaccatctcactgacccttactgatccactgccggaaaaagtcttgcaataccttcgtatccagcgcctggacgaatcagaacttgcttcaatagcgcctcaacgcgcaaatgcagcatcgcgcattgtcagccgttcaaatgaaacggaagttctcggatttttagaagaagctatctccgctattctcgatggctttgaaataaaactggagacgttagagaagcagcttgccaatgatgcatatcctgtgggaggcaatgcatgggctgcggcctatgtcagtctaggagaacagcgagtactcaggctagcgaagaagagagcgggaagtctattagcagcagtggaaagtgggaatgtcagcatcgaagcaagtttatcatccgcgccagtgctgtgtgccaagtgcggaaaagactcggggccgctgagtttgtgtgggagatgtaaggcagtcaggtattgtggtcgtgaatgtcaagtcgctcatcacaaggagcacaagcccatttgtcaagctattgcttctaggcgttga

SEQ ID NO: 34645 - protein, 465 aa, Muscodor strobelii
  misc_feature: SGI Peptide ID NO. 571979
  misc_feature (263)..(388): Pfam Id: PF09273 Pfam Desc: Rubisco LSMT substrate-binding
  misc_feature (8)..(240): Pfam Id: PF00856 Pfam Desc: SET domain
  misc_feature (420)..(458): Pfam Id: PF01753 Pfam Desc: MYND finger
  misc_feature (1)..(464): NCBI GI: 164423408 Blast Desc: NCU08733 [Neurospora crassa OR74A] gi|157070080|gb|EAA34358.2| conserved [Neurospora crassa OR74A]
  misc_feature (1)..(464): NCBI GI: 12718364 Blast Desc: related to histone-lysine N-methyltransferase [Neurospora crassa]
  misc_feature (1)..(464): NCBI GI: 240278777 Blast Desc: conserved [Ajellomyces capsulatus H143]
  misc_feature (1)..(465): NCBI GI: 238845691 Blast Desc: conserved [Microsporum canis CBS 113480]
  misc_feature (1)..(464): NCBI GI: 258563540 Blast Desc: conserved [Uncinocarpus reesii 1704] gi|237908022|gb|EEP82423.1| conserved [Uncinocarpus reesii 1704]
  misc_feature (1)..(455): NCBI GI: 116197927 Blast Desc: CHGG_07119 [Chaetomium globosum CBS 148.51] gi|88178398|gb|EAQ85866.1| CHGG_07119 [Chaetomium globosum CBS 148.51]
  misc_feature (4)..(439): NCBI GI: 225561342 Blast Desc: conserved [Ajellomyces capsulatus G186AR]
  misc_feature (1)..(464): NCBI GI: 171678927 Blast Desc: protein product [Podospora anserina] gi|170937534|emb|CAP62192.1| protein product [Podospora anserina]
  misc_feature (26)..(357): NCBI GI: 262105865 Blast Desc: conserved [Phytophthora infestans T30-4]
  misc_feature (24)..(352): NCBI GI: 219121061 Blast Desc: ribulose-1,5-bisphosphate carboxylase/oxygenase small subunit N-methyltransferase I [Phaeodactylum tricornutum CCAP 1055/1] gi|209582611|gb|ACI65232.1| ribulose-1,5-bisphosphate I
  misc_feature (4)..(389): SWISSPROT Homolog: EC 2.1.1.127 [Ribulose-bisphosphate carboxylase]-lysine N-methyltransferase
  misc_feature: Useful for introducing or modulating the production of volatile compounds
MESWLKGLGAKGLDSLALADFPVTGRGIQTRRSFKQWDKIFTIPKAALLTVKKAYADPLIGSTLRTAQPSLSIENIFVTYILFIQSRKTGYEGPRAHIAALPQSYSSSIFFTDDELNICAGSSLYNITKQLDLQIQNDYRELVISVFAKHPDLFPLDLFTIDSYKWGLCTIWSRSMDFQQPGGESIRLLAPFADMLNHSPEAKQCHAYDFQSGDLTILAGKDYQALDQVYIYYGAIPNNRLLRLYGFVIPDNPNDSYDLVLSTHPTAPLYEQKLKLWDLAALGSTPTISLTLTDPLPEKVLQYLRIQRLDESELASIAPQRANAASRIVSRSNETEVLGFLEEAISAILDGFEIKLETLEKQLANDAYPVGGNAWAAAYVSLGEQRVLRLAKKRAGSLLAAVESGNVSIEASLSSAPVLCAKCGKDSGPLSLCGRCKAVRYCGRECQVAHHKEHKPICQAIASRR

SEQ ID NO: 34646 - DNA, 2328 bp, Muscodor strobelii
  misc_feature: SGI cDNA ID NO. 571980
  misc_feature: Elevated expression when VOC is produced
  misc_feature: Encodes the peptide sequence at SEQ ID NO 34647
atgtcgggggcagatattcttgccactttgaatgtcctaattaagctgggatttgagatcatggatcgacttgactctctcgatcgagccgccgaggatcttcaacttctaaatagcagtctcgaactcttgctgaagttgttcgcaaatccagcaaaccaaaatatcatcgagacacatccgacagagtttcttactatcctcaacatcttacagagtatcgtgcattcttacacaaaatttgcgaaagccctgaatctcagctcttctggtgctaacaatacacgcaagacgactttggagcggggcaggggagctgttcgacgattatggacattcatgaatattccagatatccttgccgatattgagcgcaaagcagatcagctcgagcgaatatacaacgtagtatctgccgtcatgctagacgatttgagaacgcaagagaagcgagacaaagagggagcagaggctcgcaaaacaaccactgatactatcaagaagccgatcacttcaaccgatgatttgatttcccaaggtcgcgataccaattttgccaacattgatattgtgatgggaaatctcgtttcggaatgtaaagcccttcgtgagcggctccgaaagacgactttgtttcccgatacctcgacagcgcaagtctatcaaacgcagaatccagaggctgtatcattttggaaggatcgattccagaaacccgaattgaatgcgtcggctcttcgctatgaggctttctatgtttcctgggcacgtttcgttcacgaaattgagaaatctttctctcttaagagaatacctacagcgttctttccgaatggagatattgatttggttcgcaaacaaggatctcgatacatgatagatcataacggcacacgctgtctctcgatgatacgacctctctggctgccagcgcttcgaagtaccctcgacccgctacataagggctatgtaaagcctcaagaatatttcgaaatgcttcgcgaatcatctttgtatgatattcttagagaaatcacgctaaagaacgcaggctacggcattgttgtagaatgcgaaagggcatcagcggatattgccctgccagctgttattgagtcacccaccgaccatgtcggctggattgctgctcagatcgtcgccgttcccacacctgatgaactgggaatcgcgagtgagcaggagatcgtgaatttgagcagtgatgatctatttgctcgtttcagcaacatcactcaagatatttattttcatgtacgctatctccagacggggcaaatcgagcgcaaaagtctatcaaagcaaatccgccctcgcggtagcatcgccattggggcaacaatttctgtaaagcaagaaattgaatctggcaactatgcttggagccatgacttccatataactgagttcaggccgtgctctgggggtcaatatgttgtgacagccggcgctggttcaggggctcattcgaccactattgtttttaagacgaggccaatcgaaggtgcatttcaagatgcaatgcacgactttcatcgccgatcagcgattgacgtccctgggctcgattatatgcttctaggttcctcggatgtgttcatcaacccaccgaggatcggtgaaaagatccagatcgaattcgatggactgtggtacgattcaagagtagtagcagtggacggtgatgagatcgagtacacttattggaacacaccaccggagcagacaccaaatactgaagccgatactaggacaagtgaagaggatggcgacttcttcttcttcccggaagagcatttgactgatctcgggaagggtgtcagacgagtgtggagatcatggcgagacaatgactgcagatttcactccgtgcgaccgtatcagtgcctgcatataggtgatttcgtcgaagcacccgttatgtatccggactatcggttccattatcatacgatcgagaactcacagctctttctccctgcacgaatcattgacgtccatagtgacgagtacaccattgaattcagtccctcattctcggcatatgcatggtggccgggacggataccaagaggccagcaaatagagctggtgccgggatcaggggtcaaaatcaacaatccattcgattctaatcgcgtcacgttagacatgaacagggtacgccctttcttcccgggaccacggccagtcttgggtattcaatccgcgaaacccaccggttggagctcattccaaggtatccatcttcggaatctcgaagctcttacagaacggagtatttggaatgatcaagaggagacaatttga

SEQ ID NO: 34647 - protein, 775 aa, Muscodor strobelii
  misc_feature: SGI Peptide ID NO. 571980
  misc_feature (1)..(774): NCBI GI: 171678929 Blast Desc: protein product [Podospora anserina] gi|170937535|emb|CAP62193.1| protein product [Podospora anserina]
  misc_feature (1)..(770): NCBI GI: 238845692 Blast Desc: conserved [Microsporum canis CBS 113480]
  misc_feature (350)..(774): NCBI GI: 145605026 Blast Desc: MGG_13691 [Magnaporthe grisea 70-15] gi|145012911|gb|EDJ97552.1| MGG_13691 [Magnaporthe grisea 70-15]
  misc_feature (473)..(770): NCBI GI: 85110709 Blast Desc: NCU08732 [Neurospora crassa OR74A] gi|16944605|emb|CAD11376.1| [Neurospora crassa] gi|28925278|gb|EAA34357.1| [Neurospora crassa OR74A]
  misc_feature (16)..(252): NCBI GI: 145605026 Blast Desc: MGG_13691 [Magnaporthe grisea 70-15] gi|145012911|gb|EDJ97552.1| MGG_13691 [Magnaporthe grisea 70-15]
  misc_feature: Useful for introducing or modulating the production of volatile compounds
MSGADILATLNVLIKLGFEIMDRLDSLDRAAEDLQLLNSSLELLLKLFANPANQNIIETHPTEFLTILNILQSIVHSYTKFAKALNLSSSGANNTRKTTLERGRGAVRRLWTFMNIPDILADIERKADQLERIYNVVSAVMLDDLRTQEKRDKEGAEARKTTTDTIKKPITSTDDLISQGRDTNFANIDIVMGNLVSECKALRERLRKTTLFPDTSTAQVYQTQNPEAVSFWKDRFQKPELNASALRYEAFYVSWARFVHEIEKSFSLKRIPTAFFPNGDIDLVRKQGSRYMIDHNGTRCLSMIRPLWLPALRSTLDPLHKGYVKPQEYFEMLRESSLYDILREITLKNAGYGIVVECERASADIALPAVIESPTDHVGWIAAQIVAVPTPDELGIASEQEIVNLSSDDLFARFSNITQDIYFHVRYLQTGQIERKSLSKQIRPRGSIAIGATISVKQEIESGNYAWSHDFHITEFRPCSGGQYVVTAGAGSGAHSTTIVFKTRPIEGAFQDAMHDFHRRSAIDVPGLDYMLLGSSDVFINPPRIGEKIQIEFDGLWYDSRVVAVDGDEIEYTYWNTPPEQTPNTEADTRTSEEDGDFFFFPEEHLTDLGKGVRRVWRSWRDNDCRFHSVRPYQCLHIGDFVEAPVMYPDYRFHYHTIENSQLFLPARIIDVHSDEYTIEFSPSFSAYAWWPGRIPRGQQIELVPGSGVKINNPFDSNRVTLDMNRVRPFFPGPRPVLGIQSAKPTGWSSFQGIHLRNLEALTERSIWNDQEETI

SEQ ID NO: 34648 - DNA, 1191 bp, Muscodor strobelii
  misc_feature: SGI cDNA ID NO. 571981
  misc_feature: Encodes the peptide sequence at SEQ ID NO 34649
atggcttctcaaagaatgtggaaaattggtcaggggctcgagactctatctagacgggttgcattcaggaacccaggaagcctgaatgacctcaaacttctctcacaacaagctgcggattcatcacattatccgctagccaacaccttcaaggccagtattccgcattacgatctgtcaactgtgtctcgagaggcagattcggtaccccagctccaagacgagtggtatcacgtgcttaactcgggacctggtgttttgattttacagaatttcgccgagctcgagcatctcaagcaagcgaataaagtgttcgacaaaatcatcgaaaaagaggctatgtcgtcgaaaggcgaccacttcgcagcctcaggtgcgaactcccgtatttggaactcattccaaaaacacgccctggaggacccagcaagcttcgtcaaatactactccaactcctggcttgcaaaaatatgcgaagcgtggctaggaccaggctatcaagtaaccgcacaggtgaatgtcgtgagacctggtggaaagcctcagaatccgcaccgggactatcacttgggatttcagaccaacgaggcatgcgcacaatacccaagaagtgcgcactttacgagtcaatacttgaccttacagggtgccgtcgcacattctgatatgcctctcgcaagcgggccgacgagattcttgcccttttcccaactactatccgaggggtatatggcgtggcgcgatccggaagtcgcagaattctttgagaaaaactgggttagcgtcccattgaacatcggtgacgctgtattcttcaacccagctcttatccatgcagctggcgagaacacgaccacggatgtgcagagaagtgcaaatcttttgcaaattagtagtgctttcggacgtgcgatggagcacgtcaatacgccaaagatcattaaagcttgttgggatgacttggccaggctattcgaggccgaaggagagagcgagcgagtcaacgcatgtgtgacagcaataggcgaggcctatcccttcccttcgaaccttgatattcgacaaccagggcctggaggcatggcacccacatcagaagtcgatgtcttatgggaaggccttaggcaaagctggacaacggttaagatcgtacaagctattgaccagctcaagattgactctcagtactag

SEQ ID NO: 34649 - protein, 396 aa, Muscodor strobelii
  misc_feature: SGI Peptide ID NO. 571981
  misc_feature (79)..(292): Pfam Id: PF05721 Pfam Desc: Phytanoyl-CoA dioxygenase (PhyH)
  misc_feature (159)..(292): Pfam Id: PF05721 Pfam Desc: Phytanoyl-CoA dioxygenase (PhyH)
  misc_feature (14)..(395): NCBI GI: 255711917 Blast Desc: KLTH0C00286p [Lachancea thermotolerans] gi|238933620|emb|CAR21803.1| KLTH0C00286p [Lachancea thermotolerans]
  misc_feature (28)..(395): NCBI GI: 255950154 Blast Desc: Pc22g19410 [Penicillium chrysogenum Wisconsin 54-1255] gi|211592861|emb|CAP99229.1| Pc22g19410 [Penicillium chrysogenum Wisconsin 54-1255]
  misc_feature (17)..(394): NCBI GI: 238493473 Blast Desc: phytanoyl-CoA dioxygenase family protein [Aspergillus flavus NRRL3357] gi|220696467|gb|EED52809.1| phytanoyl-CoA dioxygenase family protein [Aspergillus flavus NRRL3357]
  misc_feature (17)..(394): NCBI GI: 169783642 Blast Desc: [Aspergillus oryzae RIB40] gi|83775027|dbj|BAE65150.1| protein product [Aspergillus oryzae]
  misc_feature (22)..(394): NCBI GI: 71001228 Blast Desc: phytanoyl-CoA dioxygenase family protein [Aspergillus fumigatus Af293] gi|66852933|gb|EAL93257.1| phytanoyl-CoA dioxygenase family protein [Aspergillus fumigatus Af293] family
  misc_feature (22)..(394): NCBI GI: 119480851 Blast Desc: phytanoyl-CoA dioxygenase family protein [Neosartorya fischeri NRRL 181] gi|119408608|gb|EAW18557.1| phytanoyl-CoA dioxygenase family protein [Neosartorya fischeri NRRL 181]
  misc_feature (28)..(394): NCBI GI: 121715320 Blast Desc: phytanoyl-CoA dioxygenase family protein [Aspergillus clavatus NRRL 1] gi|119403426|gb|EAW13843.1| phytanoyl-CoA dioxygenase family protein [Aspergillus clavatus NRRL 1]
  misc_feature (28)..(390): NCBI GI: 67539762 Blast Desc: AN6051.2 [Aspergillus nidulans FGSC A4] gi|40738836|gb|EAA58026.1| AN6051.2 [Aspergillus nidulans FGSC A4] gi|259479764|tpe|CBF70284.1| TPA: phytanoyl-CoA dioxygenase
  misc_feature (27)..(394): NCBI GI: 115395876 Blast Desc: conserved [Aspergillus terreus NIH2624] gi|114193146|gb|EAU34846.1| conserved [Aspergillus terreus NIH2624]
  misc_feature (27)..(395): NCBI GI: 145252720 Blast Desc: An16g05650 [Aspergillus niger] gi|134083427|emb|CAK46905.1| protein product [Aspergillus niger]
MASQRMWKIGQGLETLSRRVAFRNPGSLNDLKLLSQQAADSSHYPLANTFKASIPHYDLSTVSREADSVPQLQDEWYHVLNSGPGVLILQNFAELEHLKQANKVFDKIIEKEAMSSKGDHFAASGANSRIWNSFQKHALEDPASFVKYYSNSWLAKICEAWLGPGYQVTAQVNVVRPGGKPQNPHRDYHLGFQTNEACAQYPRSAHFTSQYLTLQGAVAHSDMPLASGPTRFLPFSQLLSEGYMAWRDPEVAEFFEKNWVSVPLNIGDAVFFNPALIHAAGENTTTDVQRSANLLQISSAFGRAMEHVNTPKIIKACWDDLARLFEAEGESERVNACVTAIGEAYPFPSNLDIRQPGPGGMAPTSEVDVLWEGLRQSWTTVKIVQAIDQLKIDSQY

SEQ ID NO: 34650 - DNA, 1495 bp, Muscodor strobelii
  misc_feature: SGI EST ID NO. CUFF.85600.0
  misc_feature: Variant of the nucleotide sequence at SEQ ID NO 34648
aaccagctctggatttcaatgcgatggatttcgaaacccgaaatctcgctgctggacccagaaagagtccctttgatcttctctgcgtctcttccttgattctacagcgtcggcgtgcagctttcgtctacacatgagagcagcgtttcccactgctatctagatatattatcgtcgtgtcatagcatctggcttgacaagattccacaaacaaaatggcttctcaaagaatgtggaaaattggtcaggggctcgagactctatctagacgggttgcattcaggaacccaggaagcctgaatgacctcaaacttctctcacaacaagctgcggattcatcacattatccgctagccaacaccttcaaggccagtattccgcattacgatctgtcaactgtgtctcgagaggcagattcggtaccccagctccaagacgagtggtatcacgtgcttaactcgggacctggtgttttgattttacagaatttcgccgagctcgagcatctcaagcaagcgaataaagtgttcgacaaaatcatcgaaaaagaggctatgtcgtcgaaaggcgaccacttcgcagcctcaggtgcgaactcccgtatttggaactcattccaaaaacacgccctggaggacccagcaagcttcgtcaaatactactccaactcctggcttgcaaaaatatgcgaagcgtggctaggaccaggctatcaagtaaccgcacaggtgaatgtcgtgagacctggtggaaagcctcagaatccgcaccgggactatcacttgggatttcagaccaacgaggcatgcgcacaatacccaagaagtgcgcactttacgagtcaatacttgaccttacagggtgccgtcgcacattctgatatgcctctcgcaagcgggccgacgagattcttgcccttttcccaactactatccgaggggtatatggcgtggcgcgatccggaagtcgcagaattctttgagaaaaactgggttagcgtcccattgaacatcggtgacgctgtattcttcaacccagctcttatccatgcagctggcgagaacacgaccacggatgtgcagagaagtgcaaatcttttgcaaattagtagtgctttcggacgtgcgatggagcacgtcaatacgccaaagatcattaaagcttgttgggatgacttggccaggctattcgaggccgaaggagagagcgagcgagtcaacgcatgtgtgacagcaataggcgaggcctatcccttcccttcgaaccttgatattcgacaaccagggcctggaggcatggcacccacatcagaagtcgatgtcttatgggaaggccttaggcaaagctggacaacggttaagatcgtacaagctattgaccagctcaagattgactctcagtactaggcgtaaggatacataggatgaatgaaacactttgtatgcccggtagtaccaaatacaatcgacctttgaaaaataccatctgttcaaga

SEQ ID NO: 34651 - DNA, 1425 bp, Muscodor strobelii
  misc_feature: SGI cDNA ID NO. 571982
  misc_feature: Encodes the peptide sequence at SEQ ID NO 34652
atgtcttcagctgcgaacacatcgcgatcaggcagtaatggcgtcgatgcctacggcgagagtgataaaagaccgccccaatggcccctttccttccagattcagaagcctttgtggagttatgaaatgtaccgcgggcccgcaggccaagcgccggaagtcatttattgcgcatcgaaagatgagtccgaaagacatgcgagcaaatttctgcgtgagaagatcgtaggttttggtgtggaatgggtgaactggtacgggccgcctcctgaagatgagcgattgcaagatagagtcagtttgatacaagtggcaagcgaagagaagatcgtcctgttccatatcgcagcacatacgggcgacaagccggaagactttctcgcgccttctctgagaaaaatcattgaatcgccaagcattcttaaggccacgtctggagttctgagagatttcgacagactagagacgaccttcaaagacttgggcctcaagccacggggcgctattgatctgagtcatttgcataatcttgtcacttacggcgccgggagctctgatcaattaaagaagtgcacaactaagcccttcccattcgttaagcagatcgaaacgcattttggtctacctttcgaaaaagaaaaggaatcgacaggttggagcgaaaaatatttgacgaaggagcagcaggcacgtgcagcatctgacgcctatgctggtcttatgctgtaccattatcttgaatccaaacgagctaccatggcaaagaagccacctcgacttctcaatgccgacctatatccgtggttcaaatacgaacgaggcgtaggcaccaagattctcctcgtagtgggcacaaagaaagatgaaaccactgaaacaatcacggtaatcacggcgaaagattatctagaagacaaaagtgataaaaagtggcatagggtcttcaaacgtattgatgagaatcctgagactagtggtgagcgaagacaggaaacacagcccgagatcgtcggtgcaggtgacgcggtgggagagcgactcgccgagaggggtcaggacgcagcttccctagagaaggaacatgtatcaggttccgaagcaatgcggatcataccggcaccaacgacgccgccgaggcagccgccactaaccactggtttgactataacgatggcgaagacgagcttttctggctttggcacagagtccgagccgttaatgctcgccgactccagtgatgaagactgcaagaccgagataccagacgagaaccatagtcaactcagtacgccgtctaagccacaaaaacggaaacgatcagagcagcagcctgatagtcctcgccatggccgtgtcagagcaagcgactactggagtgtcaagaaggagcaggagatggcgaaagtcgaaaacgagtcgggataa

SEQ ID NO: 34652 - protein, 474 aa, Muscodor strobelii
  misc_feature: SGI Peptide ID NO. 571982
  misc_feature (39)..(293): NCBI GI: 169615583 Blast Desc: SNOG_10950 [Phaeosphaeria nodorum SN15] gi|111060329|gb|EAT81449.1| SNOG_10950 [Phaeosphaeria nodorum SN15]
  misc_feature (38)..(265): NCBI GI: 119482642 Blast Desc: 3'-5' exonuclease/helicase (Wrn), [Neosartorya fischeri NRRL 181] gi|119409504|gb|EAW19452.1| 3'-5' exonuclease/helicase (Wrn), [Neosartorya fischeri NRRL 181]
  misc_feature (38)..(265): NCBI GI: 145247947 Blast Desc: An13g00810 [Aspergillus niger] gi|134080969|emb|CAK41483.1| protein product [Aspergillus niger]
  misc_feature (39)..(258): NCBI GI: 121711303 Blast Desc: 3'-5' exonuclease/helicase (Wrn), [Aspergillus clavatus NRRL 1] gi|119401418|gb|EAW11841.1| 3'-5' exonuclease/helicase (Wrn), [Aspergillus clavatus NRRL 1]
  misc_feature (38)..(265): NCBI GI: 70987206 Blast Desc: 3'-5' exonuclease/helicase (Wrn) [Aspergillus fumigatus Af293] gi|66846712|gb|EAL87044.1| 3'-5' exonuclease/helicase (Wrn), [Aspergillus fumigatus Af293] 3'-5'
  misc_feature (20)..(258): NCBI GI: 242775502 Blast Desc: 3'-5' exonuclease/helicase (Wrn), [Talaromyces stipitatus ATCC 10500] gi|218722276|gb|EED21694.1| 3'-5' exonuclease/helicase (Wrn), [Talaromyces stipitatus ATCC 10500]
  misc_feature (38)..(265): NCBI GI: 115395196 Blast Desc: [Aspergillus terreus NIH2624] gi|114193054|gb|EAU34754.1| [Aspergillus terreus NIH2624]
  misc_feature (38)..(258): NCBI GI: 212532415 Blast Desc: 3'-5' exonuclease/helicase (Wrn), [Penicillium marneffei ATCC 18224] gi|210071728|gb|EEA25817.1| 3'-5' exonuclease/helicase (Wrn), [Penicillium marneffei ATCC 18224]
  misc_feature (39)..(258): NCBI GI: 239614893 Blast Desc: 3'-5' exonuclease/helicase [Ajellomyces dermatitidis ER-3]
  misc_feature (39)..(258): NCBI GI: 261190752 Blast Desc: 3'-5' exonuclease/helicase [Ajellomyces dermatitidis SLH14081] gi|239591208|gb|EEQ73789.1| 3'-5' exonuclease/helicase [Ajellomyces dermatitidis SLH14081]
MSSAANTSRSGSNGVDAYGESDKRPPQWPLSFQIQKPLWSYEMYRGPAGQAPEVIYCASKDESERHASKFLREKIVGFGVEWVNWYGPPPEDERLQDRVSLIQVASEEKIVLFHIAAHTGDKPEDFLAPSLRKIIESPSILKATSGVLRDFDRLETTFKDLGLKPRGAIDLSHLHNLVTYGAGSSDQLKKCTTKPFPFVKQIETHFGLPFEKEKESTGWSEKYLTKEQQARAASDAYAGLMLYHYLESKRATMAKKPPRLLNADLYPWFKYERGVGTKILLVVGTKKDETTETITVITAKDYLEDKSDKKWHRVFKRIDENPETSGERRQETQPEIVGAGDAVGERLAERGQDAASLEKEHVSGSEAMRIIPAPTTPPRQPPLTTGLTITMAKTSFSGFGTESEPLMLADSSDEDCKTEIPDENHSQLSTPSKPQKRKRSEQQPDSPRHGRVRASDYWSVKKEQEMAKVENESG

SEQ ID NO: 34653 - DNA, 527 bp, Muscodor strobelii
  misc_feature: SGI EST ID NO. CUFF.85610.0
  misc_feature: Variant of the nucleotide sequence at SEQ ID NO 34651
agcgactcgccgagaggggtcaggacgcagcttccctagagaaggaacatgtatcaggttccgaagcaatgcggatcataccggcaccaacgacgccgccgaggcagccgccactaaccactggtttgactataacgatggcgaagacgagcttttctggctttggcacagagtccgagccgttaatgctcgccgactccagtgatgaagactgcaagaccgagataccagacgagaaccatagtcaactcagtacgccgtctaagccacaaaaacggaaacgatcagagcagcagcctgatagtcctcgccatggccgtgtcagagcaagcgactactggagtgtcaagaaggagcaggagatggcgaaagtcgaaaacgagtcgggataaaaagaatggtatgagctgtagttacttctgcgatcataagaagacacattcttcccgtgaacagccgaaactagttgcgatagtttcgacagcaatgaaattttatatgtgtccaaacatcttggacattgccca

SEQ ID NO: 34654 - DNA, 1137 bp, Muscodor strobelii
  misc_feature: SGI cDNA ID NO. 571983
  misc_feature: Reduced expression when VOC is produced
  misc_feature: Encodes the peptide sequence at SEQ ID NO 34655
atgcatgtgtcgttgctctcagccgtttgtggtgccgcgctggtggctgctcgcccaggactggttcaagacatcggaaatggcttcaatgggcccttggcgccattgatcaacgcgacgatgaaccacaatgctgttccattcgaagaagcaatcgagaagttcgccaatgtgcctaaagcacaatcaaacccagccacctatggggatggcccaacacaacaggagttagcaaagtctggaagtactggtaccaacttcaagacggatctgtcagctgccgactgcgcctcgagtcctaatatccgatatgaatgggatgactactcaacatcggacaaaaacgcattgatgtcagctttcaagtgtttgatgaacaagccaccttcaggcgcattccctcattcagcgagcagatgggaggatttcgctgctttgcaccagcaatatacaccaaacgtacactcaacccagacgaaaaggaatgcaaaattcttgctttggcaccggtacttcgtttggacattcgagcaagttctgcgctctgagtgtggcttcgaccgagctttcttctggtttgatgagaccaagcatgccggcgctttttcgagctcgaccgcattcagtgcgaactatcttggcagactgaatgctgaccatcactgcgtcacagacggtcagtttggtgggctcacagtgaatattgggcctggtgctggattccaaagtcgctgtcttgaccgggctggcaacagccaggcatctgctcagtgcaacactaactacgtcaattcgtgtatgtcgaactcgagatttgacgacttcgcgaactgcttcgaacttggaccgcattcatatggccactcgggcgtcgggggcgttggcggagacctatacgcgtcccctgatgaacccttcttctggttccatcacacctttgtggatcgcgtctatcgtgtctgggagctcgccgacaccaacactcgttataacaccctgtccggcacggacatcaacggaaaccccatcaccatggacacccagatcttcatgggcggcatccgacccgacacgactgtccgagaaatgatcaatactctctccggctcgacgctttgctaccgctataactattaa

SEQ ID NO: 34655 - protein, 378 aa, Muscodor strobelii
  misc_feature: SGI Peptide ID NO. 571983
  misc_feature (92)..(378): NCBI GI: 189191358 Blast Desc: conserved [Pyrenophora tritici-repentis Pt-1C-BFP] gi|187973624|gb|EDU41123.1| conserved [Pyrenophora tritici-repentis Pt-1C-BFP]
  misc_feature (57)..(378): NCBI GI: 225680996 Blast Desc: conserved [Paracoccidioides brasiliensis Pb03] gi|226292709|gb|EEH48129.1| conserved [Paracoccidioides brasiliensis Pb18]
  misc_feature (49)..(378): NCBI GI: 225562498 Blast Desc: conserved [Ajellomyces capsulatus G186AR]
  misc_feature (76)..(378): NCBI GI: 154279366 Blast Desc: [Ajellomyces capsulatus NAm1] gi|150412439|gb|EDN07826.1| [Ajellomyces capsulatus NAm1]
  misc_feature (49)..(378): NCBI GI: 240281068 Blast Desc: tyrosinase [Ajellomyces capsulatus H143]
  misc_feature (91)..(378): NCBI GI: 169622300 Blast Desc: SNOG_14370 [Phaeosphaeria nodorum SN15] gi|111057121|gb|EAT78241.1| SNOG_14370 [Phaeosphaeria nodorum SN15]
  misc_feature (70)..(378): NCBI GI: 226283985 Blast Desc: conserved [Paracoccidioides brasiliensis Pb01]
  misc_feature (93)..(378): NCBI GI: 261205108 Blast Desc: tyrosinase [Ajellomyces dermatitidis SLH14081] gi|239592350|gb|EEQ74931.1| tyrosinase [Ajellomyces dermatitidis SLH14081] gi|239611493|gb|EEQ88480.1| tyrosinase [Ajellomyces
  misc_feature (17)..(378): NCBI GI: 169596702 Blast Desc: SNOG_01119 [Phaeosphaeria nodorum SN15] gi|160701375|gb|EAT92614.2| SNOG_01119 [Phaeosphaeria nodorum SN15]
  misc_feature (92)..(378): NCBI GI: 145603725 Blast Desc: MGG_05862 [Magnaporthe grisea 70-15] gi|145011893|gb|EDJ96549.1| MGG_05862 [Magnaporthe grisea 70-15]
  misc_feature: Useful for introducing or modulating the production of volatile compounds
MHVSLLSAVCGAALVAARPGLVQDIGNGFNGPLAPLINATMNHNAVPFEEAIEKFANVPKAQSNPATYGDGPTQQELAKSGSTGTNFKTDLSAADCASSPNIRYEWDDYSTSDKNALMSAFKCLMNKPPSGAFPHSASRWEDFAALHQQYTPNVHSTQTKRNAKFLLWHRYFVWTFEQVLRSECGFDRAFFWFDETKHAGAFSSSTAFSANYLGRLNADHHCVTDGQFGGLTVNIGPGAGFQSRCLDRAGNSQASAQCNTNYVNSCMSNSRFDDFANCFELGPHSYGHSGVGGVGGDLYASPDEPFFWFHHTFVDRVYRVWELADTNTRYNTLSGTDINGNPITMDTQIFMGGIRPDTTVREMINTLSGSTLCYRYNY

SEQ ID NO: 34656 - DNA, 1800 bp, Muscodor strobelii
  misc_feature: SGI EST ID NO. CUFF.85620.0
  misc_feature: Variant of the nucleotide sequence at SEQ ID NO 34654
accacattaaccgagtaagctgatggaaatggaaagtattggattctaaaaatggtctgacgtagacatatataagcctatggcgatcccctaatgatttctgatcaattcgggagcgatcatctataatagcccttctctatatagggatttaatcgtaatatacttttaattactcgacaatatgcatgtgtcgttgctctcagccgtttgtggtgccgcgctggtggctgctcgcccaggactggttcaagacatcggaaatggcttcaatgggcccttggcgccattgatcaacgcgacgatgaaccacaatgctgttccattcgaagaagcaatcgagaagttcgccaatgtgcctaaagcacaatcaaacccagccacctatggggatggcccaacacaacaggagttagcaaagtctggaagtactggtaccaacttcaagacggatctgtcagctgccgactgcgcctcgagtcctaatatccgatatgaatgggatgactactcaacatcggacaaaaacgcattgatgtcagctttcaagtgtttgatgaacaagccaccttcaggcgcattccctcattcagcgagcagatgggaggatttcgctgctttgcaccagcaatatacaccaaacgtacactcaacccagacgaaaaggaatgcaaaattcttgctttggcaccggtacttcgtttggacattcgagcaagttctgcgctctgagtgtggcttcgaccgagctttcttctggtttgatgagaccaagcatgccggcgctttttcgagctcgaccgcattcagtgcgaactatcttggcagactgaatgctgaccatcactgcgtcacagacggtcagtttggtgggctcacagtgaatattgggcctggtgctggattccaaagtcgctgtcttgaccgggctggcaacagccaggcatctgctcagtgcaacactaactacgtcaattcgtgtatgtcgaactcgagatttgacgacttcgcgaactgcttcgaacttggaccgcattcatatggccactcgggcgtcgggggcgttggcggagacctatacgcgtcccctgatgaacccttcttctggttccatcacacctttgtggatcgcgtctatcgtgtctgggagctcgccgacaccaacactcgttataacaccctgtccggcacggacatcaacggaaaccccatcaccatggacacccagatcttcatgggcggcatccgacccgacacgactgtccgagaaatgatcaatactctctccggctcgacgctttgctaccgctataactattaacttgagccaactgtatctcgagcgcacgatggtaattttttcgcttgcagccttatgaaattggtttgggcgaagaatgaacatatacgggggcatcaatagaatatattgaatacatgaattgccatctgaaaattccgccggtgtcatatcttcgaggaagtgattacgtcaatgcatgtctcaaatcttggtggtgtgagaataccacgcacacatgcatggcccacgtgtctgttgtgtgcgtgagtgggtctcagactcatcttttcagtgcggttctctactgtagcttcttgctgtcatgtgatctataccatgacggatgcattacatctttgtatatccagccttgtttcctttgtacgaatactgatcaatttgatgagcacgaaatcagctatctgtaggggataaaagggtttggttacactgcaagacctaacgatctgacaatgactgcaaaactgacactcaac

SEQ ID NO: 34657 - DNA, 1191 bp, Muscodor strobelii
  misc_feature: SGI cDNA ID NO. 571984
  misc_feature: Encodes the peptide sequence at SEQ ID NO 34658
atgcatattccagccacgaaataccggcgaggtggccaaattttgagcctcctcaacggcgttcatctcgacaagggtctcgtatcgattggagccggtgcagcatgggatgctgtgaataaggtcgtacacgctgccggacttgggatcgcgggtgggcgcagcgggacgggaggcattggtgggttggcgttgacaggaggtctctcggtgttttcttctcgcgagggcttcatttgtgacaacatcattgagttcgaagttgtcgtagcctccggcgaggtcgttatcgctagcaagcacacaaatgccgaccttttcatggccttgaaaggtggcctgaacaacttcggtattgtgacacgctttgcaatgtcaacattcgacctcggctatttttggggtgggaatgtgctctatttcccttcgagttttcctgaccaaatcgttgctttggtaaaggaactcgaaaagacggatgctgaccctaatactcatctaatgattagtattgggtattctgcgaagatgatgggtggcgtcacggcttgcatgaacacggtctactacaccaaagatgtcgaggatacgccagcggtactagaaccatttatcaacatcacgccacaaattccccagcctggagtacctaagagactagatctgctgcagatggcaacctcccaagcagcaggcgtttcaaaccaggtacggtgtgtctatacgaacattaccgtcaaaccagacgttacaacgcttcaaactgccagcgacatttacaacagggccattgaacaagtcaagtcctgtagcggtctcgtctgctcgttcactctccagccgtatccggtttcaatgcttcagcgttctgttgcaaaagggggaaactctcttggcctagacccgtcaaccgcagctgtgtctgtactccttttgacctactgggacgacgagaaagacgacaagctcatatatagtacgataaaatcggcactagagcaggttcggatggtggcaatcgaacagcagactgcgttagattttatttatctcaactatgccgcagacttccaagatccaatcggttcttatggccctgaaaataagaaaaagctacaagacgtgagcaaaaagtacgatcctgattgcctcttccaaaagggagttccaggcggcttcaaattgttctga

SEQ ID NO: 34658 - protein, 396 aa, Muscodor strobelii
  misc_feature: SGI Peptide ID NO. 571984
  misc_feature (4)..(99): Pfam Id: PF01565 Pfam Desc: FAD binding domain
  misc_feature (9)..(99): Pfam Id: PF01565 Pfam Desc: FAD binding domain
  misc_feature (3)..(396): NCBI GI: 156061976 Blast Desc: SS1G_01102 [Sclerotinia sclerotiorum 1980] gi|154696440|gb|EDN96178.1| SS1G_01102 [Sclerotinia sclerotiorum 1980]
  misc_feature (15)..(396): NCBI GI: 171676794 Blast Desc: protein product [Podospora anserina] gi|170936464|emb|CAP61121.1| protein product [Podospora anserina]
  misc_feature (15)..(396): NCBI GI: 116203893 Blast Desc: CHGG_09830 [Chaetomium globosum CBS 148.51] gi|88175958|gb|EAQ83426.1| CHGG_09830 [Chaetomium globosum CBS 148.51]
  misc_feature (15)..(395): NCBI GI: 145257650 Blast Desc: An04g04440 [Aspergillus niger] gi|134058724|emb|CAK38708.1| protein product [Aspergillus niger]
  misc_feature (15)..(396): NCBI GI: 156061767 Blast Desc: SS1G_03029 [Sclerotinia sclerotiorum 1980] gi|154700430|gb|EDO00169.1| SS1G_03029 [Sclerotinia sclerotiorum 1980]
  misc_feature (18)..(395): NCBI GI: 169621795 Blast Desc: SNOG_14110 [Phaeosphaeria nodorum SN15] gi|160704626|gb|EAT78347.2| SNOG_14110 [Phaeosphaeria nodorum SN15]
  misc_feature (21)..(395): NCBI GI: 238845686 Blast Desc: FAD binding domain-containing protein [Microsporum canis CBS 113480]
  misc_feature (21)..(395): NCBI GI: 154296664 Blast Desc: BC1G_12740 [Botryotinia fuckeliana B05.10] gi|150843323|gb|EDN18516.1| BC1G_12740 [Botryotinia fuckeliana B05.10]
  misc_feature (15)..(395): NCBI GI: 242784825 Blast Desc: conserved [Talaromyces stipitatus ATCC 10500] gi|218720618|gb|EED20037.1| conserved [Talaromyces stipitatus ATCC 10500]
  misc_feature (15)..(395): NCBI GI: 154323027 Blast Desc: BC1G_00856 [Botryotinia fuckeliana B05.10] gi|150848190|gb|EDN23383.1| BC1G_00856 [Botryotinia fuckeliana B05.10]
MHIPATKYRRGGQILSLLNGVHLDKGLVSIGAGAAWDAVNKVVHAAGLGIAGGRSGTGGIGGLALTGGLSVFSSREGFICDNIIEFEVVVASGEVVIASKHTNADLFMALKGGLNNFGIVTRFAMSTFDLGYFWGGNVLYFPSSFPDQIVALVKELEKTDADPNTHLMISIGYSAKMMGGVTACMNTVYYTKDVEDTPAVLEPFINITPQIPQPGVPKRLDLLQMATSQAAGVSNQVRCVYTNITVKPDVTTLQTASDIYNRAIEQVKSCSGLVCSFTLQPYPVSMLQRSVAKGGNSLGLDPSTAAVSVLLLTYWDDEKDDKLIYSTIKSALEQVRMVAIEQQTALDFIYLNYAADFQDPIGSYGPENKKKLQDVSKKYDPDCLFQKGVPGGFKLF

SEQ ID NO: 34659 - DNA, 1053 bp, Muscodor strobelii
  misc_feature: SGI cDNA ID NO. 571985
  misc_feature: Encodes the peptide sequence at SEQ ID NO 34660
atggactactcgaatctctataaccaggccgaagggcgtaagactcgcatccttccattgccccaagaccgtcagctggcatacgcatgtaacggacccccgaagtcacgaattgtcgtcatattctacagtggcctcatgagcataggcgacgccgctaatgtaccggctccatgccgagcgatcggcgcacggtggatagcgccgactcccccaggcatgggaaaatcatcgagtcgcattgcgacaagtcctttcaatgagtctctcgcagaggacgtgaattatctcttatcgcatcactacaaggaggatgacatcgacgagatatacctcgcaggagggtcctatggcactgtccatgcccagatgctgtacggcgcgccatacgatgcatttccgtgggggcgaaagatcaaatgttgtctgcttcttgctggcttcgcgcccttaagacaccaccccacgtacaccaaagatcttggttggcagacatggatttctattgggccaccttcacgtttaccattccggccagctcagcgactattcaaatcgattgtttcctcacaaatgcagacgactgaggaggccaaaaagtttcttggccaaacattgttcgacaacatggacgatgaagagaagaatgcttttgacacatgggttgcaacaactaataggaatagagaacagttcatagagacgcaggctaagaacgctgtcgaatcttgtgagaattgggaagggttcatggaagcttccgatgttattcattcagattggggctttaccccagataagttggatgatgaacatgctctcaagcctgtgctcgtggtcagctcggagaaggacaacatgggaggcggaactaacgaatggttggcgtccaactacaagtccgcaagactgaagattatacctggcggacatatatcatctttgtatcaccaagatgagatctggacggaattgtttgagagtgggtactgtgttatcccaagtccaagacaagaactgacgtcatttcactcagtgactaagaccgtatga

SEQ ID NO: 34660 - protein, 350 aa, Muscodor strobelii
  misc_feature: SGI Peptide ID NO. 571985
  misc_feature (64)..(327): Pfam Id: PF00561 Pfam Desc: alpha/beta hydrolase fold
  misc_feature (186)..(279): NCBI GI: 238565965 Blast Desc: MPER_15990 [Moniliophthora perniciosa FA553] gi|215436505|gb|EEB86895.1| MPER_15990 [Moniliophthora perniciosa FA553]
MDYSNLYNQAEGRKTRILPLPQDRQLAYACNGPPKSRIVVIFYSGLMSIGDAANVPAPCRAIGARWIAPTPPGMGKSSSRIATSPFNESLAEDVNYLLSHHYKEDDIDEIYLAGGSYGTVHAQMLYGAPYDAFPWGRKIKCCLLLAGFAPLRHHPTYTKDLGWQTWISIGPPSRLPFRPAQRLFKSIVSSQMQTTEEAKKFLGQTLFDNMDDEEKNAFDTWVATTNRNREQFIETQAKNAVESCENWEGFMEASDVIHSDWGFTPDKLDDEHALKPVLVVSSEKDNMGGGTNEWLASNYKSARLKIIPGGHISSLYHQDEIWTELFESGYCVIPSPRQELTSFHSVTKTV

SEQ ID NO: 34661 - DNA, 683 bp, Muscodor strobelii
  misc_feature: SGI EST ID NO. CUFF.85625.0
  misc_feature: Variant of the nucleotide sequence at SEQ ID NO 34659
gctgtcgaatcttgtgagaattgggaagggttcatggaagcttccgatgttattcattcagattggggctttaccccagataagttggatgatgaacatgctctcaagcctgtgctcgtggtcagctcggagaaggacaacatgggaggcggaactaacgaatggttggcgtccaactacaagtccgcaagactgaagattatacctggcggacatatatcatctttgtatcaccaagatgagatctggacggaattgtttgagagtgggtactgtgttatcccaagtccaagacaagaactgacgtcatttcactcagtgactaagaccgtatgatgaatggttcttctaagttgagctcgctatgattgtacaaggggcgaacaatgatggtgaactgtacagacggagggcctccagtccccgagagggatcttggatgttgaaatactgaagcaaacgagatgtcaaccaggttagataaagtatcgagtgagtatatccgacagcatgaatggctctcctttgcttaacggaaatggagggaatagactatggattgcctatgaagtatatcataattgaggcgacattatagggtcacataagtgataaaaccagttggcgttacttttacggaactagtctcgcaatatagcaacgaatcgactatctataatcac

SEQ ID NO: 34662 - DNA, 1266 bp, Muscodor strobelii
  misc_feature: SGI cDNA ID NO. 571986
  misc_feature: Encodes the peptide sequence at SEQ ID NO 34663
atggaattcagaaatcctttctcgacatctcgacaggagagaatccttccagaggctggagtcgggcccacggatatcgtctctgaagcggttacaccattacccagaaagccaagcctgaggacaaacttctcatatcccaaactcagtcgtcatgaatcaagcgaatctcgatcatcgaatggctctctgcctgggatgacagatacctcggattcggatgtttcatttgatgacgactgtgtctataacacatctgcgggccaattatgggatagcttctggccggacaacgtcacgtcaccagcgaacgaacattacccagctgtcctgccaaccactcatagtcgggactacttcagtgttgatccttctaggcggcaagcacctgttgaggatgatgacacaattcgcattgccccgacaatccaaaggacgaaggcagaggattcctcgcagggacagcgacagtctcgaatctcaccccaacgcaagacaagaaagactccagtcacatactctgtctatcccaaaacctccgtcactgaaatccagagacatccacatccaccacgcacttcatccttaacttttgacccgccttcgccaccccgccgacaattattctcgaggggaagtaagtcacacgcagctcttcgatcgagtaaatccagccataacctcacttcaattttcatcgcgccgccagtacttgcaacaacaaagcacaactctgactcacctcgctcatcaacgaagacaacagctgcgctttcggtccctgtctcacctgcgtatccaccgccacctccgcctactgctctccgattgagcgcatcggccatcgcacttcgagatgccaataaaacaagcaattatgaccaaaatggcacttcccacaatgtaactgcgccactgacgcctcttctgccctcaagcatgccaggggaacctttgcctcagaggcgccaagccgaaagatttgtttctgtctttgaattagactcggactcggaatgcgaagaggacgatggagacgaagccagcaatagctttgccaaacatattgcgcgcgggctacacaagaaaagcgccagcgagaaacgaggcgttgctgaacgcaaagctgtcactgcaggtttgacagctgttgaccccgacctcgcagagaatgacatgggtcccgagaagctaaaggatggaggcagcttaagccgcaaaagaggcggaagtctaggtcgcatcttcgggcttatgagtcgataa

SEQ ID NO: 34663 - protein, 421 aa, Muscodor strobelii
  misc_feature: SGI Peptide ID NO. 571986
  misc_feature (42)..(113): NCBI GI: 256733973 Blast Desc: NECHADRAFT_91775 [Nectria haematococca mpVI 77-13-4]
  misc_feature (42)..(114): NCBI GI: 46128425 Blast Desc: FG08590.1 [Gibberella zeae PH-1]
MEFRNPFSTSRQERILPEAGVGPTDIVSEAVTPLPRKPSLRTNFSYPKLSRHESSESRSSNGSLPGMTDTSDSDVSFDDDCVYNTSAGQLWDSFWPDNVTSPANEHYPAVLPTTHSRDYFSVDPSRRQAPVEDDDTIRIAPTIQRTKAEDSSQGQRQSRISPQRKTRKTPVTYSVYPKTSVTEIQRHPHPPRTSSLTFDPPSPPRRQLFSRGSKSHAALRSSKSSHNLTSIFIAPPVLATTKHNSDSPRSSTKTTAALSVPVSPAYPPPPPPTALRLSASAIALRDANKTSNYDQNGTSHNVTAPLTPLLPSSMPGEPLPQRRQAERFVSVFELDSDSECEEDDGDEASNSFAKHIARGLHKKSASEKRGVAERKAVTAGLTAVDPDLAENDMGPEKLKDGGSLSRKRGGSLGRIFGLMSR

SEQ ID NO: 34664 - DNA, 695 bp, Muscodor strobelii
  misc_feature: SGI EST ID NO. CUFF.85637.0
  misc_feature: Variant of the nucleotide sequence at SEQ ID NO 34662
atttgatgacgactgtgtctataacacatctgcgggccaattatgggatagcttctggccggacaacgtcacgtcaccagcgaacgaacattacccagctgtcctgccaaccactcatagtcgggactacttcagtgttgatccttctaggcggcaagcacctgttgaggatgatgacacaattcgcattgccccgacaatccaaaggacgaaggcagaggattcctcgcagggacagcgacagtctcgaatctcaccccaacgcaagacaagaaagactccagtcacatactctgtctatcccaaaacctccgtcactgaaatccagagacatccacatccaccacgcacttcatccttaacttttgacccgccttcgccaccccgccgacaattattctcgaggggaagtaagtcacacgcagctcttcgatcgagtaaatccagccataacctcacttcaattttcatcgcgccgccagtacttgcaacaacaaagcacaactctgactcacctcgctcatcaacgaagacaacagctgcgctttcggtccctgtctcacctgcgtatccaccgccacctccgcctactgctctccgattgagcgcatcggccatcgcacttcgagatgccaataaaacaagcaattatgaccaaaatggcacttcccacaatgtaactgcgccactgacgc

SEQ ID NO: 34665 - DNA, 2268 bp, Muscodor strobelii
  misc_feature: SGI cDNA ID NO. 571987
  misc_feature: Reduced expression when VOC is produced
  misc_feature: Encodes the peptide sequence at SEQ ID NO 34666
atgcgcagtttcaatgtgtgcattgggcagcagaagaaagagacagcagagagggagagagttcccaccttgtcgtctccggcctcccattcccaatcctcaacgcctggcgcaaccgccaaattgacacaaccacaactctctactcctgtttacgaccgtcacgacttgaacgaaccctctcccgtccgcacccgcacccctagccagcgccagcagcgcatcttcctcccacacactgcttctctgcccccgtccccggctatacacaccgcgaggtccactccggcttcgcaacgccgtcttcgccgaactcccaacttctctgcttccccgagccctctaatagcacagcaaaaggaagaaggaccccaaaatcagaagagacagtctccgtcccgagttgtcgtcaccctcggaccgaccggtcgctacacccttgctgaggagaccactgggcgcagaggctcaaccagtcgcccgcgagctacacggcagctttcccagggccacttgacgaccagctcagctgcaacttcaccacagtcatcatcccctcaacacattgccagtcactcgggctcggatccaaatcggcctgaaccccatccggttgtgcgcatttccaagcacacgcacagtgctgttctgtatgctctagaggcaacgttgcgtggtcccaaccccctctccgcggaccctgtcgaagaatacgcccagatggctgacctgatgggcgcaagaggcccagccacgtccaatggcaacggtgctgcttccattcatgccgaggccggacgtgctgcagtcggttcgccttccggaatcagaggccccaaggcgatcatggcggagcgtgccgagcgtgaagctagacgagctgctgagaagaaagtccaggatgagctcatgcgagaacatctagagaatgaggcgcgtaagaaggaagatgcagagagacgagaagcagagcgtagagccgccagagaacaggccgagcgaagagctgctggcgctgtgcacgttaccactactgctgatccctcgtcttcgcgacgacagcagcaacccacctataatcgcccggcgatggagagcagctcgcgcactgctatgcccagctccaacatccctaccaacatgcagcctcaagcatctatgcgcaacgagcagcctgccactcgacctactcaagctgcgccaagtgctgcacccacctcccagcagccacctggcaacgaatactccaacgccatcggtcgaggtaggaactcgttcccgcatgcattcgagagatgggagacactgtctgcccattgggagggactcaccagcttttggatccgtcgcttagagcagaatgctacggagattcagaacgaccagattgcccagcagctatcgcgccaagttaccgatctctcatccgccggcgcgaatctgttccatgccgtggttgaacttcagcgactccgtgcgtctagtgaacgcaagttccagagatggttctacgagacgcgcgccgacctagagcgtgcccaggaggtcaccggcgtcctcgaagccacactccaggaggagaaaagatcgaaagacgacgcgatccggaaggctgtcgctgaagctctggaaaagcagcaagtctcggctaagagtgagaggcgtttggaggagatgcgcaaagaactcatcatttcgaaagaggaagcccgtcgtgcttgggaagagcttggtcggcgtgagcaagaggagagagaccgcaccacttctctgcaaatgggtcaacccaccatcgtcggcggcgttcaggtcgtacccatgtctcaaggcgttagcagggccaacacccagcgggatcgatacggccagggtgatatttcggagtacaatcagccgcccaccccgcgagccactcgtgccgaaagtcatgctcctgccgttcagccagtcgccaccacctccgccaaccccgcgatgcaaacgccctcgtccgtccaccatcaacagagttacgggtctgagggtacttttagcgaagaagaatttgagacgccggcaacgcaaccgagcgtataccatccaccagtccccgttcctcctgcaccccagttcggcgagcctgagcccgattacagtgggggtggatattcggctcctggatgggaggaaatgcaaccacgccatcatcacccgacacgactgagtgatgttctcgaggaagaagaggaacggagtcgcacgagtgccagtcaggtcagtcgtcactaa

SEQ ID NO: 34666 - protein, 755 aa, Muscodor strobelii
  misc_feature: SGI Peptide ID NO. 571987
  misc_feature (25)..(752): NCBI GI: 256733474 Blast Desc: NECHADRAFT_99569 [Nectria haematococca mpVI 77-13-4]
  misc_feature (67)..(753): NCBI GI: 85113762 Blast Desc: NCU03174 [Neurospora crassa OR74A] gi|28926367|gb|EAA35344.1| [Neurospora crassa OR74A] gi|38567243|emb|CAE76534.1| [Neurospora crassa]
  misc_feature (100)..(752): NCBI GI: 46128427 Blast Desc: FG08591.1 [Gibberella zeae PH-1]
  misc_feature (200)..(754): NCBI GI: 116193197 Blast Desc: CHGG_06316 [Chaetomium globosum CBS 148.51] gi|88182229|gb|EAQ89697.1| CHGG_06316 [Chaetomium globosum CBS 148.51]
  misc_feature (202)..(754): NCBI GI: 145234194 Blast Desc: An02g13370 [Aspergillus niger] gi|134057412|emb|CAK47750.1| protein product [Aspergillus niger]
  misc_feature (206)..(745): NCBI GI: 119492839 Blast Desc: NFIA_069910 [Neosartorya fischeri NRRL 181] gi|119411877|gb|EAW21820.1| conserved [Neosartorya fischeri NRRL 181]
  misc_feature (206)..(745): NCBI GI: 115385110 Blast Desc: [Aspergillus terreus NIH2624] gi|114196794|gb|EAU38494.1| [Aspergillus terreus NIH2624]
  misc_feature (206)..(616): NCBI GI: 169780156 Blast Desc: [Aspergillus oryzae RIB40] gi|83773282|dbj|BAE63409.1| protein product [Aspergillus oryzae]
  misc_feature (207)..(754): NCBI GI: 71000359 Blast Desc: conserved [Aspergillus fumigatus Af293] gi|66852511|gb|EAL92836.1| conserved [Aspergillus fumigatus Af293]
  misc_feature (207)..(745): NCBI GI: 159127887 Blast Desc: conserved [Aspergillus fumigatus A1163]
  misc_feature: Useful for introducing or modulating the production of volatile compounds
MRSFNVCIGQQKKETAERERVPTLSSPASHSQSSTPGATAKLTQPQLSTPVYDRHDLNEPSPVRTRTPSQRQQRIFLPHTASLPPSPAIHTARSTPASQRRLRRTPNFSASPSPLIAQQKEEGPQNQKRQSPSRVVVTLGPTGRYTLAEETTGRRGSTSRPRATRQLSQGHLTTSSAATSPQSSSPQHIASHSGSDPNRPEPHPVVRISKHTHSAVLYALEATLRGPNPLSADPVEEYAQMADLMGARGPATSNGNGAASIHAEAGRAAVGSPSGIRGPKAIMAERAEREARRAAEKKVQDELMREHLENEARKKEDAERREAERRAAREQAERRAAGAVHVTTTADPSSSRRQQQPTYNRPAMESSSRTAMPSSNIPTNMQPQASMRNEQPATRPTQAAPSAAPTSQQPPGNEYSNAIGRGRNSFPHAFERWETLSAHWEGLTSFWIRRLEQNATEIQNDQIAQQLSRQVTDLSSAGANLFHAVVELQRLRASSERKFQRWFYETRADLERAQEVTGVLEATLQEEKRSKDDAIRKAVAEALEKQQVSAKSERRLEEMRKELIISKEEARRAWEELGRREQEERDRTTSLQMGQPTIVGGVQVVPMSQGVSRANTQRDRYGQGDISEYNQPPTPRATRAESHAPAVQPVATTSANPAMQTPSSVHHQQSYGSEGTFSEEEFETPATQPSVYHPPVPVPPAPQFGEPEPDYSGGGYSAPGWEEMQPRHHHPTRLSDVLEEEEERSRTSASQVSRH

SEQ ID NO: 34667 - DNA, 675 bp, Muscodor strobelii
  misc_feature: SGI cDNA ID NO. 571988
  misc_feature: Reduced expression when VOC is produced
  misc_feature: Encodes the peptide sequence at SEQ ID NO 34668
atgaaaacagtcgaagaagcaaagtcccgctaccgcacgggtccattctcctggaaagccggggttctgttcgtggccgcgggcgcgggactcatgtggtactttgaggaagagaagaaacgcatgcaacggcgtagaatcgcggaagctaccaagggcgtggggaaacctaaggttgggggagatttcgcgttgatcgatcaggaggggagaccgtttgggagtggggatttgaagggacggtattctcttgtatactttggcttcacccactgcccagatatctgccccgacgaactcgacaaaatggcacggatgtacgatctcgttgaagagtccgccccaggcgctgtagcgcctatcttcatcacctgtgacccggcgcgcgatgatccgaaagttctaaaatcttaccttgccgaatttcatcccaagttcattggattgacggggagttacgatgagattaaggacgtttgtaagagttatagggtctattttagtacgcccaaggatgtgaaacctggacaggattacctggtcgatcatagtatttacttttacttgatggatcctgagggtgacttcgtggaggcgctgggtagacaacatagtccggatcaggctgcgaaggtcattcttgatcatgttaaggattggagacctaagaattag

SEQ ID NO: 34668 - protein, 224 aa, Muscodor strobelii
  misc_feature: SGI Peptide ID NO. 571988
  misc_feature (22)..(205): Pfam Id: PF02630 Pfam Desc: SCO1/SenC
  misc_feature (2)..(221): NCBI GI: 171680097 Blast Desc: protein product [Podospora anserina] gi|170939675|emb|CAP64901.1| protein product [Podospora anserina]
  misc_feature (2)..(221): NCBI GI: 164427251 Blast Desc: protein sco1 [Neurospora crassa OR74A] gi|157071669|gb|EAA35347.2| protein sco1 [Neurospora crassa OR74A]
  misc_feature (2)..(221): NCBI GI: 38567240 Blast Desc: SCO1 protein precursor [Neurospora crassa]
  misc_feature (2)..(221): NCBI GI: 256727061 Blast Desc: [Nectria haematococca mpVI 77-13-4]
  misc_feature (2)..(224): NCBI GI: 46136053 Blast Desc: FG09542.1 [Gibberella zeae PH-1]
  misc_feature (2)..(221): NCBI GI: 39971079 Blast Desc: MGG_03006 [Magnaporthe grisea 70-15] gi|149210629|ref|XP_001522689.1| MGCH7_ch7g787 [Magnaporthe grisea 70-15] gi|86196742|gb|EAQ71380.1| MGCH7_ch7g787 grisea
  misc_feature (2)..(221): NCBI GI: 154322138 Blast Desc: Sco1 protein [Botryotinia fuckeliana B05.10] gi|150850463|gb|EDN25656.1| Sco1 protein [Botryotinia fuckeliana B05.10]
  misc_feature (2)..(221): NCBI GI: 116193185 Blast Desc: CHGG_06310 [Chaetomium globosum CBS 148.51] gi|88182223|gb|EAQ89691.1| CHGG_06310 [Chaetomium globosum CBS 148.51]
  misc_feature (1)..(220): NCBI GI: 169595104 Blast Desc: SNOG_00285 [Phaeosphaeria nodorum SN15] gi|111070660|gb|EAT91780.1| SNOG_00285 [Phaeosphaeria nodorum SN15]
  misc_feature (2)..(221): NCBI GI: 212544458 Blast Desc: mitochondrial metallochaperone Sco1, [Penicillium marneffei ATCC 18224] gi|210065352|gb|EEA19446.1| mitochondrial metallochaperone Sco1, [Penicillium marneffei ATCC 18224]
  misc_feature: Useful for introducing or modulating the production of volatile compounds
MKTVEEAKSRYRTGPFSWKAGVLFVAAGAGLMWYFEEEKKRMQRRRIAEATKGVGKPKVGGDFALIDQEGRPFGSGDLKGRYSLVYFGFTHCPDICPDELDKMARMYDLVEESAPGAVAPIFITCDPARDDPKVLKSYLAEFHPKFIGLTGSYDEIKDVCKSYRVYFSTPKDVKPGQDYLVDHSIYFYLMDPEGDFVEALGRQHSPDQAAKVILDHVKDWRPKN

SEQ ID NO: 34669 - DNA, 5635 bp, Muscodor strobelii
  misc_feature: SGI EST ID NO. CUFF.86048.0
  misc_feature: Variant of the nucleotide sequence at SEQ ID NO 34667
gcagtagggcatcagtgaggcgtcgccgtcaagaaaccagcaacagcatcattctgcggagatttgggcagtcaaacggtggcgagaaaggcaatgcgcagtttcaatgtgtgcattgggcagcagaagaaagagacagcagagagggagagagttgtaagccagaaagaggcgggtgccacgcgagaaacatctcgcaccagtttcgcatagctcccagcacagcgacgactatatcatcaacgaactctcggcatcacagcattgcagcatcgccgtttgaataattgagcgagatccgcttatgtcaacgtttactcttttcgtttacaattgcaattctcgtatgtgtcggatttcgaagcgcccattgcgcattggccctgtactctcgcgacccgcgtctacggccagctcccccagtgtcactgcgccaccagaatatttccaacttgtcgcattcccaacctcccccaaaagccctgcacgcacacatattcctccacgcgcggcaaactagactacactctgctctctattactgcactcacactctacacattgcagagaacagcaattccatccatccgccttttgccttgtttttcttgcattctgccttgctgcagggcagaagaatccacaaggtaatcgaagtctcaccacccattgagcggtgatagtatagcccaccttgtcgtctccggcctcccattcccaatcctcaacgcctggcgcaaccgccaaattgacacaaccacaactctctactcctgtttacgaccgtcacgacttgaacgaaccctctcccgtccgcacccgcacccctagccagcgccagcagcgcatcttcctcccacacactgcttctctgcccccgtccccggctatacacaccgcgaggtccactccggcttcgcaacgccgtcttcgccgaactcccaacttctctgcttccccgagccctctaatagcacagcaaaaggaagaaggaccccaaaatcagaagagacagtctccgtcccgagttgtcgtcaccctcggaccgaccggtcgctacacccttgctgaggagaccactgggcgcagaggctcaaccagtcgcccgcgagctacacggcagctttcccagggccacttgacgaccagctcagctgcaacttcaccacagtcatcatcccctcaacacattgccagtcactcgggctcggatccaaatcggcctgaaccccatccggttgtgcgcatttccaagcacacgcacagtgctgttctgtatgctctagaggcaacgttgcgtggtcccaaccccctctccgcggaccctgtcgaagaatacgcccagatggctgacctgatgggcgcaagaggcccagccacgtccaatggcaacggtgctgcttccattcatgccgaggccggacgtgctgcagtcggttcgccttccggaatcagaggccccaaggcgatcatggcggagcgtgccgagcgtgaagctagacgagctgctgagaagaaagtccaggatgagctcatgcgagaacatctagagaatgaggcgcgtaagaaggaagatgcagagagacgagaagcagagcgtagagccgccagagaacaggccgagcgaagagctgctggcgctgtgcacgttaccactactgctgatccctcgtcttcgcgacgacagcagcaacccacctataatcgcccggcgatggagagcagctcgcgcactgctatgcccagctccaacatccctaccaacatgcagcctcaagcatctatgcgcaacgagcagcctgccactcgacctactcaagctgcgccaagtgctgcacccacctcccagcagccacctggcaacgaatactccaacgccatcggtcgaggtaggaactcgttcccgcatgcattcgagagatgggagacactgtctgcccattgggagggactcaccagcttttggatccgtcgcttagagcagaatgctacggagattcagaacgaccagattgcccagcagctatcgcgccaagttaccgatctctcatccgccggcgcgaatctgttccatgccgtggttgaacttcagcgactccgtgcgtctagtgaacgcaagttccagagatggttctacgagacgcgcgccgacctagagcgtgcccaggaggtcaccggcgtcctcgaagccacactccaggaggagaaaagatcgaaagacgacgcgatccggaaggctgtcgctgaagctctggaaaagcagcaagtctcggctaagagtgagaggcgtttggaggagatgcgcaaagaactcatcatttcgaaagaggaagcccgtcgtgcttgggaagagcttggtcggcgtgagcaagaggagagagaccgcaccacttctctgcaaatgggtcaacccaccatcgtcggcggcgttcaggtcgtacccatgtctcaaggcgttagcagggccaacacccagcgggatcgatacggccagggtgatatttcggagtacaatcagccgcccaccccgcgagccactcgtgccgaaagtcatgctcctgccgttcagccagtcgccaccacctccgccaaccccgcgatgcaaacgccctcgtccgtccaccatcaacagagttacgggtctgagggtacttttagcgaaggtgagtatattgcacaggcatatcgagatttcgtccgggaagtccaaggaccaaacgtgaaattcgccttgcaatatcgataatcttcccaccaccccttataccaagaactcgtccagggaagcccacggacgcatctgttttgagttatgattttgatttcggttccaacacatcagcaagttcttcactcggttttccaatggggctctaacaaagagattagaagaatttgagacgccggcaacgcaaccgagcgtataccatccaccagtccccgttcctcctgcaccccagttcggcgagcctgagcccgattacagtgggggtggatattcggctcctggatgggaggaaatgcaaccacgccatcatcacccgacacgactgagtgatgttctcgaggaagaagaggaacggagtcgcacgagtgccagtcaggtcagtcgtcactaacgacgatgatcagtgcaatgtgcgtaacgataattaatggacgaacgcgacccctcgatttgtttcttctggtttctcgttcagtgtggtgcatggaagctctatggacatattgtttctgttttggtcttcgttatttgttttcttttcgcttcgcacatggaacggcgaggctggcgttggggtgagcatggcgaacgttagatgaaaagcatccaagacagtttgattttttgttggtggtgataatccagatgcctggtacctggagagagcaagtgggagtggtgggatgtcatgttttcggcgggtcagcaatggattgcatcaaagacgagcatgtggcggcattcgcgaggtcagcacatgtgcatcgcgcagacttgtttgtttttacccttgactatggtgaaagttcggcttagcagcctggagcttgtttcgttcctctcgtgcatatgagggaggcggaattgggaatggtggggcatgtgggattatttattgttggaaggaagctgttgaatttgttggttgcgagtttgagggatgagtgtcgatgagcaagatcaagggatgggcagtgtgtggttgttgtatttgcggagaacagacagacatgaggacagaggcatcatcatccgcggatgtggccgacgctgtacctactagtaatattaatgaagtcaggatttttgactcacaaaaccaacctcgtcagggaattgtgcatgtaatccttcattcctaatcatggctataacaattgccattttgtctgcctgcgtgagacgagactggtttcatcggcgtactctgtagtgcgcgactacttatatttgtacatccacactccattccagccgtccttggtgttcgggaccggattatggcttttctacgcgacctggctacttgccgcccctatgtctcctctatcgtgctactcatagatggttaatccgtacgtcaccggcagcaatggatcacatgttcaaactcattgggctcttttggcatttcattggctgatggcatggtggctgaagatgtggtgcaacccttctgcgcagagtctaggtacgcatcttggcttacctaacgtagcccatgcaaggaaaactggagctagagcaccgacgccgatgcgccaatcgccatacgatagctccagtggctctaagaatttctaagctccgatgtgaagctcaaactacctacactaacgcggtaaatctaaactgaaatcgcaattcgacatcgacaccctcacaacaccgcggcagcacatcacacgaccacaatgtcgcgctcgctctcctcatcaagagcgcttttgcgcaccttaacgaaaaccccattacacaaccagcaatgcatccgcacgctctccaatcaaaccacgtcccgacccgccctccaactccagtctacaaaatcacaatcccgtctcccactcgaacaacggcgacacaaaatgaaaacagtcgaagaagcaaagtcccgctaccgcacgggtccattctcctggaaagccggggttctgttcgtggccgcgggcgcgggactcatgtggtactttgaggaagagaagaaacgcatgcaacggcgtagaatcgcggaagctaccaagggcgtggggaaacctaaggttgggggagatttcgcgttgatcgatcaggaggggagaccgtttgggagtggggatttgaagggacggtattctcttgtatactttggcttcacccactgcccagatatctgccccgacgaactcgacaaaatggcacggatgtacgatctcgttgaagagtccgccccaggcgctgtagcgcctatcttcatcacctgtgacccggcgcgcgatgatccgaaagttctaaaatcttaccttgccgaatttcatcccaagttcattggattgacggggagttacgatgagattaaggacgtttgtaagagttatagggtctattttagtacgcccaaggatgtgaaacctggacaggattacctggtcgatcatagtatttacttttacttgatggatcctgagggtgacttcgtggaggcgctgggtagacaacatagtccggatcaggctgcgaaggtcattcttgatcatgttaaggattggagacctaagaattagagaaggagtgtcttatggcggcgataagggctgattggagggtgagaaaagtgtgtatcattagagctgtacagtacgctcctctcgactgtgatattattgtacatgaattgtatgggtatctggtggataaaagcagttgctgccattctagtcaacggccgagtgtgcgttagacattgctgaagagaaggcaatgagacgatctcagatacgatttaacccgagcagagctttcatcacaacagcagtagacagttgctctacgaataatcatgttgtgagttatcagagctgtctcatagaatgttttctagacaagactcgatacatctttctatgatacaataagtggggctgcgcc

SEQ ID NO: 34670 - DNA, 1269 bp, Muscodor strobelii
  misc_feature: SGI cDNA ID NO. 571989
  misc_feature: Encodes the peptide sequence at SEQ ID NO 34671
atggatcgtaatgcccctttctgcagagagggagagacgcctggttttgccttcgcctttgacattgatggcgtgcttttgcacgttgcaaaacctatacccggtgcttcagaaacactgaagtacctacagaaggagggaatacctttcatattactcacgaatggcgggggaaaacatgagcgggagcgcgttgcagagttgagtgagaaactcgacgtagaactatcaatagagaactttgtacagtctcatacgccattccagcaacttgtcagtcagccatggtccgagaactccaagcacctgaaagagaagaatatcctagtcaccggctcagacgcatcaaaatcacgcttaatagccgaagaatacggcttccaaaatgtcatcacacccgcagatattctcgctgcacacccaaccatatttcccttcgacccactcctagactcacactacagagcaacagcacggcccttgcccgaagccaatcccaagatcgatgcaatattcgtattcaacgacccacgagactgggcgctggacacacaaatcatcatggacctcctcctatccaaagaaggcgtgctcggaacttactccccaaagaacggaaagaaacaatggcaacaagacggacaaccccctctctacttcagtaatccggatctcttctggagcgcaagctaccacctgcccagattcggccaaggcgccttccaagcagcgctcgccggaatgtgggcaaagatcacagacggaaaggagttaaaaagcacaataatcgggaaaccatacaacaggacctacgcatacgcagaaaacgtcctaacaaaatggcgagagaaatctggttctgcggcaacaccgctgagaagagtgtacatggtaggcgataatcccgaaagcgatatccgaggtgcgaataataggaatacgcaaaatggccggggacaccatagtgaggcgatggagtggtactcgatattggtgaagacgggtgtctggaatcaggagagagatgggctgcccaagtataaacctagtcaggtcgttgatgatgtcgcgaaggctgttgagtgggctgtggattgtgagagggcttattggcttacggagcagaggattggggatgcgccgaaggggtatacgaagttggaccttaagagttgggacaatgagcgtggtgtgcaggttgaggatggggatgtgacggttggtggtgaggagacgcagagtaggaagggttggaaggtcgagggttag

SEQ ID NO: 34671 - protein, 422 aa, Muscodor strobelii
  misc_feature: SGI Peptide ID NO. 571989
  misc_feature (12)..(367): NCBI GI: 38567244 Blast Desc: conserved [Neurospora crassa]
  misc_feature (12)..(367): NCBI GI: 85113758 Blast Desc: NCU03173 [Neurospora crassa OR74A] gi|28926366|gb|EAA35343.1| NCU03173 [Neurospora crassa OR74A]
  misc_feature (14)..(367): NCBI GI: 156060827 Blast Desc: SS1G_02556 [Sclerotinia sclerotiorum 1980] gi|154699960|gb|EDN99698.1| SS1G_02556 [Sclerotinia sclerotiorum 1980]
  misc_feature (14)..(367): NCBI GI: 154322168 Blast Desc: BC1G_01231 [Botryotinia fuckeliana B05.10] gi|150850478|gb|EDN25671.1| BC1G_01231 [Botryotinia fuckeliana B05.10]
  misc_feature (12)..(366): NCBI GI: 212543019 Blast Desc: HAD superfamily hydrolase, [Penicillium marneffei ATCC 18224] gi|210066571|gb|EEA20664.1| HAD superfamily hydrolase, [Penicillium marneffei ATCC 18224]
  misc_feature (12)..(364): NCBI GI: 242785474 Blast Desc: HAD superfamily hydrolase, [Talaromyces stipitatus ATCC 10500] gi|218720749|gb|EED20168.1| HAD superfamily hydrolase, [Talaromyces stipitatus ATCC 10500]
  misc_feature (12)..(364): NCBI GI: 121710666 Blast Desc: HAD superfamily hydrolase, [Aspergillus clavatus NRRL 1] gi|119401099|gb|EAW11523.1| HAD superfamily hydrolase, [Aspergillus clavatus NRRL 1]
  misc_feature (12)..(364): NCBI GI: 119498139 Blast Desc: HAD superfamily hydrolase, [Neosartorya fischeri NRRL 181] gi|119413991|gb|EAW23930.1| HAD superfamily hydrolase, [Neosartorya fischeri NRRL 181]
  misc_feature (4)..(364): NCBI GI: 255934852 Blast Desc: Pc12g16550 [Penicillium chrysogenum Wisconsin 54-1255] gi|255942171|ref|XP_002561854.1| Pc18g00070 [Penicillium chrysogenum Wisconsin 54-1255] gi|211583072|emb|CAP81282.1|
  misc_feature (13)..(368): NCBI GI: 238496257 Blast Desc: HAD superfamily hydrolase, [Aspergillus flavus NRRL3357] gi|220694244|gb|EED50588.1| HAD superfamily hydrolase, [Aspergillus flavus NRRL3357]
MDRNAPFCREGETPGFAFAFDIDGVLLHVAKPIPGASETLKYLQKEGIPFILLTNGGGKHERERVAELSEKLDVELSIENFVQSHTPFQQLVSQPWSENSKHLKEKNILVTGSDASKSRLIAEEYGFQNVITPADILAAHPTIFPFDPLLDSHYRATARPLPEANPKIDAIFVFNDPRDWALDTQIIMDLLLSKEGVLGTYSPKNGKKQWQQDGQPPLYFSNPDLFWSASYHLPRFGQGAFQAALAGMWAKITDGKELKSTIIGKPYNRTYAYAENVLTKWREKSGSAATPLRRVYMVGDNPESDIRGANNRNTQNGRGHHSEAMEWYSILVKTGVWNQERDGLPKYKPSQVVDDVAKAVEWAVDCERAYWLTEQRIGDAPKGYTKLDLKSWDNERGVQVEDGDVTVGGEETQSRKGWKVEG

SEQ ID NO: 34672 - DNA, 1648 bp, Muscodor strobelii
  misc_feature: SGI EST ID NO. CUFF.82418.0
  misc_feature: Variant of the nucleotide sequence at SEQ ID NO 34670
tcctcggcttgtagccactctaagccgtcgtatgcgtgcttctctcgtgatttagcgacagcagaagtggcggtaaagatgctcttctggtcgtagtagtccctctgatttgtctatccgtctcctcatcatcatatcctcataatggcgactcttatgcttgcaccgcgcacgttgtgtcgcgtggtaaggccatgtgtccaaggtcatacccccagagcggctctgaggccgaggtgctggaaaactggcattctgggccaagtcaggacgctcatcatggatcgtaatgcccctttctgcagagagggagagacgcctggttttgccttcgcctttgacattgatggcgtgcttttgcacgttgcaaaacctatacccggtgcttcagaaacactgaagtacctacagaaggagggaatacctttcatattactcacgaatggcgggggaaaacatgagcgggagcgcgttgcagagttgagtgagaaactcgacgtagaactatcaatagagaactttgtacagtctcatacgccattccagcaacttgtcagtcagccatggtccgagaactccaagcacctgaaagagaagaatatcctagtcaccggctcagacgcatcaaaatcacgcttaatagccgaagaatacggcttccaaaatgtcatcacacccgcagatattctcgctgcacacccaaccatatttcccttcgacccactcctagactcacactacagagcaacagcacggcccttgcccgaagccaatcccaagatcgatgcaatattcgtattcaacgacccacgagactgggcgctggacacacaaatcatcatggacctcctcctatccaaagaaggcgtgctcggaacttactccccaaagaacggaaagaaacaatggcaacaagacggacaaccccctctctacttcagtaatccggatctcttctggagcgcaagctaccacctgcccagattcggccaaggcgccttccaagcagcgctcgccggaatgtgggcaaagatcacagacggaaaggagttaaaaagcacaataatcgggaaaccatacaacaggacctacgcatacgcagaaaacgtcctaacaaaatggcgagagaaatctggttctgcggcaacaccgctgagaagagtgtacatggtaggcgataatcccgaaagcgatatccgaggtgcgaataataggaatacgcaaaatggccggggacaccatagtgaggcgatggagtggtactcgatattggtgaagacgggtgtctggaatcaggagagagatgggctgcccaagtataaacctagtcaggtcgttgatgatgtcgcgaaggctgttgagtgggctgtggattgtgagagggcttattggcttacggagcagaggattggggatgcgccgaaggggtatacgaagttggaccttaagagttgggacaatgagcgtggtgtgcaggttgaggatggggatgtgacggttggtggtgaggagacgcagagtaggaagggttggaaggtcgagggttagacttatagatgactatcgttagagagatgatggtacagtgaagcttttgggttgaccttaattgtatggtcatcagaatgactttgagatggtttcaaag

SEQ ID NO: 34673 - DNA, 213 bp, Muscodor strobelii
  misc_feature: SGI cDNA ID NO. 571990
  misc_feature: Encodes the peptide sequence at SEQ ID NO 34674
atgcagttcaccactatcatcgtcgccctcttcgccactgccgcgatcgccatccccgcagagctccaagagcgccagtgtgttggcaatctcggcacatgttacaagaaggccagcgctccgctcggcatgcagtgctgtggtggtctctactgctgtggagtcgtcggcacgagcaatgtctgccagactgtgaatgactgcggcgaatga

SEQ ID NO: 34674 - protein, 70 aa, Muscodor strobelii
  misc_feature: SGI Peptide ID NO. 571990
MQFTTIIVALFATAAIAIPAELQERQCVGNLGTCYKKASAPLGMQCCGGLYCCGVVGTSNVCQTVNDCGE

SEQ ID NO: 34675 - DNA, 1008 bp, Muscodor strobelii
  misc_feature: SGI cDNA ID NO. 571991
  misc_feature: Encodes the peptide sequence at SEQ ID NO 34676
atgtttgtgcgatttgaatacatctatgcgatagagccatcactcagcaaatacaacaactcggttcacaaattcccaaagagcaccaagactctaggtagtagacgaccattaacgaatgcttcagccttattagacctcacgcttgttccatccgtcgtggctgctgaatgcactttaggcctcgtcggccagaagatgcaaccgtcttacagcaatgggaaatttgaggagacgacaatgggtccatacatcgagaacaatagcgccattgctcgaggacttccgtttggtttgctctttggcgatagcgcggaaaattgcgttacatggtccaaggactcggatatgccgtatccgctgatcgcatgctacaaagacattttaactgaccctttcgacgcactctccgcgctctcaggattggcatacatattagatggtatcttcctgtcccgccccgatatcgcgactctgattggtccagatcagaacctaggcgatcctgctgaggctctcgattatgttgatgccacatttaccaagatagacgaatcgatggagaatgtcgcccgcatcatgacccagtatcttcgagactatcaggataaccaggcttggcgccacaaagagcatatagggcgttctgattcatcggtcatctcagcactcaacgaaacgtatggtacagccgatccgccgtcggtggtctatgggaacgctacgagagctatcctaagttataagatcatatggggctggatcagcctcccagcatccataatagtgtttctgggactgctcatattactcacggcaattaatacgaggcgggaggacgtctcacaatggagagacaatagcctatcaaacatactacatggtgccgatgatgcgacaagacgtcttctagacgaggcggagcaacgtggagaattacttgaagctgcagaacagatcaccgtacagcttgatcgtggtcgaggagtactcatgacaatgatttga

SEQ ID NO: 34676 - protein, 335 aa, Muscodor strobelii
  misc_feature: SGI Peptide ID NO. 571991
  misc_feature (178)..(327): NCBI GI: 85093286 Blast Desc: NCU08172 [Neurospora crassa OR74A] gi|28921111|gb|EAA30428.1| [Neurospora crassa OR74A]
MFVRFEYIYAIEPSLSKYNNSVHKFPKSTKTLGSRRPLTNASALLDLTLVPSVVAAECTLGLVGQKMQPSYSNGKFEETTMGPYIENNSAIARGLPFGLLFGDSAENCVTWSKDSDMPYPLIACYKDILTDPFDALSALSGLAYILDGIFLSRPDIATLIGPDQNLGDPAEALDYVDATFTKIDESMENVARIMTQYLRDYQDNQAWRHKEHIGRSDSSVISALNETYGTADPPSVVYGNATRAILSYKIIWGWISLPASIIVFLGLLILLTAINTRREDVSQWRDNSLSNILHGADDATRRLLDEAEQRGELLEAAEQITVQLDRGRGVLMTMI

SEQ ID NO: 34677 - DNA, 383 bp, Muscodor strobelii
  misc_feature: SGI EST ID NO. CUFF.82403.0
  misc_feature: Variant of the nucleotide sequence at SEQ ID NO 34675
tccgtttggtttgctctttggcgatagcgcggaaaattgcgttacatggtccaaggactcggatatgccgtatccgctgatcgcatgctacaaagacattttaactgaccctttcgacgcactctccgcgctctcaggattggcatacatattagatggtatcttcctgtcccgccccgatatcgcgactctgattggtccagatcagaacctaggcgatcctgctgaggctctcgattatgttgatgccacatttaccaagatagacgaatcgatggagaatgtcgcccgcatcatgacccagtatcttcgagactatcaggataaccaggcttggcgccacaaagagcatatagggcgttctgattcatcggtcatctcag

SEQ ID NO: 34678 - DNA, 513 bp, Muscodor strobelii
  misc_feature: SGI cDNA ID NO. 571992
  misc_feature: Elevated expression when VOC is produced
  misc_feature: Encodes the peptide sequence at SEQ ID NO 34679
atgagcaaccaatttggggaattcaagaacaaaccgaaagggacccgacccgaaaataaacccaagaaaaatcgctggccgaaattctgggaggcgaaactgtatgaacccttcgaaagtgttgccatccatgaaaagcacactactttaggcactgtcgatgctcttctagctgcggccggggtgacagaaccagaacgtctcaaagcggtagatgctaaggtcgtcgagttcgctgaagctgggaaaaagatcgactatgttaaagaaggagaccatgtcacgttcgtcgagatgtcaacattcaattatcgtctgctcacgagtcgctacgaaccaagccatgcctacacaatcgagttcggtaataaacagacgagagtagcggtctttctaggtccgcggatagaaaaatccaaagaggaagaaatggaagaacagagagagctggaggcagaacaaagggcgtacgaagaagacgatgatgataataaggggggttctgttgagtag

SEQ ID NO: 34679 - protein, 170 aa, Muscodor strobelii
  misc_feature: SGI Peptide ID NO. 571992
  misc_feature: Useful for introducing or modulating the production of volatile compounds
MSNQFGEFKNKPKGTRPENKPKKNRWPKFWEAKLYEPFESVAIHEKHTTLGTVDALLAAAGVTEPERLKAVDAKVVEFAEAGKKIDYVKEGDHVTFVEMSTFNYRLLTSRYEPSHAYTIEFGNKQTRVAVFLGPRIEKSKEEEMEEQRELEAEQRAYEEDDDDNKGGSVE

SEQ ID NO: 34680 - DNA, 814 bp, Muscodor strobelii
  misc_feature: SGI EST ID NO. CUFF.82410.0
  misc_feature: Variant of the nucleotide sequence at SEQ ID NO 34678
taattcttccccaaaatctcgtccttattgctacctcttggttaacgctttccatttcctactttttgtcccggatcgaaatctatagaatagccagggtccagtatcgacaatgagcaaccaatttggggaattcaagaacaaaccgaaagggacccgacccgaaaataaacccaagaaaaatcgctggccgaaattctgggaggcgaaactgtatgaacccttcgaaagtgttgccatccatgaaaagcacactactttaggcactgtcgatgctcttctagctgcggccggggtgacagaaccagaacgtctcaaagcggtagatgctaaggtcgtcgagttcgctgaagctgggaaaaagatcgactatgttaaagaaggagaccatgtcacgttcgtcgagatgtcaacattcaattatcgtctgctcacgagtcgctacgaaccaagccatgcctacacaatcgagttcggtaataaacagacgagagtagcggtctttctaggtccgcggatagaaaaatccaaagaggaagaaatggaagaacagagagagctggaggcagaacaaagggcgtacgaagaagacgatgatgataataaggggggttctgttgagtagatatattaagaaaagacaatgtagacaggtaggggaagctaggaccatctagagacgaagggtgagagctgatagacgaaagtggcgacagagtaagagataatatagggacagctggagaattcgaagcttgctggcgcaagatctaacagggtatagggacatatccactcaccagcttgacttatc

SEQ ID NO: 34681 - DNA, 1092 bp, Muscodor strobelii
  misc_feature: SGI cDNA ID NO. 571993
  misc_feature: Encodes the peptide sequence at SEQ ID NO 34682
atgtctacacccaaagcacaactacgcttcgggatcgagattgaattgtatattaaacccaaacgtgaaacattggagaagctcttatcaaggaaggagagcccaaagttcacatatccgttgactgatgggccagtccaagattcggagcaacaacatgataatcgaatagctgttatgcaattggtagcgaagcagatgaaggactggctacccaattgcacaacaacacgggacggtcaacccattgagaaattttcagagtggactgtggatcaagacacatcacttcaagaggagaaggaggatgtatggggaattgagttgatatcaagaatcctaacgaccagctacgactgggaatctgaagttcagaaattgttcactttattgcagcagcactgggaaatacaagagccgcaggactgcgcaacacacatccatgtgtcacccttcgattctggttttaccatgcctcaggtgaggcagattatgaaggcaacctggcttttcaacgacgctttcacaaagacagctgcagctggacagaagaacaacgaatggtgcaggccaaatcatctagcggagcctgagcaaacagagcgagatgcacaacaccgtaatactagtgattgggcctcgttgaatcacatcaaagaggcatacaacaagatcaaagagaacaaggaagggacaggctgggaacccattttcaaagaaatcgacgggacaaagtcgaaatttgctgctttcactcgcatgggcggctcgaggaaggtttctatgaacttgtcgaatttatacgacgaggattgtggtactatagagttcagacggccccccggcgtcacgaatagtgaagatgccatctactatactctattcgcgttgggattcttcgcccaagcactgggagtggaagaagaattcttcaacaaagtttatcaaaacaaacccgacttcccatctgttaaggaattcaaccaattcgtagaagacgggcttcgcagactcggtggcagaactcgcagcagtaatcgcgcttacgtcttcattaagagaccacttgaggagatcttcaagagagggtag

SEQ ID NO: 34682 - protein, 363 aa, Muscodor strobelii
  misc_feature: SGI Peptide ID NO. 571993
  misc_feature (8)..(299): NCBI GI: 116206012 Blast Desc: CHGG_02299 [Chaetomium globosum CBS 148.51] gi|88182896|gb|EAQ90364.1| CHGG_02299 [Chaetomium globosum CBS 148.51]
  misc_feature (89)..(357): NCBI GI: 116203815 Blast Desc: CHGG_09791 [Chaetomium globosum CBS 148.51] gi|88175919|gb|EAQ83387.1| CHGG_09791 [Chaetomium globosum CBS 148.51]
  misc_feature (87)..(312): NCBI GI: 256733629 Blast Desc: NECHADRAFT_36224 [Nectria haematococca mpVI 77-13-4]
  misc_feature (55)..(304): NCBI GI: 189197919 Blast Desc: conserved [Pyrenophora tritici-repentis Pt-1C-BFP] gi|187981245|gb|EDU47871.1| conserved [Pyrenophora tritici-repentis Pt-1C-BFP]
  misc_feature (160)..(339): NCBI GI: 240277723 Blast Desc: conserved [Ajellomyces capsulatus H143]
  misc_feature (10)..(324): NCBI GI: 116204953 Blast Desc: [Chaetomium globosum CBS 148.51] gi|88176488|gb|EAQ83956.1| [Chaetomium globosum CBS 148.51]
  misc_feature (1)..(327): NCBI GI: 116181334 Blast Desc: [Chaetomium globosum CBS 148.51] gi|88185592|gb|EAQ93060.1| [Chaetomium globosum CBS 148.51]
  misc_feature (85)..(333): NCBI GI: 116191259 Blast Desc: [Chaetomium globosum CBS 148.51] gi|88181260|gb|EAQ88728.1| [Chaetomium globosum CBS 148.51]
  misc_feature (85)..(304): NCBI GI: 119185340 Blast Desc: CIMG_07368 [Coccidioides immitis RS]
  misc_feature (88)..(327): NCBI GI: 171695638 Blast Desc: protein product [Podospora anserina] gi|170948061|emb|CAP60225.1| protein product [Podospora anserina]
MSTPKAQLRFGIEIELYIKPKRETLEKLLSRKESPKFTYPLTDGPVQDSEQQHDNRIAVMQLVAKQMKDWLPNCTTTRDGQPIEKFSEWTVDQDTSLQEEKEDVWGIELISRILTTSYDWESEVQKLFTLLQQHWEIQEPQDCATHIHVSPFDSGFTMPQVRQIMKATWLFNDAFTKTAAAGQKNNEWCRPNHLAEPEQTERDAQHRNTSDWASLNHIKEAYNKIKENKEGTGWEPIFKEIDGTKSKFAAFTRMGGSRKVSMNLSNLYDEDCGTIEFRRPPGVTNSEDAIYYTLFALGFFAQALGVEEEFFNKVYQNKPDFPSVKEFNQFVEDGLRRLGGRTRSSNRAYVFIKRPLEEIFKRG

SEQ ID NO: 34683 - DNA, 2334 bp, Muscodor strobelii
  misc_feature: SGI cDNA ID NO. 571994
  misc_feature: Encodes the peptide sequence at SEQ ID NO 34684
atgtcgtcttccacacccaatcttcccagtggtgaggcccatccgcttcgttccgccatgaaacacgacgacgacagcgaaagagcggcggactcgggctcgagcatcaaagcggtacaaatagccgagcccgaacccgaaccaagtagccctgaggatagcctacctaggaagcagttttctgcaggtctttcgcgacgacttagtggacgccctgccgtcttgcctaccaactcatcgagaacatcgcttctcagccaaacaagtgtggaagccctggctagtttgcaaagccgaaacttgcctcagccacctggtatggaaccttcccagccggaacatcatcatcatcatcatcaccgacatcgactggatcgcatgggcgagagactcattgcccaggttgcagagtggatagatcatgaaaaggcaaagaaatcgcacagaaagtcaagacacataacttcgagccgaagaaaaactcatgcagatgattctcaagggacagaagcccaacccgacagcagtaaatctaggagatactccatcgactcacagtccagtgatgtttcgcttgacagacttcaaaagatcattgatgacagcatgacttctttgggcctgagtggaattcctcattacagcccgaagccaggcaagaagtctcagcgaagacgatctttgcacttgcacagaaccgcttcttctgacaccgaattcttcgacggggatattctcgtaccgaactgcgatgctgttcttgataattcgaagacaatgagttattccgggggcaacgctggtggagacgaggagatcgcgtctatatcaaaacgtaaagaagataaggaacgacaagcatggctcactttcaagaacgaaatcatccgccttgctcatacgctgagactcaaggggtggcgccgtattcctctcgatggtggagatagcatatcggttgagcgcctcagcggcgctatgacgaatgccgtttacgtggtacatccacccgataacattgaaaaagagactggtaaaaagacgccacttaagctgttacttcgggtgtatggtccgcaggtcgagcatataattgaccgagaaaacgaattgaacgtgctacgacgtcttgcgcggaagaagatagggcctcgactgctaggtacattcgcaaacggacgatttgaacaattcctaaatgctgtcactcttaccaacgcagatctgagggatcccgacacttcaaagcagatcgcgaagagaatgcgagaactccacgacggcattgagttgttggaagaggagaaggatgggggagctaatgttctcaagagttgggatacgtggtatgacagggtctcggaagccgccagctttttagatgagaagatcatgtccgggaaacggcaacttggtcatactcgaacgacgctggacacctggatggatcatggtttcgtttgcgggacagactggaagacattcagtgcgatggtgatgaaatatcggaagtacatcttcgagcgatacggcggctcaaaagtcgtccgcgatcatttagtcttcgcccatagcgatacacaatatggcaatatcctccgccttcgacctgatgacaagaagtcgcccttgctacagcctaattatgagcacaagcaactggtagtcatcgacttcgagtattctgccgccaatgttagagggttagaattcgcaaaccatttcacagaatggtgctatgactatcacgccgaagacaaccccggtacatgcaaaatttccatgtacccgaacttagaggagcagcaccgatttgtgaaggcttacgtcgttcacaaacctgagtaccctcatcctggagcatctactccggtcctgacacctttggccaccccaacaatggaaccttcgacgccgagtctgaacccctcaatgaccggatccactagctcgataaaagaattcatgctagatgctcgtgttcctacaggaggctggagggaggaagagaagcgtcaggaagagcagattgaggaacaaatccaggctttgattgaggagactcaattatggcgtaccgtcaacagcgcgttttgggtggcctggggtatcatgcaagctaatattcccggctatgtcccatcaggagaagcgggtgatgccgcgacccggagtccggaggaagaagaggaggaccctgatgcattcgattatctaggatatgctcaggatagggccatgtttttctggggagattgcgtgcgcatcggtcttgtgaaggtagaggatctgccggagaagattcgggccattctgaaaattactgaatactag

SEQ ID NO: 34684 - protein, 777 aa, Muscodor strobelii
  misc_feature: SGI Peptide ID NO. 571994
  misc_feature (319)..(609): Pfam Id: PF01636 Pfam Desc: Phosphotransferase enzyme family
  misc_feature (276)..(323): Pfam Id: PF04428 Pfam Desc: Choline kinase N terminus
  misc_feature (348)..(601): Pfam Id: PF01633 Pfam Desc: Choline/ethanolamine kinase
  misc_feature (276)..(318): Pfam Id: PF04428 Pfam Desc: Choline kinase N terminus
  misc_feature (14)..(776): NCBI GI: 171680099 Blast Desc: protein product [Podospora anserina] gi|170939676|emb|CAP64902.1| protein product [Podospora anserina]
  misc_feature (1)..(777): NCBI GI: 256727064 Blast Desc: NECHADRAFT_76673 [Nectria haematococca mpVI 77-13-4]
  misc_feature (37)..(776): NCBI GI: 261353290 Blast Desc: choline kinase [Verticillium albo-atrum VaMs.102]
  misc_feature (16)..(777): NCBI GI: 46136047 Blast Desc: FG09539.1 [Gibberella zeae PH-1]
  misc_feature (112)..(776): NCBI GI: 38567241 Blast Desc: related to choline kinase [Neurospora crassa]
  misc_feature (14)..(777): NCBI GI: 39971081 Blast Desc: MGG_03007 [Magnaporthe grisea 70-15] gi|145017151|gb|EDK01514.1| MGG_03007 [Magnaporthe grisea 70-15]
  misc_feature (112)..(774): NCBI GI: 164427253 Blast Desc: NCU03176 [Neurospora crassa OR74A] gi|157071670|gb|EAA35346.2| conserved [Neurospora crassa OR74A]
  misc_feature (134)..(777): NCBI GI: 149210631 Blast Desc: MGCH7_ch7g788 [Magnaporthe grisea 70-15] gi|86196743|gb|EAQ71381.1| MGCH7_ch7g788 [Magnaporthe grisea 70-15]
  misc_feature (4)..(777): NCBI GI: 156031082 Blast Desc: SS1G_14149 [Sclerotinia sclerotiorum 1980] gi|154700540|gb|EDO00279.1| SS1G_14149 [Sclerotinia sclerotiorum 1980]
  misc_feature (38)..(777): NCBI GI: 116193187 Blast Desc: CHGG_06311 [Chaetomium globosum CBS 148.51] gi|88182224|gb|EAQ89692.1| CHGG_06311 [Chaetomium globosum CBS 148.51]
MSSSTPNLPSGEAHPLRSAMKHDDDSERAADSGSSIKAVQIAEPEPEPSSPEDSLPRKQFSAGLSRRLSGRPAVLPTNSSRTSLLSQTSVEALASLQSRNLPQPPGMEPSQPEHHHHHHHRHRLDRMGERLIAQVAEWIDHEKAKKSHRKSRHITSSRRKTHADDSQGTEAQPDSSKSRRYSIDSQSSDVSLDRLQKIIDDSMTSLGLSGIPHYSPKPGKKSQRRRSLHLHRTASSDTEFFDGDILVPNCDAVLDNSKTMSYSGGNAGGDEEIASISKRKEDKERQAWLTFKNEIIRLAHTLRLKGWRRIPLDGGDSISVERLSGAMTNAVYVVHPPDNIEKETGKKTPLKLLLRVYGPQVEHIIDRENELNVLRRLARKKIGPRLLGTFANGRFEQFLNAVTLTNADLRDPDTSKQIAKRMRELHDGIELLEEEKDGGANVLKSWDTWYDRVSEAASFLDEKIMSGKRQLGHTRTTLDTWMDHGFVCGTDWKTFSAMVMKYRKYIFERYGGSKVVRDHLVFAHSDTQYGNILRLRPDDKKSPLLQPNYEHKQLVVIDFEYSAANVRGLEFANHFTEWCYDYHAEDNPGTCKISMYPNLEEQHRFVKAYVVHKPEYPHPGASTPVLTPLATPTMEPSTPSLNPSMTGSTSSIKEFMLDARVPTGGWREEEKRQEEQIEEQIQALIEETQLWRTVNSAFWVAWGIMQANIPGYVPSGEAGDAATRSPEEEEEDPDAFDYLGYAQDRAMFFWGDCVRIGLVKVEDLPEKIRAILKITEY

SEQ ID NO: 34685 - DNA, 3269 bp, Muscodor strobelii
  misc_feature: SGI EST ID NO. CUFF.82608.0
  misc_feature: Variant of the nucleotide sequence at SEQ ID NO 34683
tgtgaaccccccagcacatgcagcatagctggcacgtgctacatttattccctgtgaaaggccaggcaatcgaacaaaattttgactgcatttcgcatacaagcgaaagtcagcattgccttttcacgaccgagttgaaaaatccaggacggggctttccctacgtacacagagctcttttgaactttctacctcacgctcttactcactgtcaaatcggttgatccattgcgacggcacttagaccgcctctagccacctgcacgtgcccgcgtcgtgttgctttgtctggattttgtgccacccaatcaagctcgtcaccgaagaaagcagtatcagttgcttgcttgcaatatttagagctttcgtcagtggcttcgaaaacacaatagccatcgccgttacgtaactcattacatccgtccaagctattccttttccagagacgccactacgtctcctgattgaaccgaggggtaggcaggcggcttatcagctagctaaccacaccactcaacactacgccgcgaccaggggaccctaatcgcaaaccgctccagcccagcgaaaaggcaaggggcttacttctacctcaccataaatctcaggacacattcttgtgaaagtgtgacacagcagattcatgggtctagccctgaccgcctgataacgtccattccttcggatcccatatcccctgccatcttactgtccacgaggtgattgacccttatcaggctaccgagatcagttccttaaaagacagtgcttcggtcagaatgtcgtcttccacacccaatcttcccagtggtgaggcccatccgcttcgttccgccatgaaacacgacgacgacagcgaaagagcggcggactcgggctcgagcatcaaagcggtacaaatagccgagcccgaacccgaaccaagtagccctgaggatagcctacctaggaagcagttttctgcaggtctttcgcgacgacttagtggacgccctgccgtcttgcctaccaactcatcgagaacatcgcttctcagccaaacaagtgtggaagccctggctagtttgcaaagccgaaacttgcctcagccacctggtatggaaccttcccagccggaacatcatcatcatcatcatcaccgacatcgactggatcgcatgggcgagagactcattgcccaggttgcagagtggatagatcatgaaaaggcaaagaaatcgcacagaaagtcaagacacataacttcgagccgaagaaaaactcatgcagatgattctcaagggacagaagcccaacccgacagcagtaaatctaggagatactccatcgactcacagtccagtgatgtttcgcttgacagacttcaaaagatcattgatgacagcatgacttctttgggcctgagtggaattcctcattacagcccgaagccaggcaagaagtctcagcgaagacgatctttgcacttgcacagaaccgcttcttctgacaccgaattcttcgacggggatattctcgtaccgaactgcgatgctgttcttgataattcgaagacaatgagttattccgggggcaacgctggtggagacgaggagatcgcgtctatatcaaaacgtaaagaagataaggaacgacaagcatggctcactttcaagaacgaaatcatccgccttgctcatacgctgagactcaaggggtggcgccgtattcctctcgatggtggagatagcatatcggttgagcgcctcagcggcgctatgacgaatgccgtttacgtggtacatccacccgataacattgaaaaagagactggtaaaaagacgccacttaagctgttacttcgggtgtatggtccgcaggtcgagcatataattgaccgagaaaacgaattgaacgtgctacgacgtcttgcgcggaagaagatagggcctcgactgctaggtacattcgcaaacggacgatttgaacaattcctaaatgctgtcactcttaccaacgcagatctgagggatcccgacacttcaaagcagatcgcgaagagaatgcgagaactccacgacggcattgagttgttggaagaggagaaggatgggggagctaatgttctcaagagttgggatacgtggtatgacagggtctcggaagccgccagctttttagatgagaagatcatgtccgggaaacggcaacttggtcatactcgaacgacgctggacacctggatggatcatggtttcgtttgcgggacagactggaagacattcagtgcgatggtgatgaaatatcggaagtacatcttcgagcgatacggcggctcaaaagtcgtccgcgatcatttagtcttcgcccatagcgatacacaatatggcaatatcctccgccttcgacctgatgacaagaagtcgcccttgctacagcctaattatgagcacaagcaactggtagtcatcgacttcgagtattctgccgccaatgttagagggttagaattcgcaaaccatttcacagaatggtgctatgactatcacgccgaagacaaccccggtacatgcaaaatttccatgtacccgaacttagaggagcagcaccgatttgtgaaggcttacgtcgttcacaaacctgagtaccctcatcctggagcatctactccggtcctgacacctttggccaccccaacaatggaaccttcgacgccgagtctgaacccctcaatgaccggatccactagctcgataaaagaattcatgctagatgctcgtgttcctacaggaggctggagggaggaagagaagcgtcaggaagagcagattgaggaacaaatccaggctttgattgaggagactcaattatggcgtaccgtcaacagcgcgttttgggtggcctggggtatcatgcaagctaatattcccggctatgtcccatcaggagaagcgggtgatgccgcgacccggagtccggaggaagaagaggaggaccctgatgcattcgattatctaggatatgctcaggatagggccatgtttttctggggagattgcgtgcgcatcggtcttgtgaaggtagaggatctgccggagaagattcgggccattctgaaaattactgaatactagatagcggaagcgaacagcaaaacgctggcaattttgtaagccaggatcctcgtaagagtgtcatatcgcccgttccagttgcaaagtttcctcaacatcccatcgggtggaaatatgatgccttttcgagatcccgatgggtgaaatacacggtcg

SEQ ID NO: 34686 - DNA, 963 bp, Muscodor strobelii
  misc_feature: SGI cDNA ID NO. 571995
  misc_feature: Reduced expression when VOC is produced
  misc_feature: Encodes the peptide sequence at SEQ ID NO 34687
atgtccacaacagcatctttcaactacatagacacatcggctcaagcacccgggactaaggcctggacaaaagtcgacgcagattacagctcatacaccaggcaagccgtgacccgcccagtcgagaatattcgcggtcgcgaagtagcattcgggacggatatatccggatttggcgtcgtgcactcaccactgccctcgaatttgaacgcaaagagctttgaagacgatgcagcagttcggggaccatactacgacgacattgagcgaattctaagacgtgactgcgaggcgctgactagcagcggagaagcagggaagaaagttcataaggtcgtgatcttcgatcacacgattcgaagacgaaaccctgattctgcgcgtgcaccagtgcagcaggtccatgtcgaccagacgactgctgcggctatagcacgcgtgcgcagacacttacctgctggagaggcggaggaactattgaagcctggtcggagattccaactcatcaatgtctggcggccgattggccatgctgcatctgatcacccgctcgcggtgatagatttccggactacggagccgaaagacttcatccccgtagatctgctctaccccaagcgggagcgcgcagactcaggcacagtcgtagatgatgatgacagaggcaaggaagttagacccgacgaggataagatacattcgacagaaggttatgaggtccgcggtgagacgatgagcgttgcgccgaatgagaagcatcggttttattatgtcaaggatatgacgcctgatgaggttttgctgttgaagtgttatgattcttggggtcagggagaacagtatggaaaggaggggttggcggctaggacgccccatactgcttttgaagaccctgcgacgccagcagatgcgaagccgagggagagtatcgaagttcgagctctggtgttttatgatcagtag

SEQ ID NO: 34687 - protein, 320 aa, Muscodor strobelii
  misc_feature: SGI Peptide ID NO. 571995
  misc_feature (3)..(319): NCBI GI: 169601964 Blast Desc: SNOG_03859 [Phaeosphaeria nodorum SN15] gi|111067944|gb|EAT89064.1| SNOG_03859 [Phaeosphaeria nodorum SN15]
  misc_feature (3)..(318): NCBI GI: 256722714 Blast Desc: NECHADRAFT_53114 [Nectria haematococca mpVI 77-13-4]
  misc_feature (3)..(319): NCBI GI: 189193909 Blast Desc: conserved [Pyrenophora tritici-repentis Pt-1C-BFP] gi|187978857|gb|EDU45483.1| conserved [Pyrenophora tritici-repentis Pt-1C-BFP]
  misc_feature (1)..(320): NCBI GI: 39968025 Blast Desc: MGG_02105 [Magnaporthe grisea 70-15] gi|145012987|gb|EDJ97628.1| MGG_02105 [Magnaporthe grisea 70-15]
  misc_feature (1)..(320): NCBI GI: 116182728 Blast Desc: CHGG_01992 [Chaetomium globosum CBS 148.51] gi|88186289|gb|EAQ93757.1| CHGG_01992 [Chaetomium globosum CBS 148.51]
  misc_feature (3)..(319): NCBI GI: 85111502 Blast Desc: NCU00847 [Neurospora crassa OR74A] gi|28925721|gb|EAA34731.1| conserved [Neurospora crassa OR74A]
  misc_feature (3)..(318): NCBI GI: 46115864 Blast Desc: FG03774.1 [Gibberella zeae PH-1]
  misc_feature (3)..(319): NCBI GI: 171694716 Blast Desc: protein product [Podospora anserina] gi|170947600|emb|CAP59761.1| protein product [Podospora anserina]
  misc_feature (3)..(319): NCBI GI: 255935753 Blast Desc: Pc13g04680 [Penicillium chrysogenum Wisconsin 54-1255] gi|211583523|emb|CAP91537.1| Pc13g04680 [Penicillium chrysogenum Wisconsin 54-1255]
  misc_feature (2)..(319): NCBI GI: 169856373 Blast Desc: CC1G_08491 [Coprinopsis cinerea okayama7#130] gi|116504125|gb|EAU87020.1| CC1G_08491 [Coprinopsis cinerea okayama7#130]
  misc_feature: Useful for introducing or modulating the production of volatile compounds
MSTTASFNYIDTSAQAPGTKAWTKVDADYSSYTRQAVTRPVENIRGREVAFGTDISGFGVVHSPLPSNLNAKSFEDDAAVRGPYYDDIERILRRDCEALTSSGEAGKKVHKVVIFDHTIRRRNPDSARAPVQQVHVDQTTAAAIARVRRHLPAGEAEELLKPGRRFQLINVWRPIGHAASDHPLAVIDFRTTEPKDFIPVDLLYPKRERADSGTVVDDDDRGKEVRPDEDKIHSTEGYEVRGETMSVAPNEKHRFYYVKDMTPDEVLLLKCYDSWGQGEQYGKEGLAARTPHTAFEDPATPADAKPRESIEVRALVFYDQ

SEQ ID NO: 34688 - DNA, 1405 bp, Muscodor strobelii
  misc_feature: SGI EST ID NO. CUFF.82421.0
  misc_feature: Variant of the nucleotide sequence at SEQ ID NO 34686
aacatggtgggttttggatgaatgtgggatgagtctgtatataacagttgttgctgctcgtcgtcgatcgacattactcactaggagaacaccaacaacagcacattagcagactaacgaccagctttgatcatttcagtaatcgatctacgagttcatgtcattgctagcatctcgaagcaacaaacttctcactcaaatcagcagcgtcgtcacgaaagcccaacatcgacccctcatcggcgccggacccggaacactatcggcctcacatccaccacaaagccaattttcaacaccaaccggacttaatatcaggcgtgactacacacaaccggccaagatgtccacaacagcatctttcaactacatagacacatcggctcaagcacccgggactaaggcctggacaaaagtcgacgcagattacagctcatacaccaggcaagccgtgacccgcccagtcgagaatattcgcggtcgcgaagtagcattcgggacggatatatccggatttggcgtcgtgcactcaccactgccctcgaatttgaacgcaaagagctttgaagacgatgcagcagttcggggaccatactacgacgacattgagcgaattctaagacgtgactgcgaggcgctgactagcagcggagaagcagggaagaaagttcataaggtcgtgatcttcgatcacacgattcgaagacgaaaccctgattctgcgcgtgcaccagtgcagcaggtccatgtcgaccagacgactgctgcggctatagcacgcgtgcgcagacacttacctgctggagaggcggaggaactattgaagcctggtcggagattccaactcatcaatgtctggcggccgattggccatgctgcatctgatcacccgctcgcggtgatagatttccggactacggagccgaaagacttcatccccgtagatctgctctaccccaagcgggagcgcgcagactcaggcacagtcgtagatgatgatgacagaggcaaggaagttagacccgacgaggataagatacattcgacagaaggttatgaggtccgcggtgagacgatgagcgttgcgccgaatgagaagcatcggttttattatgtcaaggatatgacgcctgatgaggttttgctgttgaagtgttatgattcttggggtcagggagaacagtatggaaaggaggggttggcggctaggacgccccatactgcttttgaagaccctgcgacgccagcagatgcgaagccgagggagagtatcgaagttcgagctctggtgttttatgatcagtagactatggaattatgaggtctgagttatgacagtgagctgagatagatgatgaatattgatctatagatgcggatatggctgtgcgtgcaactcggtgac

SEQ ID NO: 34689 - DNA, 1521 bp, Muscodor strobelii
  misc_feature: SGI cDNA ID NO. 571997
  misc_feature: Elevated expression when VOC is produced
  misc_feature: Encodes the peptide sequence at SEQ ID NO 34690
atgtcatcagtcactacgggtgatgaagttgatcatggacaccgcaagaaccagacaatataccatggagtattggacgctttgaatgaggaagctaaaaggctgtcaaaagctcgtggtcatccatcccgctacgccactgtccatgttctaatgctacaatggaaaggcgatgatcttggcgttgacgtcgaaattgatgccttggcccaggtctttacccacgacttcgcttttgacgtcgaggtattctcgattccgctagagaattcgcttaggcggctgactgccgcagtcaccgattgggttgaccttcatgacagtcctgacaatttattcatcctgtattatgcaggacatggcaagatatctaacactggaagaacggtcgtctggtcgaatcgcatggttcgagacgactattaccgagagctcaaatggagcgggtgcgaagacgtgctccacgaggcagtatcagataagctcttcctatacgactgctgctacgccgccgggcttgcggttgtcggggaggcaggcgtgtccgagactatatgtgcctccgggtttgaaacaatcgcgcctcggccgggtccgcactcattcacgactgccctgatatacgttcttcgtcagatggccgctctgtctcgtccattttcggtcagcgtcgtctacacggctgtcctgtcctatctcaaagagttggacccagcccagattgcgcccaacggcattcgcatagccgatgctcaagatcacgcgcactcgcttggcgaactgcgtcggcccggattcaggaggacgcccgtgcacttcgtcaggacgcatcatctacaggctccagacatacagcttttcacgctcgcgaaaaagccggacttcttcgatctgcttgcttccaaggatgcaagtcattccaacaagaccaaaacagccaaggatcgcgaccgcttaccggccataactctcaagatccaccctgcagccaatctcgtggcccaagatgccgatgcagctcgtcggtggctgcgcgggatccccctgccgtttgagcgcatcaccatagagacgggacagccccgagagaagactgagattaaagaggaaacatatttgcgcctgatgacgaaaatcgagagggtgatacgggagatgggaagaagaacagcgtcaatggtagaaaccgctgagcacacagacaaacaaatcagcagcatgcacaatacggggacgctgatcatgatgcaccagctgacaatagcagtaattatccttgccttctttggcgcaggcttcttctggcccagcgagagagagtttttgccgccgcgagcaggtttatacctcttcttcgaatgcatcttattcttccttacagtcacaggtacccttagtatttacaatatcgattggttgattagcagcatagaacggagaaggaaggaagaaggctcgctgttaatgtctgagagatggtttgacaatgaaagccggtttatcacttccgaaaaagcttag

SEQ ID NO: 34690 - protein, 506 aa, Muscodor strobelii
  misc_feature: SGI Peptide ID NO. 571997
  misc_feature (27)..(289): NCBI GI: 171686520 Blast Desc: protein product [Podospora anserina] gi|170943221|emb|CAP68874.1| protein product [Podospora anserina]
  misc_feature (27)..(292): NCBI GI: 116208088 Blast Desc: CHGG_03337 [Chaetomium globosum CBS 148.51] gi|88183934|gb|EAQ91402.1| CHGG_03337 [Chaetomium globosum CBS 148.51]
  misc_feature (32)..(291): NCBI GI: 46122199 Blast Desc: FG05477.1 [Gibberella zeae PH-1]
  misc_feature (35)..(300): NCBI GI: 256729718 Blast Desc: [Nectria haematococca mpVI 77-13-4]
  misc_feature (43)..(357): NCBI GI: 46109974 Blast Desc: FG01869.1 [Gibberella zeae PH-1]
  misc_feature (57)..(286): NCBI GI: 145608892 Blast Desc: MGG_06285 [Magnaporthe grisea 70-15] gi|145016318|gb|EDK00808.1| MGG_06285 [Magnaporthe grisea 70-15]
  misc_feature (14)..(359): NCBI GI: 154295188 Blast Desc: BC1G_13537 [Botryotinia fuckeliana B05.10] gi|150844220|gb|EDN19413.1| BC1G_13537 [Botryotinia fuckeliana B05.10]
  misc_feature (28)..(357): NCBI GI: 256728495 Blast Desc: NECHADRAFT_50976 [Nectria haematococca mpVI 77-13-4]
  misc_feature (65)..(328): NCBI GI: 164428836 Blast Desc: NCU00100 [Neurospora crassa OR74A] gi|157072302|gb|EAA27988.2| conserved [Neurospora crassa OR74A]
  misc_feature (39)..(234): NCBI GI: 154304045 Blast Desc: BC1G_09658 [Botryotinia fuckeliana B05.10] gi|150854293|gb|EDN29485.1| BC1G_09658 [Botryotinia fuckeliana B05.10]
  misc_feature: Useful for introducing or modulating the production of volatile compounds
MSSVTTGDEVDHGHRKNQTIYHGVLDALNEEAKRLSKARGHPSRYATVHVLMLQWKGDDLGVDVEIDALAQVFTHDFAFDVEVFSIPLENSLRRLTAAVTDWVDLHDSPDNLFILYYAGHGKISNTGRTVVWSNRMVRDDYYRELKWSGCEDVLHEAVSDKLFLYDCCYAAGLAVVGEAGVSETICASGFETIAPRPGPHSFTTALIYVLRQMAALSRPFSVSVVYTAVLSYLKELDPAQIAPNGIRIADAQDHAHSLGELRRPGFRRTPVHFVRTHHLQAPDIQLFTLAKKPDFFDLLASKDASHSNKTKTAKDRDRLPAITLKIHPAANLVAQDADAARRWLRGIPLPFERITIETGQPREKTEIKEETYLRLMTKIERVIREMGRRTASMVETAEHTDKQISSMHNTGTLIMMHQLTIAVIILAFFGAGFFWPSEREFLPPRAGLYLFFECILFFLTVTGTLSIYNIDWLISSIERRRKEEGSLLMSERWFDNESRFITSEKA

SEQ ID NO: 34691 - DNA, 3301 bp, Muscodor strobelii
  misc_feature: SGI EST ID NO. CUFF.82425.0
  misc_feature: Variant of the nucleotide sequence at SEQ ID NO 34689
gtccgacggtaggcttggtccccaggcagtgccaactcgccttcatggcttcggatatgtcatcagtcactacgggtgatgaagttgatcatggacaccgcaagaaccagacaatataccatggagtattggacgctttgaatgaggaagctaaaaggctgtcaaaagctcgtggtcatccatcccgctacgccactgtccatgttctaatgctacaatggaaaggcgatgatcttggcgttgacgtcgaaattgatgccttggcccaggtctttacccacgacttcgcttttgacgtcgaggtattctcgattccgctagagaattcgcttaggcggctgactgccgcagtcaccgattgggttgaccttcatgacagtcctgacaatttattcatcctgtattatgcaggacatggcaagatatctaacactggaagaacggtcgtctggtcgaatcgcatggttcgagacgactattaccgagagctcaaatggagcgggtgcgaagacgtgctccacgaggcagtatcagataagctcttcctatacgactgctgctacgccgccgggcttgcggttgtcggggaggcaggcgtgtccgagactatatgtgcctccgggtttgaaacaatcgcgcctcggccgggtccgcactcattcacgactgccctgatatacgttcttcgtcagatggccgctctgtctcgtccattttcggtcagcgtcgtctacacggctgtcctgtcctatctcaaagagttggacccagcccagattgcgcccaacggcattcgcatagccgatgctcaagatcacgcgcactcgcttggcgaactgcgtcggcccggattcaggaggacgcccgtgcacttcgtcaggacgcatcatctacaggctccagacatacagcttttcacgctcgcgaaaaagccggacttcttcgatctgcttgcttccaaggatgcaagtcattccaacaagaccaaaacagccaaggatcgcgaccgcttaccggccataactctcaagatccaccctgcagccaatctcgtggcccaagatgccgatgcagctcgtcggtggctgcgcgggatccccctgccgtttgagcgcatcaccatagagacgggacagccccgagagaagactgagattaaagaggaaacatatttgcgcctgatgacgaaaatcgagagggtgatacgggagatgggaagaagaacagcgtcaatggtagaaaccgctgagcacacagacaaacaaatcagcagcatgcacaatacggggacgctgatcatgatgcaccagctgacaatagcagtaattatccttgccttctttggcgcaggcttcttctggcccagcgagagagagtttttgccgccgcgagcaggtttatacctcttcttcgaatgcatcttattcttccttacagtcacaggtacccttagtatttacaatatcgattggttgattagcagcatagaacggagaaggaaggaagaaggctcgctgttaatgtctgagagatggtttgacaatgaaagccggtttatcacttccgaaaaagcttagccatctaccaatgttctggaagccaacttgtactggcaaacgccaccgtgctcatcagaaccagaacggttcaaggatgattccgggatatgagtcactcgatcagtgtgaaagggaggctggataccaaaagcaccagggcattgcatcatctttcacgagtcaaacactaggttcaagacgcgaatccgctctatcagctcctcatcctcagacgctgcgcttctcttccggaactctttcttggatttcctcttctgtttcttcttctttttcgaagccggctcttcgctgattggagcagatgtttcatcaacaccttcaagcttacttgggtagagaagtgccccttcttgcgtggcccttccggagacgtcgggcgcaagaggcggtccaagactttgagcgtcgccatcaattggctccaacttgatctggttttctggatggcgcggggggtccatatagtattgagggcggggaggaggcatgacggggttccccctaggattgaccgcagcggcagtaaacatattctggtagatcggcaaatcccgatagtcccagaggagcggagcctgggaacgggtagcttgagtagccaacaatttcccatctctattactcccattctgcgctttcgtcttctcagacatgcccttcttttcggatacgtcccaaaaggtgacagtgacaccccagtcgagtctcaagtgctcacactccagccagagcaggcggtaaagctcctcatcatagaccgggcggttcttcgatgtgaggaacccgttctcccgccaagtgtaaatccatcgagtcatccccgtggtgacatactccgagtccgacttgatgacaacagtggctagagacttcccctctgcgacctccgaagaccatgtgggcgcgatggacagccgtactaagtccaatgcccccaacacagcgcacagctcaacgcgctgtgagttttcgtcggtgacaggcagtatctcggagatattcaacgggttatcattgccaaagtataccccaattgccgggatagacgcccgtgtgcgatctccgtggaatcgacaaacgcccttggtcgctactactagtgagtagtcctctgatgcaatgccgcgcaggtgggtgaattttttctgcacctctacgtctcggagaccggtcgagcgacgatgctccttgggataaaatggcctgtacatggtgcttggttgttgtatgcacttgcagctctgggcgttgagaatgcagcctgtcggccagaggagaatcctgctatcacgatcgagtcgcgggcgatgcgtcagtattcctcttttctggtcgtcccgtgaatttgtgattagatcaagatcgctagagaatcggtgaatgacgtccgtgtaatgtggctgggttctatatcacatacaacggccactgtatgaccagggctttagattagatcatttccgacacgccgtgcttacggccttgcatgaatcgcgttgctggcctcatgaatgcttttagtgctagtaatctatgttttcccataattcacaaaagtgtattaaatctgtagggattatatatctatggcctcttacttagcagtcttgatgacagccgtcagctctaaatcaatatatctatctataccgtctctttgcgatctacagcgtactacaggtgaaatcgcagtcttcgtaagggataataaggatatctac

SEQ ID NO: 34692 - DNA, 657 bp, Muscodor strobelii
  misc_feature: SGI cDNA ID NO. 571998
  misc_feature: Encodes the peptide sequence at SEQ ID NO 34693
atggcatttacattccctcccgcttcatacgagatcaaatctccgcgcataataattcgaacaccagtacaagatgacaacgaagccttcattgcaatgctcagcgatgtccagaacttaccacccggagtaacagaggtgatgccgaatctcactccggagggccaaagtgcgcgtctggcaagatgggtaaaatcggcttctgagggcagaaatgccttcttagcaatcactttgcgagaaaacaacgagctcgtgggatatatgggcttcaactgcttccgcacaaaggaagaatatgacggaaccgaacccgagcgccaagagccgttactttctggcccggacggccgctatctcacagacttgggcatcaacatagacatcaagcatcgtcgaaagggctactcgtctgaagtactgtgccttgcgcttgaatttgcgttcaaagaactgcagtgccaactggttagaatggagaccagtctcttgaacgaaccttggagagctcttatgcgatcgatgggatttggggacctggaaaaacaggacaccgccacttataacaatgagttgagtttcgtatacattgttgatcgtcctacgtgggatagcatcagaagaggtctgcaggagagcaatacatggccgttatga

SEQ ID NO: 34693 - protein, 218 aa, Muscodor strobelii
  misc_feature: SGI Peptide ID NO. 571998
  misc_feature (77)..(178): Pfam Id: PF00583 Pfam Desc: Acetyltransferase (GNAT) family
  misc_feature (12)..(176): NCBI GI: 87121588 Blast Desc: acetyltransferase [Marinomonas sp. MED121] gi|86163120|gb|EAQ64397.1| acetyltransferase [Marinomonas sp. MED121]
  misc_feature (12)..(176): NCBI GI: 184158399 Blast Desc: acetyltransferase [Acinetobacter baumannii ACICU] gi|183209993|gb|ACC57391.1| Acetyltransferase, including N-acetylase of ribosomal protein [Acinetobacter baumannii ACICU]
  misc_feature (12)..(176): NCBI GI: 193077552 Blast Desc: Acetyltransferase GNAT family [Acinetobacter baumannii ATCC 17978]
  misc_feature (12)..(176): NCBI GI: 239501641 Blast Desc: Acetyltransferase (GNAT) family protein [Acinetobacter baumannii AB900]
  misc_feature (11)..(176): NCBI GI: 183598458 Blast Desc: PROSTU_01853 [Providencia stuartii ATCC 25827] gi|188020636|gb|EDU58676.1| PROSTU_01853 [Providencia stuartii ATCC 25827]
  misc_feature (12)..(176): NCBI GI: 169633347 Blast Desc: acetyltransferase [Acinetobacter baumannii SDF] gi|169795700|ref|YP_001713493.1| acetyltransferase [Acinetobacter baumannii AYE] gi|213157608|ref|YP_002319653.1| acetyltransferase
  misc_feature (12)..(176): NCBI GI: 260554762 Blast Desc: acetyltransferase gnat family [Acinetobacter baumannii ATCC 19606] gi|260411304|gb|EEX04601.1| acetyltransferase gnat family [Acinetobacter baumannii ATCC 19606]
  misc_feature (12)..(175): NCBI GI: 226953518 Blast Desc: acetyltransferase [Acinetobacter sp. ATCC 27244] gi|226835735|gb|EEH68118.1| acetyltransferase [Acinetobacter sp. ATCC 27244]
  misc_feature (12)..(176): NCBI GI: 283833143 Blast Desc: GCN5-related N-acetyltransferase [Citrobacter youngae ATCC 29220]
  misc_feature (12)..(176): NCBI GI: 260554243 Blast Desc: acetyltransferase gnat family protein [Acinetobacter sp. RUH2624] gi|260404623|gb|EEW98140.1| acetyltransferase gnat family protein [Acinetobacter sp. RUH2624]
MAFTFPPASYEIKSPRIIIRTPVQDDNEAFIAMLSDVQNLPPGVTEVMPNLTPEGQSARLARWVKSASEGRNAFLAITLRENNELVGYMGFNCFRTKEEYDGTEPERQEPLLSGPDGRYLTDLGINIDIKHRRKGYSSEVLCLALEFAFKELQCQLVRMETSLLNEPWRALMRSMGFGDLEKQDTATYNNELSFVYIVDRPTWDSIRRGLQESNTWPL

SEQ ID NO: 34694 - DNA, 2026 bp, Muscodor strobelii
  misc_feature: SGI EST ID NO. CUFF.82448.0
  misc_feature: Variant of the nucleotide sequence at SEQ ID NO 34692
cgagactcatcttggacactcaatagagcatcttcaattttatacgtcgattagaacgtctcgtctacggcaaagattgcgcttctgcctcgcatttcttcttattcctcgaagaataacacttaatgcagcgggtgtagtacatgctggtagcacttagagcttttacatagctggacacctaaggcccgtattgtttggagacattcgccatggcatttacattccctcccgcttcatacgagatcaaatctccgcgcataataattcgaacaccagtacaagatgacaacgaagccttcattgcaatgctcagcgatgtccagaacttaccacccggagtaacagaggtgatgccgaatctcactccggagggccaaagtgcgcgtctggcaagatgggtaaaatcggcttctgagggcagaaatgccttcttagcaatcactttgcgagaaaacaacgagctcgtgggatatatgggcttcaactgcttccgcacaaaggaagaatatgacggaaccgaacccgagcgccaagagccgttactttctggcccggacggccgctatctcacagacttgggcatcaacatagacatcaagcatcgtcgaaagggctactcgtctgaagtactgtgccttgcgcttgaatttgcgttcaaagaactgcagtgccaactggttagaatggagaccagtctcttgaacgaaccttggagagctcttatgcgatcgatgggatttggggacctggaaaaacaggacaccgccacttataacaatgagttgagtttcgtatacattgttgatcgtcctacgtgggatagcatcagaagaggtctgcaggagagcaatacatggccgttatgagttgcgatgttagacatgatccgacaacaatcggctcgcccgcgaagtaatcgccaaagtcgatatgccaaagttaatatacgataacccaatgctaaattaccatacgaacggctttgattatagagacgccatccacgttaagctcttatcactgcaaataagagagcagcaactatgaactacatatcccagattttacgtcgcatcaaggatagcagctggagcgttcgataacgagccaccagcttgatccaatgtgaaaagtcctcctgtgccatcaacagtaactttaaaaattaggatcattcatccccatttgagctttcgcggatgttgcttctgactggtgtcggggcgaaactgaaatccacagactagatcatttgaacagcaactgtcgcatggacgaatcttctggtctggctcggtgaatggctggcgtatagatgtagtcaataatcatacgaatgaagttgatgacttcgactctagatgacaaacgcgtcatcgacttgacagcttggagtcgcttccatattctcgcggacaatgccgcatgttaagccatgctggtttggaataggctgggtatttgtagcaactctaagcccatacggcaagaagtggcccatctcgatcctgggccgcaaactgtccacgcgattcatcgcttggagtcgataggatacgcgggcgtattcaaaacagcgcgtgttccctgagcacatcctacatcactaacatctcaaattcggatgtaggccctttcatatcgatatccgtcaacccgaacctcgtagccgccggtcaatccaacaagagactcatgcttcttgaatccgaccagtggcctccgaacagtcaccggggtcccgtcgtccaaaatcttgcgagtataagtcgtggtctcagggtctaaaaacgtgaagatgccgagtatgagaacgatcgaggcgaagacacccgttgtagcgtacgatccgatgccttgcgtggctgcaaggacaatccagataatcacaagcggtagctcaattgcgaggggaagccaatccggccacggccgcatgtacatcgtctgtggcattacaatgtgcaatgcgatcgacaaaatcgcgaaacagttatgtagatcggcgcgaaatgaattttcc

SEQ ID NO: 34695 - DNA, 639 bp, Muscodor strobelii
  misc_feature: SGI cDNA ID NO. 571999
  misc_feature: Encodes the peptide sequence at SEQ ID NO 34696
atgaagtctatccaagcagcaacactggctttggcagccggtgcattcgcgagtcccatcgccccgcgccaatccctaccgcccgacactgtctacggcgtcgaccccactaaacccttctacctaaccgcctacgccctcgatttcagcgagagctacacactacaacccttctacgtcagtggcatcaccacgctggggctccaagccgtgctcgaaggcggctccacgaatgcctcgtcgccacgcgccaacttcacactcagcggcagccactatggcacccagctgtattcatacaagcccggcatttgcacttcggctgcgtcctgccccacggaccctccgaatttgacctggagcaacgaccaacccgtcgataatcaatacctgacctttcaccaaggcgttgatcatcctagcttcggcggtctggctttctatggtgcctaccacggcggcgaccctgaggctggcgagagcaattatctagttgggggtagcgattcggatttgacggctgcattttctgtatgcgaccttaccactaatgccgagatcaagatcctgtcatatcacggaacgaacagcagttgcgtgccggttacggtgaatgccttccaggttgagggagcttga

SEQ ID NO: 34696 - protein, 212 aa, Muscodor strobelii
  misc_feature: SGI Peptide ID NO. 571999
MKSIQAATLALAAGAFASPIAPRQSLPPDTVYGVDPTKPFYLTAYALDFSESYTLQPFYVSGITTLGLQAVLEGGSTNASSPRANFTLSGSHYGTQLYSYKPGICTSAASCPTDPPNLTWSNDQPVDNQYLTFHQGVDHPSFGGLAFYGAYHGGDPEAGESNYLVGGSDSDLTAAFSVCDLTTNAEIKILSYHGTNSSCVPVTVNAFQVEGA

SEQ ID NO: 34697 - DNA, 1056 bp, Muscodor strobelii
  misc_feature: SGI EST ID NO. CUFF.82451.0
  misc_feature: Variant of the nucleotide sequence at SEQ ID NO 34695
tttaccttgacatcgtattgtgattgctcttctttcgtaggcctagtgtattgtcaatcgacatgcattacgcacaggtatatatattcgggcacttgaccacaagatctgagttggtggcatgagaataccagacaagcttacaatctactccagtctgctttctaaacatcccatctttaaacaacaacatcgtctctccatcaacatgaagtctatccaagcagcaacactggctttggcagccggtgcattcgcgagtcccatcgccccgcgccaatccctaccgcccgacactgtctacggcgtcgaccccactaaacccttctacctaaccgcctacgccctcgatttcagcgagagctacacactacaacccttctacgtcagtggcatcaccacgctggggctccaagccgtgctcgaaggcggctccacgaatgcctcgtcgccacgcgccaacttcacactcagcggcagccactatggcacccagctgtattcatacaagcccggcatttgcacttcggctgcgtcctgccccacggaccctccgaatttgacctggagcaacgaccaacccgtcgataatcaatacctgacctttcaccaaggcgttgatcatcctagcttcggcggtctggctttctatggtgcctaccacggcggcgaccctgaggctggcgagagcaattatctagttgggggtagcgattcggatttgacggctgcattttctgtatgcgaccttaccactaatgccgagatcaagatcctgtcatatcacggaacgaacagcagttgcgtgccggttacggtgaatgccttccaggttgagggagcttgaggcacaaggcacatagatcgagcataccacgttaatgtttaatattattatcctgtgcatcgttgtgttatcccctgatcattcgtactataagagatctcaagttataccatgttgatccagtagaagtgtaaactgtgaatgctcatagcatctggtccggtaatgacccggtaatgacccggtaatgaatagattttctaccctgg

SEQ ID NO: 34698 - DNA, 666 bp, Muscodor strobelii
  misc_feature: SGI cDNA ID NO. 572000
  misc_feature: Encodes the peptide sequence at SEQ ID NO 34699
atgcacttcaaggctcctctcattgctggcctcgctggtgtttcctccgccctaccagcgacgaatcagccaacatcacggtcttcgcccgtcctatcaacttcgaagggtttcaacgtgcgcttgagcgtgacggatccttcaaataattctggcctcgatgtgtcagggcaatacttatccggagcgcgtgtcggcgccggtgcctatatttccgtcttgagtaatgcacctggtcaagcattctatctcaatggcaccgaacaaggcacgggaaccgcgacgcaggatatcgtgggtgtataccctatcggcatctcgatcgcagatgccgacacatttgatttcttctacccagaagaacacgatgttggcgagaacatcaacggcaactccctattcacggtcagcgcactcgacaatccggttttagtcggtgctggcgatgctgctggtggccagttcgccgcttgctcgagagacttcgtcttttatggggataagacgactatcctcactctcagatatgtgtacgaaaatgaaatcgtgccttccgactgtgcgcctgtcgaactcggccttgaatgcgcaacactggaggacctacctgccgatgcaacttggaaccacgcatcggctcaggaggtatcatgtctatcgtactag

SEQ ID NO: 34699 - protein, 221 aa, Muscodor strobelii
  misc_feature: SGI Peptide ID NO. 572000
  misc_feature (7)..(218): NCBI GI: 261361426 Blast Desc: conserved [Verticillium albo-atrum VaMs.102]
  misc_feature (8)..(218): NCBI GI: 166714374 Blast Desc: [Stachybotrys elegans]
  misc_feature (30)..(218): NCBI GI: 253970746 Blast Desc: [Stachybotrys chartarum]
  misc_feature (7)..(218): NCBI GI: 46123505 Blast Desc: FG06130.1 [Gibberella zeae PH-1]
  misc_feature (1)..(220): NCBI GI: 145611892 Blast Desc: [Magnaporthe grisea 70-15] gi|145019116|gb|EDK03395.1| [Magnaporthe grisea 70-15]
  misc_feature (33)..(218): NCBI GI: 116192587 Blast Desc: CHGG_06011 [Chaetomium globosum CBS 148.51] gi|88181924|gb|EAQ89392.1| CHGG_06011 [Chaetomium globosum CBS 148.51]
  misc_feature (14)..(218): NCBI GI: 256731050 Blast Desc: NECHADRAFT_105345 [Nectria haematococca mpVI 77-13-4]
  misc_feature (27)..(218): NCBI GI: 145601495 Blast Desc: [Magnaporthe grisea 70-15] gi|145009561|gb|EDJ94217.1| [Magnaporthe grisea 70-15]
MHFKAPLIAGLAGVSSALPATNQPTSRSSPVLSTSKGFNVRLSVTDPSNNSGLDVSGQYLSGARVGAGAYISVLSNAPGQAFYLNGTEQGTGTATQDIVGVYPIGISIADADTFDFFYPEEHDVGENINGNSLFTVSALDNPVLVGAGDAAGGQFAACSRDFVFYGDKTTILTLRYVYENEIVPSDCAPVELGLECATLEDLPADATWNHASAQEVSCLSY

SEQ ID NO: 34700 - DNA, 1143 bp, Muscodor strobelii
  misc_feature: SGI EST ID NO. CUFF.82460.0
  misc_feature: Variant of the nucleotide sequence at SEQ ID NO 34698
aatcagtgagcacgatgttttcattgcccgtacccgtaaccagatacggcgagaacaaagtcggtgactaggtagaagattttaattataaaggcaggttcttctgtcatcagatggataagatcattcacagcacatctacaaacaaccgtagcaacatcacattaactactaaacgctcaattttcattatagtcttacgtttgatcatatagcgttcgcttgaaatcaaagcgacaagatgcacttcaaggctcctctcattgctggcctcgctggtgtttcctccgccctaccagcgacgaatcagccaacatcacggtcttcgcccgtcctatcaacttcgaagggtttcaacgtgcgcttgagcgtgacggatccttcaaataattctggcctcgatgtgtcagggcaatacttatccggagcgcgtgtcggcgccggtgcctatatttccgtcttgagtaatgcacctggtcaagcattctatctcaatggcaccgaacaaggcacgggaaccgcgacgcaggatatcgtgggtgtataccctatcggcatctcgatcgcagatgccgacacatttgatttcttctacccagaagaacacgatgttggcgagaacatcaacggcaactccctattcacggtcagcgcactcgacaatccggttttagtcggtgctggcgatgctgctggtggccagttcgccgcttgctcgagagacttcgtcttttatggggataagacgactatcctcactctcagatatgtgtacgaaaatgaaatcgtgccttccgactgtgcgcctgtcgaactcggccttgaatgcgcaacactggaggacctacctgccgatgcaacttggaaccacgcatcggctcaggaggtatcatgtctatcgtactagactacgatgatgaatggaaggacgaaaattattcgtttcaagtcgatacatattcaataattgtaattacttcccctagaatcactaggcacataaggtgtttgacgtctagtggtgtttgaagaaatcagaccctcagatggcaattgcttagagcattgatcatgatgagaaagttcaagcgctttttacatttgaaataatcaaataatactttctatgcaaatagatcatcg

SEQ ID NO: 34701 - DNA, 231 bp, Muscodor strobelii
  misc_feature: SGI cDNA ID NO. 572001
  misc_feature: Elevated expression when VOC is produced
  misc_feature: Encodes the peptide sequence at SEQ ID NO 34702
gtcaacggtgctgatcttacacccgacttgatgaactggacgagtctcgtctacggtgctccgacgctcttcattctcatttggtggtttgtggacgcgcataaatggttcaagggaccgaagatcaacatccagcaccgaatgctttatcacgacggagtcgaggctacgcctgagaagaaagactccgatgttgagagtggaaaaatgaccaaggccgtatctccatga

SEQ ID NO: 34702 - protein, 76 aa, Muscodor strobelii
  misc_feature: SGI Peptide ID NO. 572001
  misc_feature (1)..(49): NCBI GI: 169602753 Blast Desc: SNOG_04379 [Phaeosphaeria nodorum SN15] gi|160706247|gb|EAT88139.2| SNOG_04379 [Phaeosphaeria nodorum SN15]
  misc_feature (1)..(75): NCBI GI: 242787498 Blast Desc: amino acid permease [Talaromyces stipitatus ATCC 10500] gi|218721167|gb|EED20586.1| amino acid permease [Talaromyces stipitatus ATCC 10500]
  misc_feature (1)..(66): NCBI GI: 212543701 Blast Desc: amino acid permease [Penicillium marneffei ATCC 18224] gi|210066912|gb|EEA21005.1| amino acid permease [Penicillium marneffei ATCC 18224]
  misc_feature (3)..(74): NCBI GI: 189204003 Blast Desc: amino acid permease [Pyrenophora tritici-repentis Pt-1C-BFP] gi|187985436|gb|EDU50924.1| amino acid permease [Pyrenophora tritici-repentis Pt-1C-BFP]
  misc_feature (1)..(69): NCBI GI: 159129462 Blast Desc: amino acid permease [Aspergillus fumigatus A1163]
  misc_feature (1)..(48): NCBI GI: 169783464 Blast Desc: [Aspergillus oryzae RIB40] gi|83774938|dbj|BAE65061.1| protein product [Aspergillus oryzae]
  misc_feature (1)..(48): NCBI GI: 145232573 Blast Desc: An02g05920 [Aspergillus niger] gi|134056646|emb|CAK44207.1| protein product [Aspergillus niger]
  misc_feature (1)..(48): NCBI GI: 238493261 Blast Desc: gaba-specific permease, [Aspergillus flavus NRRL3357] gi|220696361|gb|EED52703.1| gaba-specific permease, [Aspergillus flavus NRRL3357]
  misc_feature (1)..(72): NCBI GI: 121715488 Blast Desc: amino acid permease [Aspergillus clavatus NRRL 1] gi|119403510|gb|EAW13927.1| amino acid permease [Aspergillus clavatus NRRL 1]
  misc_feature (1)..(69): NCBI GI: 119481013 Blast Desc: amino acid permease [Neosartorya fischeri NRRL 181] gi|119408689|gb|EAW18638.1| amino acid permease [Neosartorya fischeri NRRL 181]
  misc_feature: Useful for introducing or modulating the production of volatile compounds
VNGADLTPDLMNWTSLVYGAPTLFILIWWFVDAHKWFKGPKINIQHRMLYHDGVEATPEKKDSDVESGKMTKAVSP

SEQ ID NO: 34703 - DNA, 697 bp, Muscodor strobelii
  misc_feature: SGI EST ID NO. CUFF.82464.0
  misc_feature: Variant of the nucleotide sequence at SEQ ID NO 34701
cttatcttcattaaaatcgctttcgtgcgcaatcactttcgaagaggaccctggcatcttggtgctttcagcctacctgttggcattgccggatgcgcatttgttctcgtcatcataccgttcttcaacttccctcaggtcaacggtgctgatcttacacccgacttgatgaactggacgagtctcgtctacggtgctccgacgctcttcattctcatttggtggtttgtggacgcgcataaatggttcaagggaccgaagatcaacatccagcaccgaatgctttatcacgacggagtcgaggctacgcctgagaagaaagactccgatgttgagagtggaaaaatgaccaaggccgtatctccatgagtacatgatgcatttcttggaaaagccgattacaatggctctttttttggataagctaccacgaataatcacactttgaagtaatctgttgcgaatcttaatggccctggcttcgaattgatttgtttccctgatgattttcattacaacttctcgagctcatacttgtgaggaaagtaatagccggcgccacatcgcgccgaattgatagaagccgagagtcctcctccagcttcgagcaatgtccagcaacgacaaagaatcatggcgcatgcatcacaatacctcaagcgccaattcgtagatacagatgaatgttctcgaaggc

SEQ ID NO: 34704 - DNA, 261 bp, Muscodor strobelii
  misc_feature: SGI cDNA ID NO. 572002
  misc_feature: Elevated expression when VOC is produced
  misc_feature: Encodes the peptide sequence at SEQ ID NO 34705
atgccccctaaactacccagtggtacgaaagcagcagcaggccgtcgagataaaaagatgacgactcgaagcctggcgaaaggtatggctgatcaacgggaagagatcatcaagctcaaagagaaactttccgaactgcaggacaagtcaaagaccgatccagaggcccaaaaagaggctgacgcactccagaaaagcatcgacgcaatggaggttgatattcaagacgaggacccagccagtgccaagcccgaccttttc

SEQ ID NO: 34705 - protein, 87 aa, Muscodor strobelii
  misc_feature: SGI Peptide ID NO. 572002
  misc_feature: Useful for introducing or modulating the production of volatile compounds
MPPKLPSGTKAAAGRRDKKMTTRSLAKGMADQREEIIKLKEKLSELQDKSKTDPEAQKEADALQKSIDAMEVDIQDEDPASAKPDLF

SEQ ID NO: 34706 - DNA, 466 bp, Muscodor strobelii
  misc_feature: SGI EST ID NO. CUFF.82466.0
  misc_feature: Variant of the nucleotide sequence at SEQ ID NO 34704
ttgatactgaaagagctacaatataatccattaaaactatagatccagaaactgctagaatatgggtatggctttctataaatctgggacattcctttatcattattattcgaattccatcaggcattccatcttcgaaatccaacatgccccctaaactacccagtggtacgaaagcagcagcaggccgtcgagataaaaagatgacgactcgaagcctggcgaaaggtatggctgatcaacgggaagagatcatcaagctcaaagagaaactttccgaactgcaggacaagtcaaagaccgatccagaggcccaaaaagaggctgacgcactccagaaaagcatcgacgcaatggaggttgatattcaagacgaggacccagccagtgccaagcccgaccttttcgtaagccaaaagcgagaattagatgaagcatccaagtcccaggaatccgcgtctgaagc

SEQ ID NO: 34707 - DNA, 369 bp, Muscodor strobelii
  misc_feature: SGI cDNA ID NO. 572003
  misc_feature: Elevated expression when VOC is produced
  misc_feature: Encodes the peptide sequence at SEQ ID NO 34708
atgtgcttctacgaccagacgcgctggaaatgcggctactggaggtggggtgcattccgaatgcagtgttataaagagtaccgaactggacagacttgcgggttgaagttcgtctacgacaccaaaatcgaggacggccattgcaagctttgtcggaacaaagcaaaaaagcaacgcagattcgacaaactgagcagtgacgtcactcgatggttagcgggacctgaccgccgtacagcgtcgatacagaaagcacgaaaagacatgatagagatccaacgcacgattaagagcatgatgaagcagcacaagcaaatagcactagctaccgtgctccagatgaccgtcatccgcgattcatatcaatag

SEQ ID NO: 34708 - protein, 122 aa, Muscodor strobelii
  misc_feature: SGI Peptide ID NO. 572003
  misc_feature (1)..(103): NCBI GI: 171682792 Blast Desc: protein product [Podospora anserina] gi|170941355|emb|CAP67005.1| protein product [Podospora anserina]
  misc_feature (1)..(103): NCBI GI: 145612930 Blast Desc: MGG_08337 [Magnaporthe grisea 70-15] gi|145020016|gb|EDK04244.1| MGG_08337 [Magnaporthe grisea 70-15]
  misc_feature (1)..(103): NCBI GI: 256724838 Blast Desc: NECHADRAFT_29257 [Nectria haematococca mpVI 77-13-4]
  misc_feature (1)..(103): NCBI GI: 46121959 Blast Desc: FG05357.1 [Gibberella zeae PH-1]
  misc_feature (1)..(105): NCBI GI: 85091213 Blast Desc: NCU05948 [Neurospora crassa OR74A] gi|28920177|gb|EAA29556.1| [Neurospora crassa OR74A]
  misc_feature (1)..(112): NCBI GI: 261361463 Blast Desc: conserved [Verticillium albo-atrum VaMs.102]
  misc_feature (1)..(109): NCBI GI: 225679094 Blast Desc: conserved [Paracoccidioides brasiliensis Pb03]
  misc_feature (1)..(109): NCBI GI: 226282849 Blast Desc: conserved [Paracoccidioides brasiliensis Pb01]
  misc_feature (1)..(109): NCBI GI: 226288111 Blast Desc: conserved [Paracoccidioides brasiliensis Pb18]
  misc_feature (1)..(85): NCBI GI: 189201137 Blast Desc: conserved [Pyrenophora tritici-repentis Pt-1C-BFP] gi|187984004|gb|EDU49492.1| conserved [Pyrenophora tritici-repentis Pt-1C-BFP]
  misc_feature: Useful for introducing or modulating the production of volatile compounds
MCFYDQTRWKCGYWRWGAFRMQCYKEYRTGQTCGLKFVYDTKIEDGHCKLCRNKAKKQRRFDKLSSDVTRWLAGPDRRTASIQKARKDMIEIQRTIKSMMKQHKQIALATVLQMTVIRDSYQ

SEQ ID NO: 34709 - DNA, 930 bp, Muscodor strobelii
  misc_feature: SGI EST ID NO. CUFF.82472.0
  misc_feature: Variant of the nucleotide sequence at SEQ ID NO 34707
agacgaaccgatgcttttaagaaagtgacgtttgtttctaagtccaagtccaggttgaaagattgaaatactctgttcagatcaatcaatgtctttcttataaacggatatatggtgtcaatcatgtgcttctacgaccagacgcgctggaaatgcggctactggaggtggggtgcattccgaatgcagtgttataaagagtaccgaactggacagacttgcgggttgaagttcgtctacgacaccaaaatcgaggacggccattgcaagctttgtcggaacaaagcaaaaaagcaacgcagattcgacaaactgagcagtgacgtcactcgatggttagcgggacctgaccgccgtacagcgtcgatacagaaagcacgaaaagacatgatagagatccaacgcacgattaagagcatgatgaagcagcacaagcaaatagcactagctaccgtgtgaccgaggtagaattgctccagatgaccgtcatccgcgattcatatcaatagacgacactctcgcgcagagatcccttcttgctccagttcgcctcaggtgtacccacgttcccgcatctgctctatctctgaatcatcacaataggctggattcgggacatggaactttctttcttattaggctgctattcggaaagcatgactcaatccagtcacagaacaggaaggacattttgaacgttgcgcctccgtaggccataaacaattagtgggacatactaaccttgtcaacattttcaacccgttcaacccaatttgctacttacgttgatattgagattagcttgggttgggtcaacaatgttggcgaactgcattggccagttgggttgatgggagaaccttgacacatcctttcaccttgatccactcgattcgttcagaggtttttctatctaatattccaattcag

SEQ ID NO: 34710 - DNA, 1743 bp, Muscodor strobelii
  misc_feature: SGI cDNA ID NO. 572004
  misc_feature: Elevated expression when VOC is produced
  misc_feature: Encodes the peptide sequence at SEQ ID NO 34711
atgacagagcgaggatgcgggacgaataatcgcgaaatcgagaacgactcgatcagacagcagtctaaggtcaccgaaaagtctatggttcaagaccgaggcgaggcgaaagggtgtcagacacagagtaatgatcgcgtcattggaagtaactcgggtgtgctcttgcattgcgataccaaacgtgactcttcacacacctcgcctcctaccacgaagcttaagcctccagtaaccaaggagaccctgaaggagttagacttcactgagctcatctgtaacgcgaagttacgccatgacatcaattttgatcccggtcttcatttgcggccagacatagatggcgagaagggtaagatgaagcagttaatggctgatcagttctgggagaccctccaaactcagctagcccagttcttgacggacagacgcagcttcatgattcagcacggaaatattgaaagctggtcgctaccattgcttctgcgatcaataagggatattcttgtcacgataataccgacacacgatcgtttatatcttcatcaagcctttgatgttgaactgatcatgcaacagtttaacaacggagtggtcgatgtagagaagctggcttgctggctgtctgggctgctcaagtcacactgtgcccctatgagagatcaatgggcggataagatgtacggccagatagccaagggcaacaggacgaacgatgtgagcttgctagtgcaaggtttccgtagcctcctcagcttgttggaggctatgagattggacattgcgaatcaccagatcagaatgctacgccctacgatgatcgaggataccgtacgtttcgaacaggcctactttgttgacgagattcgacaacggcgattagacgcatcttccgctcgcgaatggtactcacgactcgaccgcgcacccgagcctgcttcggtacaggcatttagaaacatagctgtcttcttcgaaggcctgataagcttgatcatgccaacctctacgcaaacgcaacctgttttgcctgttaccttcgattccgacaaaagaagaatcatggcactccgcagtgacatgctggacgctatcaatcttgggatttgtatgcgtacttacgatttgtcgcagcatttggaaaggaacgctggggccgtcgctgtgatcccatcgtgtcatttggcggcacctcaatcatatgctcccgaatctgttagagcaggatcgagcgatgggagactcagacgacaaaaactttacgactcactcgttctcttacttcgaagctctagcttcgacctgcatggcgcgtcgcaatggaagacaatgcatgaatctcttgctctgcagattttccgattcgccagcctaccgaagtgtatgatccaaagtatcgagaagagtctcgaccgtaacttgagcaatttgcagtcacctctctttctcgatgcggagcaaatgtttcgccagcacctactggcagagttacagttgcgtgttattgacttcaagagactgacggctgttgggcttttttcggtagcaactggcagtcgtgtggaacaacaaaataaagctgagagccactcttgggatagcgcccgcgagagtagcccagatcgcttcaccccgaaggccggtgaaaatggtggtgttgacgacatggcaacccggataggacacttgggactgctacattggcgagtgtgggagcgcctggtctatctggtcgatcattag

SEQ ID NO: 34711 - protein, 580 aa, Muscodor strobelii
  misc_feature: SGI Peptide ID NO. 572004
  misc_feature (96)..(580): Pfam Id: PF05794 Pfam Desc: T-complex protein 11
  misc_feature (96)..(372): Pfam Id: PF05794 Pfam Desc: T-complex protein 11
  misc_feature (63)..(577): NCBI GI: 46121661 Blast Desc: FG05209.1 [Gibberella zeae PH-1]
  misc_feature (68)..(576): NCBI GI: 145607059 Blast Desc: MGG_12111 [Magnaporthe grisea 70-15] gi|145014662|gb|EDJ99230.1| MGG_12111 [Magnaporthe grisea 70-15]
  misc_feature (59)..(577): NCBI GI: 256732965 Blast Desc: NECHADRAFT_38663 [Nectria haematococca mpVI 77-13-4]
  misc_feature (39)..(576): NCBI GI: 171689948 Blast Desc: protein product [Podospora anserina] gi|170944936|emb|CAP71047.1| protein product [Podospora anserina]
  misc_feature (74)..(579): NCBI GI: 85079471 Blast Desc: NCU03466 [Neurospora crassa OR74A] gi|18376089|emb|CAD21116.1| related to SOK1 protein [Neurospora crassa] gi|28917416|gb|EAA27119.1| NCU03466 [Neurospora crassa
  misc_feature (30)..(579): NCBI GI: 116200047 Blast Desc: CHGG_08179 [Chaetomium globosum CBS 148.51] gi|88179458|gb|EAQ86926.1| CHGG_08179 [Chaetomium globosum CBS 148.51]
  misc_feature (74)..(374): NCBI GI: 154316697 Blast Desc: BC1G_03766 [Botryotinia fuckeliana B05.10] gi|150845378|gb|EDN20571.1| BC1G_03766 [Botryotinia fuckeliana B05.10]
  misc_feature (72)..(371): NCBI GI: 156050921 Blast Desc: SS1G_08048 [Sclerotinia sclerotiorum 1980] gi|154692448|gb|EDN92186.1| SS1G_08048 [Sclerotinia sclerotiorum 1980]
  misc_feature (71)..(577): NCBI GI: 67528478 Blast Desc: AN4437.2 [Aspergillus nidulans FGSC A4] gi|40741012|gb|EAA60202.1| AN4437.2 [Aspergillus nidulans FGSC A4]
  misc_feature (71)..(577): NCBI GI: 259482748 Blast Desc: TPA: cAMP-mediated signaling protein Sok1, (AFU_orthologue; AFUA_4G07280) [Aspergillus nidulans FGSC A4]
  misc_feature: Useful for introducing or modulating the production of volatile compounds
MTERGCGTNNREIENDSIRQQSKVTEKSMVQDRGEAKGCQTQSNDRVIGSNSGVLLHCDTKRDSSHTSPPTTKLKPPVTKETLKELDFTELICNAKLRHDINFDPGLHLRPDIDGEKGKMKQLMADQFWETLQTQLAQFLTDRRSFMIQHGNIESWSLPLLLRSIRDILVTIIPTHDRLYLHQAFDVELIMQQFNNGVVDVEKLACWLSGLLKSHCAPMRDQWADKMYGQIAKGNRTNDVSLLVQGFRSLLSLLEAMRLDIANHQIRMLRPTMIEDTVRFEQAYFVDEIRQRRLDASSAREWYSRLDRAPEPASVQAFRNIAVFFEGLISLIMPTSTQTQPVLPVTFDSDKRRIMALRSDMLDAINLGICMRTYDLSQHLERNAGAVAVIPSCHLAAPQSYAPESVRAGSSDGRLRRQKLYDSLVLLLRSSSFDLHGASQWKTMHESLALQIFRFASLPKCMIQSIEKSLDRNLSNLQSPLFLDAEQMFRQHLLAELQLRVIDFKRLTAVGLFSVATGSRVEQQNKAESHSWDSARESSPDRFTPKAGENGGVDDMATRIGHLGLLHWRVWERLVYLVDH

SEQ ID NO: 34712 - DNA, 3259 bp, Muscodor strobelii
  misc_feature: SGI EST ID NO. CUFF.82478.0
  misc_feature: Variant of the nucleotide sequence at SEQ ID NO 34710
ccgacgggaatatgacccctttgttgcccaacgttcatccaacatatatagggaattctctgagatctatcactataatacttaacctgataccctagtacgcgcccaaattcgccatatacggatgtaaagaatgcgaactagtacaaatccattgcagtaatgcacatgctgagaagagtcggacaatttcatcttcccgaatctattccaggctcgtaaaagtctttccgcctccgatgtcacgctcgtcactgcaacacaattctcgccgcgacctttgcttcattagcttggctttccgtctattggactggcgggtcggactcataaaacgcttgagttctgccagtccatcagtctgtttagtctgttccgtccctttccaatacttttcatctatacactctctctggcctcggctggccacaaatgccacggcagtcctcgtccccacctctacacggacactcgaacaccgacacatcaaacaaggacttctacgacgaattagcccaggatgacagagcgaggatgcgggacgaataatcgcgaaatcgagaacgactcgatcagacagcagtctaaggtcaccgaaaagtctatggttcaagaccgaggcgaggcgaaagggtgtcagacacagagtaatgatcgcgtcattggaagtaactcgggtgtgctcttgcattgcgataccaaacgtgactcttcacacacctcgcctcctaccacgaagcttaagcctccagtaaccaaggagaccctgaaggagttagacttcactgagctcatctgtaacgcgaagttacgccatgacatcaattttgatcccggtcttcatttgcggccagacatagatggcgagaagggtaagatgaagcagttaatggctgatcagttctgggagaccctccaaactcagctagcccagttcttgacggacagacgcagcttcatgattcagcacggaaatattgaaagctggtcgctaccattgcttctgcgatcaataagggatattcttgtcacgataataccgacacacgatcgtttatatcttcatcaagcctttgatgttgaactgatcatgcaacagtttaacaacggagtggtcgatgtagagaagctggcttgctggctgtctgggctgctcaagtcacactgtgcccctatgagagatcaatgggcggataagatgtacggccagatagccaagggcaacaggacgaacgatgtgagcttgctagtgcaaggtttccgtagcctcctcagcttgttggaggctatgagattggacattgcgaatcaccagatcagaatgctacgccctacgatgatcgaggataccgtacgtttcgaacaggcctactttgttgacgagattcgacaacggcgattagacgcatcttccgctcgcgaatggtactcacgactcgaccgcgcacccgagcctgcttcggtacaggcatttagaaacatagctgtcttcttcgaaggcctgataagcttgatcatgccaacctctacgcaaacgcaacctgttttgcctgttaccttcgattccgacaaaagaagaatcatggcactccgcagtgacatgctggacgctatcaatcttgggatttgtatgcgtacttacgatttgtcgcagcatttggaaaggaacgctggggccgtcgctgtgatcccatcgtgtcatttggcggcacctcaatcatatgctcccgaatctgttagagcaggatcgagcgatgggagactcagacgacaaaaactttacgactcactcgttctcttacttcgaagctctagcttcgacctgcatggcgcgtcgcaatggaagacaatgcatgaatctcttgctctgcagattttccgattcgccagcctaccgaagtgtatgatccaaagtatcgagaagagtctcgaccgtaacttgagcaatttgcagtcacctctctttctcgatgcggagcaaatgtttcgccagcacctactggcagagttacagttgcgtgttattgacttcaagagactgacggctgttgggcttttttcggtagcaactggcagtcgtgtggaacaacaaaataaagctgagagccactcttgggatagcgcccgcgagagtagcccagatcgcttcaccccgaaggccggtgaaaatggtggtgttgacgacatggcaacccggataggacacttgggactgctacattggcgagtgtgggagcgcctggtctatctggtcgatcattagacgagttcagtagacagtcgcaagtagagggataacaaacatatatgacacagacttgggaaacaatgcccaggttggggtttcttgaaacttatgttttgtggcgctatggttatccaatgcatactgtaatactgtacatacataattagagagcagaggcctcatcattacatagtacagatctttaggcctctcgtctctggatgggaaatcttattttttcgatatcttcattttcttgaggtctttctccggcaaagtccagtggcaaagcagccagaacaggccaacataagcctcatcacaccgcttcttctgggaatccagaatcagctttttcttgttgcgggcctaggtccatttaccaggtgccatggtccagaaatagtcgtgcccagcattcagtcactaggtaatccaaggttctaggtatcaaatctgaccccttcgtcatatacagtagttacagtatatatatccatcctaccagcagcaacaatgccgttcattgtgactttttgatacgtacagatagcacattaccacgacaaaattatcgcttatattagcccattattggtccatgccgggaccgatctgtgagaatgcgctaccgtcctgttactgccccgtattatcatcatataatccacgtcttacaaataactttgtggctgggaaacaacgcacgagccatgccgatagcaatggcgaataacagctcaacaacacagtgtaccggtcaagtggcaaccttatgggccacattttgggacgctatgaatacatctatcgacgtggattttgcatacaaatgttgaagtgttggtatggaagcctcaaggactggaagttctggcatccagaaatggagtcctccataccacagtcgccccacaacagggcgaccttccaatgacccacaccccacgaaacctgaccgaacttgcagatcaacgtcgatttcatagcattaaccgcataattaagaaa

SEQ ID NO: 34713 - DNA, 1560 bp, Muscodor strobelii
  misc_feature: SGI cDNA ID NO. 572005
  misc_feature: Elevated expression when VOC is produced
  misc_feature: Encodes the peptide sequence at SEQ ID NO 34714
cttgttaccttacttgtccttcgagcattggaaaataccgacaagcagcatcttttgacacaagtttccggtcttgcttcggacgctgccgctgtgactctaacagccggcaaagggagcttcgcagcaattgagatgctagagactggtcggggtatcctaacaagcactgtttatgatttgcgtgctgatatttcagctcctaggaagcaccatccgcagcttgcggaacgtttcgttcacctgcgtgacaagctggacatcacagttgctagtcacaatttactgacattgtcggaaaattcggctgcaattactcagaacacagctaacgagcgccgtgaagcgaatacccagcttgacgccttgaacaaggatattcgcgaccaccctggttttgagcggttcctgttaagtccatcagaagacgagatgcggagggcggcagctgacggtcctattgttataatcaacattaatttacatcgctgcgatgcttttctaatcttatcgtctcgtattcaagctatatgtctaccacttctttcgagaaaagatcttcaagatcgggattgtcagtctcttgaaatactcgcttggctgtgggatgcggttgtctgcccggttctgaatgcgcttgattttaacgagacaccgctggacggagtctggccgcgtgtctggtggattcctactggacctctcgtgcggtttcctctccacgcagctggtaactatctggatggcgggtcagatactgctcttgacagagttatctcatcatatagtacttctgttaaggcgatcatatacggtcgtcaacgacggaataatccagcaccgatggcagaccgccgagtgactctcgttgccatggaagaaacaccagggctatcgccacttcaattcgcaggtgaggagatcactggggtacaaaggatttgtgaatctctgcacctccaatctgtacggccaagattatacaagaacgaggtcttatcttttcttggaaaaagctggatattccactttgctggtcacggaggcgtagatcgtacaagcccgctgcatagtcggctgcttcttcgtgactgggctggagaccccttgaccgtacagagcctgttagaaacgaacgtcgggacttcatcgccttttcttgcttacctatccgcgtgtgggactggcgaggacggaaatgaggatcttgctgacgaaggcatccacctgactgcagcgtgccaaattgcaggtttccggcacgtgcttggtacactatgggctgtgaatgacaaagtatgcgtcgatatggctgagggtatatatggagtcttacgagatgtcgcgcttagcagcgacgagatcagtgacgggacagtcagccgcgcattgcatcatgctatgcgaaagttgcgagaacgatgggtgaagaagatcaaaaaggataaagacgagagagtacaaaagatgcgcagcgtagaaagagatggggaattgctggatatcagggaggggactggggtgccggcctggattccttatgtacattacgggctctga

SEQ ID NO: 34714 - protein, 519 aa, Muscodor strobelii
  misc_feature: SGI Peptide ID NO. 572005
  misc_feature (1)..(519): NCBI GI: 67541931 Blast Desc: AN7129.2 [Aspergillus nidulans FGSC A4] gi|40741941|gb|EAA61131.1| AN7129.2 [Aspergillus nidulans FGSC A4] gi|259483542|tpe|CBF79016.1| TPA: conserved [Aspergillus FGSC
  misc_feature (1)..(518): NCBI GI: 256721670 Blast Desc: NECHADRAFT_44795 [Nectria haematococca mpVI 77-13-4]
  misc_feature (1)..(519): NCBI GI: 67516515 Blast Desc: AN0539.2 [Aspergillus nidulans FGSC A4] gi|40747482|gb|EAA66638.1| AN0539.2 [Aspergillus nidulans FGSC A4] gi|259489203|tpe|CBF89281.1| TPA: conserved [Aspergillus FGSC
  misc_feature (1)..(519): NCBI GI: 67516399 Blast Desc: AN0481.2 [Aspergillus nidulans FGSC A4] gi|40747424|gb|EAA66580.1| AN0481.2 [Aspergillus nidulans FGSC A4] gi|259489269|tpe|CBF89401.1| TPA: conserved [Aspergillus FGSC
  misc_feature (1)..(519): NCBI GI: 119474523 Blast Desc: NFIA_006040 [Neosartorya fischeri NRRL 181] gi|119407290|gb|EAW17240.1| conserved [Neosartorya fischeri NRRL 181]
  misc_feature (1)..(519): NCBI GI: 256728430 Blast Desc: NECHADRAFT_87858 [Nectria haematococca mpVI 77-13-4]
  misc_feature (4)..(519): NCBI GI: 46116056 Blast Desc: FG03870.1 [Gibberella zeae PH-1]
  misc_feature (1)..(518): NCBI GI: 46120502 Blast Desc: FG04898.1 [Gibberella zeae PH-1]
  misc_feature (1)..(519): NCBI GI: 256725534 Blast Desc: NECHADRAFT_98227 [Nectria haematococca mpVI 77-13-4]
  misc_feature (1)..(518): NCBI GI: 145244038 Blast Desc: An11g05420 [Aspergillus niger] gi|134079215|emb|CAL00389.1| protein product [Aspergillus niger]
  misc_feature: Useful for introducing or modulating the production of volatile compounds
LVTLLVLRALENTDKQHLLTQVSGLASDAAAVTLTAGKGSFAAIEMLETGRGILTSTVYDLRADISAPRKHHPQLAERFVHLRDKLDITVASHNLLTLSENSAAITQNTANERREANTQLDALNKDIRDHPGFERFLLSPSEDEMRRAAADGPIVIININLHRCDAFLILSSRIQAICLPLLSRKDLQDRDCQSLEILAWLWDAVVCPVLNALDFNETPLDGVWPRVWWIPTGPLVRFPLHAAGNYLDGGSDTALDRVISSYSTSVKAIIYGRQRRNNPAPMADRRVTLVAMEETPGLSPLQFAGEEITGVQRICESLHLQSVRPRLYKNEVLSFLGKSWIFHFAGHGGVDRTSPLHSRLLLRDWAGDPLTVQSLLETNVGTSSPFLAYLSACGTGEDGNEDLADEGIHLTAACQIAGFRHVLGTLWAVNDKVCVDMAEGIYGVLRDVALSSDEISDGTVSRALHHAMRKLRERWVKKIKKDKDERVQKMRSVERDGELLDIREGTGVPAWIPYVHYGL

SEQ ID NO: 34715 - DNA, 2221 bp, Muscodor strobelii
  misc_feature: SGI EST ID NO. CUFF.82499.0
  misc_feature: Variant of the nucleotide sequence at SEQ ID NO 34713
ggtctgtttttcaccgctttgcatcttgacgtctgtcctactagtgaccgtatcatagctggtcgtcgacttttaacattttcagatcattcttataatgccgaaaaggcatatcaatgtgctgtgactgctatccagcttgttaccttacttgtccttcgagcattggaaaataccgacaagcagcatcttttgacacaagtttccggtcttgcttcggacgctgccgctgtgactctaacagccggcaaagggagcttcgcagcaattgagatgctagagactggtcggggtatcctaacaagcactgtttatgatttgcgtgctgatatttcagctcctaggaagcaccatccgcagcttgcggaacgtttcgttcacctgcgtgacaagctggacatcacagttgctagtcacaatttactgacattgtcggaaaattcggctgcaattactcagaacacagctaacgagcgccgtgaagcgaatacccagcttgacgccttgaacaaggatattcgcgaccaccctggttttgagcggttcctgttaagtccatcagaagacgagatgcggagggcggcagctgacggtcctattgttataatcaacattaatttacatcgctgcgatgcttttctaatcttatcgtctcgtattcaagctatatgtctaccacttctttcgagaaaagatcttcaagatcgggattgtcagtctcttgaaatactcgcttggctgtgggatgcggttgtctgcccggttctgaatgcgcttgattttaacgagacaccgctggacggagtctggccgcgtgtctggtggattcctactggacctctcgtgcggtttcctctccacgcagctggtaactatctggatggcgggtcagatactgctcttgacagagttatctcatcatatagtacttctgttaaggcgatcatatacggtcgtcaacgacggaataatccagcaccgatggcagaccgccgagtgactctcgttgccatggaagaaacaccagggctatcgccacttcaattcgcaggtgaggagatcactggggtacaaaggatttgtgaatctctgcacctccaatctgtacggccaagattatacaagaacgaggtcttatcttttcttggaaaaagctggatattccactttgctggtcacggaggcgtagatcgtacaagcccgctgcatagtcggctgcttcttcgtgactgggctggagaccccttgaccgtacagagcctgttagaaacgaacgtcgggacttcatcgccttttcttgcttacctatccgcgtgtgggactggcgaggacggaaatgaggatcttgctgacgaaggcatccacctgactgcagcgtgccaaattgcaggtttccggcacgtgcttggtacactatgggctgtgaatgacaaagtatgcgtcgatatggctgagggtatatatggagtcttacgagatgtcgcgcttagcagcgacgagatcagtgacgggacagtcagccgcgcattgcatcatgctatgcgaaagttgcgagaacgatgggtgaagaagatcaaaaaggataaagacgagagagtacaaaagatgcgcagcgtagaaagagatggggaattgctggatatcagggaggggactggggtgccggcctggattccttatgtacattacgggctctgatcaatcttttgctactcgtgacacgacctattgagaatagaacgaacgtacgtctctttttttctttctttaactcgccctacttggccgtgtttcggaaatttaatccacaaccagctggccccaacttctacctttacatcttcaactctatcgacatttggctggcaccctcttgtatatactggttctctactaatgtacaagtgattctagtctgctctttagatttataccattagtttgcatactgcttaccttcagtctccaaccagtgctgtgcttcgtctgtttatctctcgatcctgaattgccctaggatctgcgtctgttctatgaatttgatggccttgatggctgttttgcgcttgtttaagattgcccggagcagagattccctcgtcctggtatacggccaagtttctggttccggaggtacttgaatcatcgacactagaacagtacgtggagtactgtttatcgtctctcgccgcagctgcccctcggattcatgatatccgag

SEQ ID NO: 34716 - DNA, 3192 bp, Muscodor strobelii
  misc_feature: SGI cDNA ID NO. 572006
  misc_feature: Encodes the peptide sequence at SEQ ID NO 34717
atgacgacacccatcccatcacctccaggcctgccaatcgttggcaatgcaacacagatagatccccacgctcagcgtgttagcttctccgcgtgggctgagaaatatggcgaggtttatcgcatttatttcccaggcaaccgctcgttggtattcgcaaattctcacagattagttaacgagctatgcgatgaaaagcgtttcgtcaaagaccccgaaggtgttttgtttgaagtaagaaacggtgtacacgatgggctgttcacagcaaaaccgggcgaggaagcctggggtattgcgcaccgcattctaatgccagcattcggaccactgtcgattcgaggcatgtttgatgaaatgcacgatattgcgacgcagatggctttgaaattcgcacgatatgggcccagtaccccaattccagcttctgaagattttacacggcttgctctcgacacacttgccctctgctccatgggctttcgcttcaatagcttctactcgaaggaaatgcatcctttcattgaggccatgggcgagttcttaacgacttgtggcaagcgcccttctcgagcactgccatctttcttttacggtgccgaagacaagaaattcttcgacgatatcgaggtcatgcgcaaaacagctgaagaagtccttcagaagcggaaggaatttccagatgatcgaaaggatcttctcaacgccatgcttaagggtgtcgattccaaaacgggcaagcacatgagcgattcaagcattattgataatcttatcacatttttgattgcgggccatgaaacaacgtcgggcaccctgtctttcgccttctatcggctattgaagaatcctgatgcgtatcgaaaggcgcaggccgaagtcgacgaggttgttggaaaaggcccaatcaccgtcgaacatctatccaaagtgccttatatcacggcggttctgcgtgagacactaagactggactcgccgatctctctttacgttgtaaaatctgtggaagaccaattattagccggccaataccctgttgcgaaggacgagccatgcggattgttccttgctcaatcccatctagaccctaccatctttggtgacgatgcactggaattcaagccggagcgtatgcttgatgaacatttcaacaaactaccaaagaatgcttggaaaccattcggaaatggtgcacgagcttgtattggacgaccatttgctatgcaggaagccatccttgcgatggtcatgctcctccagaactttaacttcgtcatgcatgaccccaactataaccttgcaatcaagcaaactttgacgatcaagcctgacaatttcctcatgcgcgctattattcgcgatggattgtcaccaaccgagctggagcaccgtttagccggtagaggctacgcacaagaatccacaaaatctcatgcagatggaacatcaacgccgatggtgtctggcaagaagatcaccatcctctatggaagtaacagcggcacgtgcgactcgcttgcacagaggctcgcagggtcagctgcccaacatggattcgcggttgacaaggttgactgtctcgacgctgccaacggctcacttccaaaggaccaacctgtcgtgatcatcacatcctcatacgagggtgaagcgcctgacaatgcggcgcttttctgctcgtggttgacaaactgcaaagacaagaacctactggccggagtgaattatacagtatttggagttggacatcacgactgggcgcagactttccatcgtatccccaagctagttgatagcaagctcgaggagaatggagctacacgtatcgcggatttgggtctttctgacgccggatcgaccgacacattcaccgatttcgagacatgggaggataacacactctggccgtctctcatgaagaaatacggaacatcggatgttgagacagattgtgcgcagtcaaccggtctgagcgtcgaggtttcaaacccacgcacctccacccttcggcaagatgttatggaggccctcgttgtcgacgcccacactttgacagctgagggtgctccagtcaagaagcacatcgagatcgctctccctactggacagaattaccgctcgggtgactatctggccattctacctgtcaatcccaagagtgtagtagatcgtgtcatgcgccgattcaaacttgcatgggatgcacacatcaccatcgcaggagacgcaaacactgcgcttcctactaacgcgtctctacctgcgcaaagcattttgggcgcctatgttgagctgtcccaaccggcaacgaagaggaatatccttgccattgctgaggccacagataacgaggctgacaaggatgccttgaagcaatatgcatctgagaactacaacgaggtgctatccaagaggatttctgcactcgatcttctagagaagtaccccaacatcaacttgccgttaggagtcttcctcgctatgctgccacctatgcgtgtgagacaatattctatctcttcttccccgttatggaatcccaagcacgtgtgcctctcattcggcgtcctcgaggcaccatcaaagtctggttcgggaatgcacgtgggcgtggcttcctcttacctaaactctcttgcacccggagacaagctccacgtagctgtccgtccatcacatgccgccttccatctacctcaagatcctgaaaacacgcccgttatctgcatcggcgccgggacgggcatgagtcccttccgtggatttatacaagagcgtgctgagatgatcaaagctggacgcaagttggcgccagccatgctcttgttcggttgtcgcaaacccgggtatgatgacatttatgcggaagaactagcagagtgggagaagattggtgctgtcacagtcaagcgcgcatacagtcgtgctccggaacaatccaacggcgccaaatacgtccaggacttgcttaccactcacaaagatgaagtcgtccaactatggaacgagaatgcaagattgtatatctgcggcgcgcgcgctgttggggaaggtgtcagaaaggagattattaaactcagccagggccttgcgaaagagaaccggggcgaagacatttccgatgaacgcgcgaataattggtgggacggtttgaggaatgtgcgatatgctacggatgtttttgattag

SEQ ID NO: 34717 - protein, 1063 aa, Muscodor strobelii
  misc_feature: SGI Peptide ID NO. 572006
  misc_feature (667)..(876): Pfam Id: PF00667 Pfam Desc: FAD binding domain
  misc_feature (495)..(630): Pfam Id: PF00258 Pfam Desc: Flavodoxin
  misc_feature (909)..(1022): Pfam Id: PF00175 Pfam Desc: Oxidoreductase NAD-binding domain
  misc_feature (6)..(451): Pfam Id: PF00067 Pfam Desc: Cytochrome P450
  misc_feature (695)..(876): Pfam Id: PF00667 Pfam Desc: FAD binding domain
  misc_feature (6)..(429): Pfam Id: PF00067 Pfam Desc: Cytochrome P450
  misc_feature (3)..(1063): NCBI GI: 261356990 Blast Desc: bifunctional P-450:NADPH-P450 reductase [Verticillium albo-atrum VaMs.102]
  misc_feature (2)..(1063): NCBI GI: 256721578 Blast Desc: NECHADRAFT_37323 [Nectria haematococca mpVI 77-13-4]
  misc_feature (2)..(1063): NCBI GI: 39942060 Blast Desc: MGG_10879 [Magnaporthe grisea 70-15] gi|145009612|gb|EDJ94268.1| MGG_10879 [Magnaporthe grisea 70-15] gi|194338881|gb|ACF49357.1| Pmc2 [Magnaporthe oryzae]
  misc_feature (14)..(1063): NCBI GI: 85104987 Blast Desc: bifunctional P-450:NADPH-P450 reductase [Neurospora crassa OR74A] gi|28923428|gb|EAA32612.1| bifunctional P-450:NADPH-P450 reductase [Neurospora crassa OR74A] bifunctional
  misc_feature (2)..(1063): NCBI GI: 256720943 Blast Desc: [Nectria haematococca mpVI 77-13-4]
  misc_feature (2)..(1063): NCBI GI: 22653677 Blast Desc: C505_FUSOX RecName: Full=Bifunctional P-450:NADPH-P450 reductase; AltName: Full=Fatty acid omega-hydroxylase; AltName: Full=Cytochrome P450foxy; Includes: RecName: Full=Cytochrome P450
  misc_feature (2)..(1063): NCBI GI: 46110180 Blast Desc: C505_FUSOX Bifunctional P-450:NADPH-P450 reductase (Fatty acid omega-hydroxylase) (P450foxy) [Gibberella zeae PH-1]
  misc_feature (2)..(1063): NCBI GI: 145601517 Blast Desc: MGG_01925 [Magnaporthe grisea 70-15] gi|145009578|gb|EDJ94234.1| MGG_01925 [Magnaporthe grisea 70-15]
  misc_feature (3)..(1062): NCBI GI: 256724530 Blast Desc: NECHADRAFT_98004 [Nectria haematococca mpVI 77-13-4]
  misc_feature (5)..(1063): NCBI GI: 67541330 Blast Desc: AN6835.2 [Aspergillus nidulans FGSC A4] gi|40739044|gb|EAA58234.1| AN6835.2 [Aspergillus nidulans FGSC A4] gi|259480431|tpe|CBF71556.1| TPA: cytochrome P450, (Eurofung)
  misc_feature (2)..(1063): SWISSPROT Homolog: EC 1.6.2.4 NADPH--hemoprotein reductase
  misc_feature (2)..(1063): SWISSPROT Homolog: EC 1.14.14.1 Unspecific monooxygenase
MTTPIPSPPGLPIVGNATQIDPHAQRVSFSAWAEKYGEVYRIYFPGNRSLVFANSHRLVNELCDEKRFVKDPEGVLFEVRNGVHDGLFTAKPGEEAWGIAHRILMPAFGPLSIRGMFDEMHDIATQMALKFARYGPSTPIPASEDFTRLALDTLALCSMGFRFNSFYSKEMHPFIEAMGEFLTTCGKRPSRALPSFFYGAEDKKFFDDIEVMRKTAEEVLQKRKEFPDDRKDLLNAMLKGVDSKTGKHMSDSSIIDNLITFLIAGHETTSGTLSFAFYRLLKNPDAYRKAQAEVDEVVGKGPITVEHLSKVPYITAVLRETLRLDSPISLYVVKSVEDQLLAGQYPVAKDEPCGLFLAQSHLDPTIFGDDALEFKPERMLDEHFNKLPKNAWKPFGNGARACIGRPFAMQEAILAMVMLLQNFNFVMHDPNYNLAIKQTLTIKPDNFLMRAIIRDGLSPTELEHRLAGRGYAQESTKSHADGTSTPMVSGKKITILYGSNSGTCDSLAQRLAGSAAQHGFAVDKVDCLDAANGSLPKDQPVVIITSSYEGEAPDNAALFCSWLTNCKDKNLLAGVNYTVFGVGHHDWAQTFHRIPKLVDSKLEENGATRIADLGLSDAGSTDTFTDFETWEDNTLWPSLMKKYGTSDVETDCAQSTGLSVEVSNPRTSTLRQDVMEALVVDAHTLTAEGAPVKKHIEIALPTGQNYRSGDYLAILPVNPKSVVDRVMRRFKLAWDAHITIAGDANTALPTNASLPAQSILGAYVELSQPATKRNILAIAEATDNEADKDALKQYASENYNEVLSKRISALDLLEKYPNINLPLGVFLAMLPPMRVRQYSISSSPLWNPKHVCLSFGVLEAPSKSGSGMHVGVASSYLNSLAPGDKLHVAVRPSHAAFHLPQDPENTPVICIGAGTGMSPFRGFIQERAEMIKAGRKLAPAMLLFGCRKPGYDDIYAEELAEWEKIGAVTVKRAYSRAPEQSNGAKYVQDLLTTHKDEVVQLWNENARLYICGARAVGEGVRKEIIKLSQGLAKENRGEDISDERANNWWDGLRNVRYATDVFD

SEQ ID NO: 34718 - DNA, 3781 bp, Muscodor strobelii
  misc_feature: SGI EST ID NO. CUFF.82535.0
  misc_feature: Variant of the nucleotide sequence at SEQ ID NO 34716
gcaccagcaggtattcggtgcgaggaatcgtgaaacaatcccgccatcaacggtatatgggtccaaatatgcctccgctcgccgatccactgatggctatgtcaggatgggcacacgtacagtagcgcaatgcgtggttaactttgacaccgcgaagaccgatcccaccgctgcgctacggacggcaagcaatgcgtgaccgctagtatgcagtctcaaccatatataatcatgtcgactgctgtcgcattgtcaagaaacaacttagtcgacaatacgtgacatcaaaacaattatcactgtggaactgggcatcatagaacatgacgacacccatcccatcacctccaggcctgccaatcgttggcaatgcaacacagatagatccccacgctcagcgtgttagcttctccgcgtgggctgagaaatatggcgaggtttatcgcatttatttcccaggcaaccgctcgttggtattcgcaaattctcacagattagttaacgagctatgcgatgaaaagcgtttcgtcaaagaccccgaaggtgttttgtttgaagtaagaaacggtgtacacgatgggctgttcacagcaaaaccgggcgaggaagcctggggtattgcgcaccgcattctaatgccagcattcggaccactgtcgattcgaggcatgtttgatgaaatgcacgatattgcgacgcagatggctttgaaattcgcacgatatgggcccagtaccccaattccagcttctgaagattttacacggcttgctctcgacacacttgccctctgctccatgggctttcgcttcaatagcttctactcgaaggaaatgcatcctttcattgaggccatgggcgagttcttaacgacttgtggcaagcgcccttctcgagcactgccatctttcttttacggtgccgaagacaagaaattcttcgacgatatcgaggtcatgcgcaaaacagctgaagaagtccttcagaagcggaaggaatttccagatgatcgaaaggatcttctcaacgccatgcttaagggtgtcgattccaaaacgggcaagcacatgagcgattcaagcattattgataatcttatcacatttttgattgcgggccatgaaacaacgtcgggcaccctgtctttcgccttctatcggctattgaagaatcctgatgcgtatcgaaaggcgcaggccgaagtcgacgaggttgttggaaaaggcccaatcaccgtcgaacatctatccaaagtgccttatatcacggcggttctgcgtgagacactaagactggactcgccgatctctctttacgttgtaaaatctgtggaagaccaattattagccggccaataccctgttgcgaaggacgagccatgcggattgttccttgctcaatcccatctagaccctaccatctttggtgacgatgcactggaattcaagccggagcgtatgcttgatgaacatttcaacaaactaccaaagaatgcttggaaaccattcggaaatggtgcacgagcttgtattggacgaccatttgctatgcaggaagccatccttgcgatggtcatgctcctccagaactttaacttcgtcatgcatgaccccaactataaccttgcaatcaagcaaactttgacgatcaagcctgacaatttcctcatgcgcgctattattcgcgatggattgtcaccaaccgagctggagcaccgtttagccggtagaggctacgcacaagaatccacaaaatctcatgcagatggaacatcaacgccgatggtgtctggcaagaagatcaccatcctctatggaagtaacagcggcacgtgcgactcgcttgcacagaggctcgcagggtcagctgcccaacatggattcgcggttgacaaggttgactgtctcgacgctgccaacggctcacttccaaaggaccaacctgtcgtgatcatcacatcctcatacgagggtgaagcgcctgacaatgcggcgcttttctgctcgtggttgacaaactgcaaagacaagaacctactggccggagtgaattatacagtatttggagttggacatcacgactgggcgcagactttccatcgtatccccaagctagttgatagcaagctcgaggagaatggagctacacgtatcgcggatttgggtctttctgacgccggatcgaccgacacattcaccgatttcgagacatgggaggataacacactctggccgtctctcatgaagaaatacggaacatcggatgttgagacagattgtgcgcagtcaaccggtctgagcgtcgaggtttcaaacccacgcacctccacccttcggcaagatgttatggaggccctcgttgtcgacgcccacactttgacagctgagggtgctccagtcaagaagcacatcgagatcgctctccctactggacagaattaccgctcgggtgactatctggccattctacctgtcaatcccaagagtgtagtagatcgtgtcatgcgccgattcaaacttgcatgggatgcacacatcaccatcgcaggagacgcaaacactgcgcttcctactaacgcgtctctacctgcgcaaagcattttgggcgcctatgttgagctgtcccaaccggcaacgaagaggaatatccttgccattgctgaggccacagataacgaggctgacaaggatgccttgaagcaatatgcatctgagaactacaacgaggtgctatccaagaggatttctgcactcgatcttctagagaagtaccccaacatcaacttgccgttaggagtcttcctcgctatgctgccacctatgcgtgtgagacaatattctatctcttcttccccgttatggaatcccaagcacgtgtgcctctcattcggcgtcctcgaggcaccatcaaagtctggttcgggaatgcacgtgggcgtggcttcctcttacctaaactctcttgcacccggagacaagctccacgtagctgtccgtccatcacatgccgccttccatctacctcaagatcctgaaaacacgcccgttatctgcatcggcgccgggacgggcatgagtcccttccgtggatttatacaagagcgtgctgagatgatcaaagctggacgcaagttggcgccagccatgctcttgttcggttgtcgcaaacccgggtatgatgacatttatgcggaagaactagcagagtgggagaagattggtgctgtcacagtcaagcgcgcatacagtcgtgctccggaacaatccaacggcgccaaatacgtccaggacttgcttaccactcacaaagatgaagtcgtccaactatggaacgagaatgcaagattgtatatctgcggcgcgcgcgctgttggggaaggtgtcagaaaggagattattaaactcagccagggccttgcgaaagagaaccggggcgaagacatttccgatgaacgcgcgaataattggtgggacggtttgaggaatgtgcgatatgctacggatgtttttgattagagggtcgggtaagatatgactagaatgggacatgaaaacgggctttagaaatgggagtatgctagagattttggaactgggatgaaatgactctccactgaatattataaacacctaatgaatttacgaaggtatcatttaatttagtacttatttctaaagatcgtccgagctcagtgaaactttgtctcactctgagcagctacggcgtcgcgtactcaatcggtatatagatgagatcaagttacagttcaatgggaataacg

SEQ ID NO: 34719 - DNA, 1764 bp, Muscodor strobelii
  misc_feature: SGI cDNA ID NO. 572007
  misc_feature: Encodes the peptide sequence at SEQ ID NO 34720
atgggtcccagtgattacgaagatgactacggtgactatgaagatgaggcatatgtagatgaggtctacgaagacgaggtctacggagatgaggtctatgagaacaaggtctacgagagcaaagtctatgaagtcgggactgatgacgatgatgtctatgacgacgaggcttacaaggccgaggtttattacaacaaagtccacgaagacgaagctcccccacaaagccccggcttcggtgcacccaaatcagaacctcccgccgaatcacaaaagaccaaaaactcgataatcgagctcctcatcattcttctttcgatcggcagcgcggtatatctttcattctacttcttcagcgatgatcctgacgccggcttcctaccgttcttcagtcgcaatgcgagtgtgaccgatgctccctcggcaccacatagcgcagtcaacaaggcggtttcggtcctcaagccgaaagatccgtatcaaatacagaaggagtacctcttcgacaattacagggatttgctgacgcacgacgcggatgaatttgacaagctgtttgataatgttatgatgggccatgacatgatgtatcagatgtatttcgaaaagaaagacaaatctgaacatttggaagagaaagctcacatggatgagcgcaagaaactgattcaaaccctgtttaatgactataaagcatttttgagcagacgggagagactcaggagggatctcatcgtctccggcggtctgtggagagtgtatgatagaaggggcagattggtggagcgaggcgagcatggaccaagaggtactaaagattacttgagttggcagtttggatggccggttactgggcctaatgcgacacgtcaggagattgtgtcttcgaaattgagtttgccgtggaacgcaaatcacacagagaaggggaaccaaactgaggcagacattaaaaagcaaaaagcattggacgatgtgcagttcactatcttgacagcgtccgccagacgtattatcgaagagatgatcaagggacacagtgagttgtacagaccgaacaccactggtttcgacctacagtcggcgcttgaggacaagtcgtgggatgttgaggagaggaaggtgttacactccgtgagaaaggaggtcctcaaggggaacttcccactcaacaaattcgagcaggggatgccaaacctgttgaaagaggttgtttcgttgaagacacagtttcagaacacgaagcatgcgttgcttttgctgaaagagagattctcggttgagcgggaggctctcgtgtacacgactcaagacaaagaaaagtggctcaatgacgcgagtgctgtgcttgaagcctggacaggcgtcattttcgatgtgcaagagatggtgctcttcgacttacgacgaagggaggtgatgggacagcttgagtcgaatagtacgagacgagaaaatttcgactttgataagtcgtgggagatatggaagattcagaattgtggacgaacgtcttgctataggaaggagacgcctgagaattacttcctgtggtggtggagtgggtataaaggcaaaccaattgcgtggcatgcttttacggagagtcactggagtttcgatgtgggtgggacgaagacgacgggtatctggacaggaatttacgagaatgcttgttgcaacgatagtaagctcgcagcatttctcaagtatgggacgaagacgcctcccaaagaatatagaaaagagactaaggaggagtaa

SEQ ID NO: 34720 - protein, 587 aa, Muscodor strobelii
  misc_feature: SGI Peptide ID NO. 572007
  misc_feature (12)..(130): NCBI GI: 258597342 Blast Desc: conserved Plasmodium membrane protein [Plasmodium falciparum 3D7] gi|254832674|gb|AAN35917.2| conserved Plasmodium membrane protein [Plasmodium falciparum 3D7]
MGPSDYEDDYGDYEDEAYVDEVYEDEVYGDEVYENKVYESKVYEVGTDDDDVYDDEAYKAEVYYNKVHEDEAPPQSPGFGAPKSEPPAESQKTKNSIIELLIILLSIGSAVYLSFYFFSDDPDAGFLPFFSRNASVTDAPSAPHSAVNKAVSVLKPKDPYQIQKEYLFDNYRDLLTHDADEFDKLFDNVMMGHDMMYQMYFEKKDKSEHLEEKAHMDERKKLIQTLFNDYKAFLSRRERLRRDLIVSGGLWRVYDRRGRLVERGEHGPRGTKDYLSWQFGWPVTGPNATRQEIVSSKLSLPWNANHTEKGNQTEADIKKQKALDDVQFTILTASARRIIEEMIKGHSELYRPNTTGFDLQSALEDKSWDVEERKVLHSVRKEVLKGNFPLNKFEQGMPNLLKEVVSLKTQFQNTKHALLLLKERFSVEREALVYTTQDKEKWLNDASAVLEAWTGVIFDVQEMVLFDLRRREVMGQLESNSTRRENFDFDKSWEIWKIQNCGRTSCYRKETPENYFLWWWSGYKGKPIAWHAFTESHWSFDVGGTKTTGIWTGIYENACCNDSKLAAFLKYGTKTPPKEYRKETKEE

SEQ ID NO: 34721 - DNA, 240 bp, Muscodor strobelii
  misc_feature: SGI EST ID NO. CUFF.82514.0
  misc_feature: Variant of the nucleotide sequence at SEQ ID NO 34719
tttggatggccggttactgggcctaatgcgacacgtcaggagattgtgtcttcgaaattgagtttgccgtggaacgcaaatcacacagagaaggggaaccaaactgaggcagacattaaaaagcaaaaagcattggacgatgtgcagttcactatcttgacagcgtccgccagacgtattatcgaagagatgatcaagggacacagtgagttgtacagaccgaacaccactggtttcgac

SEQ ID NO: 34722 - DNA, 528 bp, Muscodor strobelii
  misc_feature: SGI cDNA ID NO. 572008
  misc_feature: Encodes the peptide sequence at SEQ ID NO 34723
atgagcgagacagaaagcgagccaatgccgtatccatatcattcgggccaacccagggtagtccgcgttgaagcgcccatcacgcgtcagatcttcgtctacccgcactcagtcccacattacgagtttccagtcgtcgactatagtcttgcaaacgatgagcgtgcaaatccacactggtacttcgcctctgtgccagaggtagcgagtgtacaggatatggagatcatgcttgcccacggcgaagggcttgtggtcatggttagactgcagaggaatgaggaattggtacgaatcaacaagtttgacagcgtttcacggctctttagggactcgatgcagctcgaagttgtcaagaaggagagtgagaaggtcaatgggaaggcgagggagatcgagagggagaaggaggagaaagagaaggaaagaatgagtggggaagaggtcgttattgagagtattgagactacggcccagcctgaagagcctaaggtcgatgagcattcgcattcatggggtcaaagctag

SEQ ID NO: 34723 - protein, 175 aa, Muscodor strobelii
  misc_feature: SGI Peptide ID NO. 572008
MSETESEPMPYPYHSGQPRVVRVEAPITRQIFVYPHSVPHYEFPVVDYSLANDERANPHWYFASVPEVASVQDMEIMLAHGEGLVVMVRLQRNEELVRINKFDSVSRLFRDSMQLEVVKKESEKVNGKAREIEREKEEKEKERMSGEEVVIESIETTAQPEEPKVDEHSHSWGQS

SEQ ID NO: 34724 - DNA, 369 bp, Muscodor strobelii
  misc_feature: SGI cDNA ID NO. 572009
  misc_feature: Encodes the peptide sequence at SEQ ID NO 34725
atgatgttgagtatgacacagctcagaaactctctcggtcaacctttcgaaactgccagcctcgtctcggagcccatcaagatcaaatggaagagcccggacaaggaccagacccagtgtctcagcgacgccgccctggccttctggaacgcccagaagggcaacgcctccaggcagctcgagagcgtcctcgacaacgaagaacagctagctgagataaccaattccacaagaggattattcaagaagagaagaacaagatgggcaggggcccacttcaaggaggccgacgaggaggccgacgaggacggcagtgctagcggttttggtggtgctggctatgttgctcagcctatcaccgctgcctaa

SEQ ID NO: 34725 - protein, 122 aa, Muscodor strobelii
  misc_feature: SGI Peptide ID NO. 572009
  misc_feature (18)..(55): NCBI GI: 39969309 Blast Desc: MGG_10265 [Magnaporthe grisea 70-15] gi|145012004|gb|EDJ96660.1| MGG_10265 [Magnaporthe grisea 70-15]
  misc_feature (18)..(55): NCBI GI: 149211137 Blast Desc: MGCH7_ch7g1031 [Magnaporthe grisea 70-15] gi|86196986|gb|EAQ71624.1| MGCH7_ch7g1031 [Magnaporthe grisea 70-15]
MMLSMTQLRNSLGQPFETASLVSEPIKIKWKSPDKDQTQCLSDAALAFWNAQKGNASRQLESVLDNEEQLAEITNSTRGLFKKRRTRWAGAHFKEADEEADEDGSASGFGGAGYVAQPITAA

SEQ ID NO: 34726 - DNA, 576 bp, Muscodor strobelii
  misc_feature: SGI cDNA ID NO. 572010
  misc_feature: Encodes the peptide sequence at SEQ ID NO 34727
atggccggcctcagccctcagatcaccaacctgatcatcatcctcgggatgatgcaggtgtccaagaaggtcccctttgacgaccccaacgttctcaacgccgtgcgcgccttctacatcgtcagcaacgtcatcatcgccgccatctacttctataccatgagcaagatcaactccaagaaggacctcactactctcaagtacgttgagccggctcccatgggatcctcagaggagggcaagctcgtgaccacgaccgtccacgcatacgacctgcaacagatcaagtcggccttccggggccagatgatgggcatcgccatgatggctttcatgcacctgtacatgaaatacacgaacccgcttctgatccagtccatcatcccgcttaagggtgccttcgagcacagtgaggtcaagatccatctcttcggctctcccgcttctggtgacctcaagcgccccttcaagcagggcggtggcttcatgcagggtctcgcaggtggtgcccaggacgacaagaaggcagtcgaggctgccgagcgatccggccgtggtggagtcaaggacgagtag

SEQ ID NO: 34727 - protein, 191 aa, Muscodor strobelii
  misc_feature: SGI Peptide ID NO. 572010
  misc_feature (3)..(191): NCBI GI: 256730528 Blast Desc: NECHADRAFT_65111 [Nectria haematococca mpVI 77-13-4]
  misc_feature (1)..(191): NCBI GI: 145603188 Blast Desc: conserved [Magnaporthe grisea 70-15] gi|145011473|gb|EDJ96129.1| conserved [Magnaporthe grisea 70-15]
  misc_feature (1)..(191): NCBI GI: 116200245 Blast Desc: conserved [Chaetomium globosum CBS 148.51] gi|88179557|gb|EAQ87025.1| conserved [Chaetomium globosum CBS 148.51]
  misc_feature (3)..(191): NCBI GI: 85110731 Blast Desc: NCU08743 [Neurospora crassa OR74A] gi|28925289|gb|EAA34368.1| NCU08743 [Neurospora crassa OR74A] gi|38524235|emb|CAE75701.1| PHO88 (involved in phosphate crassa]
  misc_feature (3)..(191): NCBI GI: 171683824 Blast Desc: protein product [Podospora anserina] gi|170941872|emb|CAP67525.1| protein product [Podospora anserina]
  misc_feature (3)..(191): NCBI GI: 156063832 Blast Desc: inorganic phosphate transporter [Sclerotinia sclerotiorum 1980] gi|154697368|gb|EDN97106.1| inorganic phosphate transporter [Sclerotinia sclerotiorum 1980]
  misc_feature (9)..(191): NCBI GI: 154318794 Blast Desc: BC1G_02786 [Botryotinia fuckeliana B05.10] gi|150857916|gb|EDN33108.1| BC1G_02786 [Botryotinia fuckeliana B05.10]
  misc_feature (4)..(191): NCBI GI: 242770248 Blast Desc: phosphate transporter (Pho88), [Talaromyces stipitatus ATCC 10500] gi|218725136|gb|EED24553.1| phosphate transporter (Pho88), [Talaromyces stipitatus ATCC 10500]
  misc_feature (3)..(191): NCBI GI: 225679176 Blast Desc: conserved [Paracoccidioides brasiliensis Pb03] gi|226290887|gb|EEH46315.1| inorganic phosphate transport protein PHO88 [Paracoccidioides brasiliensis Pb18]
  misc_feature (23)..(191): NCBI GI: 261356911 Blast Desc: inorganic phosphate transport protein PHO88 [Verticillium albo-atrum VaMs.102]
MAGLSPQITNLIIILGMMQVSKKVPFDDPNVLNAVRAFYIVSNVIIAAIYFYTMSKINSKKDLTTLKYVEPAPMGSSEEGKLVTTTVHAYDLQQIKSAFRGQMMGIAMMAFMHLYMKYTNPLLIQSIIPLKGAFEHSEVKIHLFGSPASGDLKRPFKQGGGFMQGLAGGAQDDKKAVEAAERSGRGGVKDE

SEQ ID NO: 34728 - DNA, 1156 bp, Muscodor strobelii
  misc_feature: SGI EST ID NO. CUFF.82833.0
  misc_feature: Variant of the nucleotide sequence at SEQ ID NO 34726
cccacacgtctgaggacacatttgcgcctaaaaaagtgcaccgaccatcccgtccaccaccgccgaacatatacaccatcatctctactatcctcctcctctttctgtccatcgcacatccagtcctctaatcgccgacttacctaccgcacgcgtagaccaaacctctccaatacctcgtcaccagctcatcgcgaccgcaaccatggccggcctcagccctcagatcaccaacctgatcatcatcctcgggatgatgcaggtgtccaagaaggtcccctttgacgaccccaacgttctcaacgccgtgcgcgccttctacatcgtcagcaacgtcatcatcgccgccatctacttctataccatgagcaagatcaactccaagaagggtacgaaaccaccacacagccaacactagaccccgccaaattaggggaagtcgaaacaacgaggcaacaatactgactactgtactatgcagacctcactactctcaagtacgttgagccggctcccatgggatcctcagaggagggcaagctcgtgaccacgaccgtccacgcatacgacctgcaacagatcaagtcggccttccggggccagatgatgggcatcgccatgatggctttcatgcacctgtacatgaaatacacgaacccgcttctgatccagtccatcatcccgcttaagggtgccttcgagcacagtgaggtcaagatccatctcttcggctctcccgcttctggtgacctcaagcgccccttcaagcagggcggtggcttcatgcagggtctcgcaggtggtgcccaggacgacaagaaggcagtcgaggctgccgagcgatccggccgtggtggagtcaaggacgagtagatgcgcttgttgggattgcagctgtcgtgttttatgactcgcaaaccgaaccatggattctacgtttgcagaaaaaaaggtatgatcgggtttggtacgagcatagccggtttagactacatagggcatcataccgtagtggaggataaaataatggtccttccagaccgtccattacatcttattttctcaccatctgcccgcaagttcgcgttgaacgtgcaaacagggccgatactttgtgactcgacacgcaagtatcaaattgaaaaccacaggctga

SEQ ID NO: 34729 - DNA, 1248 bp, Muscodor strobelii
  misc_feature: SGI cDNA ID NO. 572011
  misc_feature: Reduced expression when VOC is produced
  misc_feature: Encodes the peptide sequence at SEQ ID NO 34730
atgggggctacggcacgtccttcgacgcctacacgggcaggcccctccaagcccagcgccgccgccgcatcgccacccacgcctgaagtcgcccgtcgcatcgaagaaaacagactaaaagccaaagccatacgcgaccgacgcgaagccgaagcccgcgccgccggcatcccctccatctcccgcacgccctccggcttcgtagccacctccgacatatcactcccccaaacccgcaagcgcgcttacgactcgatatcctccgccaccgtcgccgcccgcgatgcaccctctacaagccgcgatgcacgcgccaacagtgcaccaggtgctaaagatggagaccaagacaaggacggcgccatcaggccagcgcgcaagttcaccaagttcgtcgactacgatttcgacaagatagtagataccaaaggtggatttctcaacagcgaagatgacccattcaacaaagccatgtctggctccacctctctcggcaacgggactgcgaagcctgggccagagatggaacagaagccaaaggatatgaccatggccgaatgggagagattgcaactactgaagaaacttcgacgccagaaagcgggcccgtacgaaccgggtatcagcaccctaactgacgagaaggagaggaagaaatgtcgcgaatgcggtacgatggagattgatttcatatgggacgaggtcttttccgtcgcagtttgctcggggtgtaaggagaaacatcctgagaagtatagtcttcttacaaagacggagtgtagggaggattatctcctcacggagcctgaattgagagacgaagagctgctacctcatctatcacgtcccaatccacataagtcccactggcacgacatgatgctattcctgcgcttccaagtcgaggaatacgccttctccgacaagaaatgggggtctgccgaggcactagacgaggaattcgcgaaaagggaggtggaaaagaagaggaggaaggaagcaaaattcaaggagaaactgctggatctcaagaaacgcacgagaacggatgcatatagaagacagcagggcaaattcgataccgccgagacggtggcgacgaaggggaagaaggccaagtttggagatacggtcgcgaatggcgggaagcatgtccatgaatgggggcgcatcgttgagaatgaggagggagtgacgtgcaagacgtgtacgacttgtggcatggaggttgaggagatggaattttag

SEQ ID NO: 34730 - protein, 415 aa, Muscodor strobelii
  misc_feature: SGI Peptide ID NO. 572011
  misc_feature (250)..(301): Pfam Id: PF05181 Pfam Desc: XPA protein C-terminus
  misc_feature (3)..(415): NCBI GI: 85110729 Blast Desc: NCU08742 [Neurospora crassa OR74A] gi|28925288|gb|EAA34367.1| NCU08742 [Neurospora crassa OR74A] gi|38524234|emb|CAE75700.1| related to DNA repair protein RAD14
  misc_feature (6)..(415): NCBI GI: 171683822 Blast Desc: protein product [Podospora anserina] gi|170941871|emb|CAP67524.1| protein product [Podospora anserina]
  misc_feature (5)..(415): NCBI GI: 256730529 Blast Desc: NECHADRAFT_74138 [Nectria haematococca mpVI 77-13-4]
  misc_feature (6)..(415): NCBI GI: 116200247 Blast Desc: CHGG_08279 [Chaetomium globosum CBS 148.51] gi|88179558|gb|EAQ87026.1| CHGG_08279 [Chaetomium globosum CBS 148.51]
  misc_feature (6)..(415): NCBI GI: 169771875 Blast Desc: [Aspergillus oryzae RIB40] gi|83768266|dbj|BAE58405.1| protein product [Aspergillus oryzae]
  misc_feature (6)..(415): NCBI GI: 238485526 Blast Desc: DNA repair protein Rad14, [Aspergillus flavus NRRL3357] gi|220698880|gb|EED55219.1| DNA repair protein Rad14, [Aspergillus flavus NRRL3357]
  misc_feature (17)..(415): NCBI GI: 240109383 Blast Desc: DNA repair protein [Coccidioides posadasii C735 delta SOWgp]
  misc_feature (6)..(415): NCBI GI: 255955397 Blast Desc: Pc21g14360 [Penicillium chrysogenum Wisconsin 54-1255] gi|211590162|emb|CAP96333.1| Pc21g14360 [Penicillium chrysogenum Wisconsin 54-1255]
  misc_feature (17)..(415): NCBI GI: 119182746 Blast Desc: CIMG_06383 [Coccidioides immitis RS]
  misc_feature (1)..(415): NCBI GI: 119499189 Blast Desc: DNA repair protein rad14 [Neosartorya fischeri NRRL 181] gi|119414516|gb|EAW24455.1| DNA repair protein rad14 [Neosartorya fischeri NRRL 181]
  misc_feature: Useful for introducing or modulating the production of volatile compounds
MGATARPSTPTRAGPSKPSAAAASPPTPEVARRIEENRLKAKAIRDRREAEARAAGIPSISRTPSGFVATSDISLPQTRKRAYDSISSATVAARDAPSTSRDARANSAPGAKDGDQDKDGAIRPARKFTKFVDYDFDKIVDTKGGFLNSEDDPFNKAMSGSTSLGNGTAKPGPEMEQKPKDMTMAEWERLQLLKKLRRQKAGPYEPGISTLTDEKERKKCRECGTMEIDFIWDEVFSVAVCSGCKEKHPEKYSLLTKTECREDYLLTEPELRDEELLPHLSRPNPHKSHWHDMMLFLRFQVEEYAFSDKKWGSAEALDEEFAKREVEKKRRKEAKFKEKLLDLKKRTRTDAYRRQQGKFDTAETVATKGKKAKFGDTVANGGKHVHEWGRIVENEEGVTCKTCTTCGMEVEEMEF

SEQ ID NO: 34731 - DNA, 1485 bp, Muscodor strobelii
  misc_feature: SGI EST ID NO. CUFF.82839.0
  misc_feature: Variant of the nucleotide sequence at SEQ ID NO 34729
acgcactccccggaacctttgtcattcacgtttccgtacccaggcagctttcaacttttactcacgcctttccattaccgaaatcttgatccgtacataattctatcccttcaaaatctctggcccaagtcaagttcttgtcagaaatgggggctacggcacgtccttcgacgcctacacgggcaggcccctccaagcccagcgccgccgccgcatcgccacccacgcctgaagtcgcccgtcgcatcgaagaaaacagactaaaagccaaagccatacgcgaccgacgcgaagccgaagcccgcgccgccggcatcccctccatctcccgcacgccctccggcttcgtagccacctccgacatatcactcccccaaacccgcaagcgcgcttacgactcgatatcctccgccaccgtcgccgcccgcgatgcaccctctacaagccgcgatgcacgcgccaacagtgcaccaggtgctaaagatggagaccaagacaaggacggcgccatcaggccagcgcgcaagttcaccaagttcgtcgactacgatttcgacaagatagtagataccaaaggtggatttctcaacagcgaagatgacccattcaacaaagccatgtctggctccacctctctcggcaacgggactgcgaagcctgggccagagatggaacagaagccaaaggatatgaccatggccgaatgggagagattgcaactactgaagaaacttcgacgccagaaagcgggcccgtacgaaccgggtatcagcaccctaactgacgagaaggagaggaagaaatgtcgcgaatgcggtacgatggagattgatttcatatgggacgaggtcttttccgtcgcagtttgctcggggtgtaaggagaaacatcctgagaagtatagtcttcttacaaagacggagtgtagggaggattatctcctcacggagcctgaattgagagacgaagagctgctacctcatctatcacgtcccaatccacataagtcccactggcacgacatgatgctattcctgcgcttccaagtcgaggaatacgccttctccgacaagaaatgggggtctgccgaggcactagacgaggaattcgcgaaaagggaggtggaaaagaagaggaggaaggaagcaaaattcaaggagaaactgctggatctcaagaaacgcacgagaacggatgcatatagaagacagcagggcaaattcgataccgccgagacggtggcgacgaaggggaagaaggccaagtttggagatacggtcgcgaatggcgggaagcatgtccatgaatgggggcgcatcgttgagaatgaggagggagtgacgtgcaagacgtgtacgacttgtggcatggaggttgaggagatggaattttagatacccctttttgcaaatggacatactaaaactatgatgaaaattctgttgttggcatgaacgtgatttgacgggcacttacgccgttgat

SEQ ID NO: 34732 - DNA, 1479 bp, Muscodor strobelii
  misc_feature: SGI cDNA ID NO. 572012
  misc_feature: Encodes the peptide sequence at SEQ ID NO 34733
atggacgcaccgccgtcacccagccgcagtaagcggaaacccgccaacgaaccaatctcaccaccacccatcaaacgcaaagcgcaaagcaccatctcaagtccgtccaactatcccccttcatctcacttactaaacaatatgacagaaggctcagtcgcaagcttcttcacgcccacatcccaaaagcccaaagaccgcacattatggtctgagcgcgcagcgtccgacacacccgctacgcttctcgtcgggaaatacgagccagagtcaaagccagaatcagaatcagaaccaagcagcgcaaagcgcagaaaaatcgctgcattcgacctcgtacttcccccatccccaaatcctaacaaaggcctgctaatgcaactacaggactcaacattaatcctcacagcctcaggcaagaaattcagcaccgatccacgagactggaaatggtgggacgcctgcgttccttcaacgctgcgcactcttcacaaagagggatatttagtggtgattctatcaaaccaagccggactcacgctccaaccccccacaaaccccaaagcgcctaagggcaactggaaacagaaattgtccaacttcaaacttaaagttgggcttatactacaggatctcgatattccgactacggtgtatgccgctacgtcgaaagatatgttccgaaagccacggactgggatgtggacgaaactctgcgaagacgctgggttagagcggaaagatgttgatcttgagggatgtgtgtttgtgggtgatgcgggaggaagaatggcgggtaagggcaaagccaaagatttcagttgcagtgatcggaattttgcgcataatgttgggatctcttataagacgcctgaggagtacttttttaatgagccgccgagggactttgtcagagattttgacttcacggattaccccttccagaagaacgatgaagaggagaagtcgatggtgtttgagagaaaaggggacgagaaggatatcatactgttctgtgggccgcccggcgcgggtaaaagtacgttttactggagattcttgaaagagttggggtatgagagggtgaatcaggatttgttgaagagtagggctaagtgccttaagactgccggggatctgcttgagcgtgggaagtcggttgttgttgacaatacgaatcccgacactgacgttcggaaagagtggattgagctcgcgaagaaacatggcgtggagatacgttgtgtttggttcaaggttccgaaggggttgtgtgagcataacgatgttgtgagggcgttgaatgcgaagatgaacccagaatcccgcgaagcactaccaggcatggcatggaacggatatttctcacgactctcggaaccgaagaccaaggaggggttcaaagatgtcacgtctgtcgagttcaagttccggggcacgagggaggaatatgagatttggggcaagtactggacttag

SEQ ID NO: 34733 - protein, 492 aa, Muscodor strobelii
  misc_feature: SGI Peptide ID NO. 572012
  misc_feature (106)..(295): Pfam Id: PF08645 Pfam Desc: Polynucleotide kinase 3 phosphatase
  misc_feature (130)..(295): Pfam Id: PF08645 Pfam Desc: Polynucleotide kinase 3 phosphatase
  misc_feature (8)..(491): NCBI GI: 261354419 Blast Desc: bifunctional polynucleotide phosphatase/kinase [Verticillium albo-atrum VaMs.102]
  misc_feature (11)..(492): NCBI GI: 256734926 Blast Desc: NECHADRAFT_90529 [Nectria haematococca mpVI 77-13-4]
  misc_feature (6)..(492): NCBI GI: 46137935 Blast Desc: FG10482.1 [Gibberella zeae PH-1]
  misc_feature (5)..(492): NCBI GI: 171678243 Blast Desc: protein product [Podospora anserina] gi|170937191|emb|CAP61848.1| protein product [Podospora anserina]
  misc_feature (50)..(491): NCBI GI: 145608018 Blast Desc: MGG_09734 [Magnaporthe grisea 70-15] gi|145015485|gb|EDK00022.1| MGG_09734 [Magnaporthe grisea 70-15]
  misc_feature (50)..(491): NCBI GI: 164423605 Blast Desc: NCU08151 [Neurospora crassa OR74A] gi|157070164|gb|EAA30326.2| conserved [Neurospora crassa OR74A]
  misc_feature (7)..(481): NCBI GI: 189196656 Blast Desc: DNA kinase/phosphatase Pnk1 [Pyrenophora tritici-repentis Pt-1C-BFP] gi|187980545|gb|EDU47171.1| DNA kinase/phosphatase Pnk1 [Pyrenophora tritici-repentis Pt-1C-BFP]
  misc_feature (11)..(491): NCBI GI: 225560572 Blast Desc: polynucleotide kinase [Ajellomyces capsulatus G186AR]
  misc_feature (10)..(491): NCBI GI: 225683633 Blast Desc: DNA kinase/phosphatase Pnk1 [Paracoccidioides brasiliensis Pb03]
  misc_feature (11)..(491): NCBI GI: 240280135 Blast Desc: polynucleotide kinase [Ajellomyces capsulatus H143]
  misc_feature (130)..(491): SWISSPROT Homolog: EC 3.1.3.32 Polynucleotide 3'-phosphatase
  misc_feature (130)..(491): SWISSPROT Homolog: EC 2.7.1.78 Polynucleotide 5'-hydroxyl-kinase
MDAPPSPSRSKRKPANEPISPPPIKRKAQSTISSPSNYPPSSHLLNNMTEGSVASFFTPTSQKPKDRTLWSERAASDTPATLLVGKYEPESKPESESEPSSAKRRKIAAFDLVLPPSPNPNKGLLMQLQDSTLILTASGKKFSTDPRDWKWWDACVPSTLRTLHKEGYLVVILSNQAGLTLQPPTNPKAPKGNWKQKLSNFKLKVGLILQDLDIPTTVYAATSKDMFRKPRTGMWTKLCEDAGLERKDVDLEGCVFVGDAGGRMAGKGKAKDFSCSDRNFAHNVGISYKTPEEYFFNEPPRDFVRDFDFTDYPFQKNDEEEKSMVFERKGDEKDIILFCGPPGAGKSTFYWRFLKELGYERVNQDLLKSRAKCLKTAGDLLERGKSVVVDNTNPDTDVRKEWIELAKKHGVEIRCVWFKVPKGLCEHNDVVRALNAKMNPESREALPGMAWNGYFSRLSEPKTKEGFKDVTSVEFKFRGTREEYEIWGKYWT

SEQ ID NO: 34734 - DNA, 1694 bp, Muscodor strobelii
  misc_feature: SGI EST ID NO. CUFF.82538.0
  misc_feature: Variant of the nucleotide sequence at SEQ ID NO 34732
ctctcacatccatctcacatcaatgcccttcagcttgagcatttacagacacctactgctctacaattcatcatcatcaataccacatttcagagtactctgtgcacaaagaagattcactaccatggacgcaccgccgtcacccagccgcagtaagcggaaacccgccaacgaaccaatctcaccaccacccatcaaacgcaaagcgcaaagcaccatctcaaaaggctcagtcgcaagcttcttcacgcccacatcccaaaagcccaaagaccgcacattatggtctgagcgcgcagcgtccgacacacccgctacgcttctcgtcgggaaatacgagccagagtcaaagccagaatcagaatcagaaccaagcagcgcaaagcgcagaaaaatcgctgcattcgacctcgactcaacattaatcctcacagcctcaggcaagaaattcagcaccgatccacgagactggaaatggtgggacgcctgcgttccttcaacgctgcgcactcttcacaaagagggatatttagtggtgattctatcaaaccaagccggactcacgctccaaccccccacaaaccccaaagcgcctaagggcaactggaaacagaaattgtccaacttcaaacttaaagttgggcttatactacaggatctcgatattccgactacggtgtatgccgctacgtcgaaagatatgttccgaaagccacggactgggatgtggacgaaactctgcgaagacgctgggttagagcggaaagatgttgatcttgagggatgtgtgtttgtgggtgatgcgggaggaagaatggcgggtaagggcaaagccaaagatttcagttgcagtgatcggaattttgcgcataatgttgggatctcttataagacgcctgaggagtacttttttaatgagccgccgagggactttgtcagagattttgacttcacggattaccccttccagaagaacgatgaagaggagaagtcgatggtgtttgagagaaaaggggacgagaaggatatcatactgttctgtgggccgcccggcgcgggtaaaagtacgttttactggagattcttgaaagagttggggtatgagagggtgaatcaggatttgttgaagagtagggctaagtgccttaagactgccggggatctgcttgagcgtgggaagtcggttgttgttgacaatacgaatcccgacactgacgttcggaaagagtggattgagctcgcgaagaaacatggcgtggagatacgttgtgtttggttcaaggttccgaaggggttgtgtgagcataacgatgttgtgagggcgttgaatgcgaagatgaacccagaatcccgcgaagcactaccaggcatggcatggaacggatatttctcacgactctcggaaccgaagaccaaggaggggttcaaagatgtcacgtctgtcgagttcaagttccggggcacgagggaggaatatgagatttggggcaagtactggacttaggaaggcatccgtggtcgttgtttgggccagggctgaagagagattgcgtagtgactagtagattacgcatatactacgcatagactatatatagactacctatctatatgcaggaggggtatagatggtctatgatcaagaacgtagttgctgtgcttgctgttgtgttacgcaacgttcccgaatccgt

SEQ ID NO: 34735 - DNA, 1431 bp, Muscodor strobelii
  misc_feature: SGI cDNA ID NO. 572013
  misc_feature: Elevated expression when VOC is produced
  misc_feature: Encodes the peptide sequence at SEQ ID NO 34736
atggacgcaccgccgtcacccagccgcagtaagcggaaacccgccaacgaaccaatctcaccaccacccatcaaacgcaaagcgcaaagcaccatctcaaaaggctcagtcgcaagcttcttcacgcccacatcccaaaagcccaaagaccgcacattatggtctgagcgcgcagcgtccgacacacccgctacgcttctcgtcgggaaatacgagccagagtcaaagccagaatcagaatcagaaccaagcagcgcaaagcgcagaaaaatcgctgcattcgacctcgtacttcccccatccccaaatcctaacaaaggcctgctaatgcaactacaggactcaacattaatcctcacagcctcaggcaagaaattcagcaccgatccacgagactggaaatggtgggacgcctgcgttccttcaacgctgcgcactcttcacaaagagggatatttagtggtgattctatcaaaccaagccggactcacgctccaaccccccacaaaccccaaagcgcctaagggcaactggaaacagaaattgtccaacttcaaacttaaagttgggcttatactacaggatctcgatattccgactacggtgtatgccgctacgtcgaaagatatgttccgaaagccacggactgggatgtggacgaaactctgcgaagacgctgggttagagcggaaagatgttgatcttgagggatgtgtgtttgtgggtgatgcgggaggaagaatggcgggtaagggcaaagccaaagatttcagttgcagtgatcggaattttgcgcataatgttgggatctcttataagacgcctgaggagtacttttttaatgagccgccgagggactttgtcagagattttgacttcacggattaccccttccagaagaacgatgaagaggagaagtcgatggtgtttgagagaaaaggggacgagaaggatatcatactgttctgtgggccgcccggcgcgggtaaaagtacgttttactggagattcttgaaagagttggggtatgagagggtgaatcaggatttgttgaagagtagggctaagtgccttaagactgccggggatctgcttgagcgtgggaagtcggttgttgttgacaatacgaatcccgacactgacgttcggaaagagtggattgagctcgcgaagaaacatggcgtggagatacgttgtgtttggttcaaggttccgaaggggttgtgtgagcataacgatgttgtgagggcgttgaatgcgaagatgaacccagaatcccgcgaagcactaccaggcatggcatggaacggatatttctcacgactctcggaaccgaagaccaaggaggggttcaaagatgtcacgtctgtcgagttcaagttccggggcacgagggaggaatatgagatttggggcaagtactggacttag

SEQ ID NO: 34736 - protein, 476 aa, Muscodor strobelii
  misc_feature: SGI Peptide ID NO. 572013
  misc_feature (90)..(279): Pfam Id: PF08645 Pfam Desc: Polynucleotide kinase 3 phosphatase
  misc_feature (114)..(279): Pfam Id: PF08645 Pfam Desc: Polynucleotide kinase 3 phosphatase
  misc_feature (8)..(475): NCBI GI: 261354419 Blast Desc: bifunctional polynucleotide phosphatase/kinase [Verticillium albo-atrum VaMs.102]
  misc_feature (3)..(476): NCBI GI: 256734926 Blast Desc: NECHADRAFT_90529 [Nectria haematococca mpVI 77-13-4]
  misc_feature (6)..(476): NCBI GI: 46137935 Blast Desc: FG10482.1 [Gibberella zeae PH-1]
  misc_feature (5)..(476): NCBI GI: 171678243 Blast Desc: protein product [Podospora anserina] gi|170937191|emb|CAP61848.1| protein product [Podospora anserina]
  misc_feature (36)..(475): NCBI GI: 145608018 Blast Desc: MGG_09734 [Magnaporthe grisea 70-15] gi|145015485|gb|EDK00022.1| MGG_09734 [Magnaporthe grisea 70-15]
  misc_feature (26)..(475): NCBI GI: 164423605 Blast Desc: NCU08151 [Neurospora crassa OR74A] gi|157070164|gb|EAA30326.2| conserved [Neurospora crassa OR74A]
  misc_feature (7)..(465): NCBI GI: 189196656 Blast Desc: DNA kinase/phosphatase Pnk1 [Pyrenophora tritici-repentis Pt-1C-BFP] gi|187980545|gb|EDU47171.1| DNA kinase/phosphatase Pnk1 [Pyrenophora tritici-repentis Pt-1C-BFP]
  misc_feature (11)..(475): NCBI GI: 225560572 Blast Desc: polynucleotide kinase [Ajellomyces capsulatus G186AR]
  misc_feature (10)..(475): NCBI GI: 225683633 Blast Desc: DNA kinase/phosphatase Pnk1 [Paracoccidioides brasiliensis Pb03]
  misc_feature (11)..(475): NCBI GI: 240280135 Blast Desc: polynucleotide kinase [Ajellomyces capsulatus H143]
  misc_feature (114)..(475): SWISSPROT Homolog: EC 3.1.3.32 Polynucleotide 3'-phosphatase
  misc_feature (114)..(475): SWISSPROT Homolog: EC 2.7.1.78 Polynucleotide 5'-hydroxyl-kinase
  misc_feature: Useful for introducing or modulating the production of volatile compounds
MDAPPSPSRSKRKPANEPISPPPIKRKAQSTISKGSVASFFTPTSQKPKDRTLWSERAASDTPATLLVGKYEPESKPESESEPSSAKRRKIAAFDLVLPPSPNPNKGLLMQLQDSTLILTASGKKFSTDPRDWKWWDACVPSTLRTLHKEGYLVVILSNQAGLTLQPPTNPKAPKGNWKQKLSNFKLKVGLILQDLDIPTTVYAATSKDMFRKPRTGMWTKLCEDAGLERKDVDLEGCVFVGDAGGRMAGKGKAKDFSCSDRNFAHNVGISYKTPEEYFFNEPPRDFVRDFDFTDYPFQKNDEEEKSMVFERKGDEKDIILFCGPPGAGKSTFYWRFLKELGYERVNQDLLKSRAKCLKTAGDLLERGKSVVVDNTNPDTDVRKEWIELAKKHGVEIRCVWFKVPKGLCEHNDVVRALNAKMNPESREALPGMAWNGYFSRLSEPKTKEGFKDVTSVEFKFRGTREEYEIWGKYWT

SEQ ID NO: 34737 - DNA, 1694 bp, Muscodor strobelii; identical to SEQ ID NO: 34734
  misc_feature: SGI EST ID NO. CUFF.82538.0
  misc_feature: Variant of the nucleotide sequence at SEQ ID NO 34735

SEQ ID NO: 34738 - DNA, 1485 bp, Muscodor strobelii
  misc_feature: SGI cDNA ID NO. 572014
  misc_feature: Encodes the peptide sequence at SEQ ID NO 34739
atggacgcaccgccgtcacccagccgcagtaagcggaaacccgccaacgaaccaatctcaccaccacccatcaaacgcaaagcgcaaagcaccatctcaagtccgtccaactatcccccttcatctcacttactaaacaatatgacagaaggctcagtcgcaagcttcttcacgcccacatcccaaaagcccaaagaccgcacattatggtctgagcgcgcagcgtccgacacacccgctacgcttctcgtcgggaaatacgagccagagtcaaagccagaatcagaatcagaaccaagcagcgcaaagcgcagaaaaatcgctgcattcgacctcgtacttcccccatccccaaatcctaacaaaggcctgctaatgcaactacaggactcaacattaatcctcacagcctcaggcaagaaattcagcaccgatccacgagactggaaatggtgggacgcctgcgttccttcaacgctgcgcactcttcacaaagagggatatttagtggtgattctatcaaaccaagccggactcacgctccaaccccccacaaaccccaaagcgcctaagggcaactggaaacagaaattgtccaacttcaaacttaaagttgggcttatactacaggatctcgatattccgactacggtgtatgccgctacgtcgaaagatatgttccgaaagccacggactgggatgtggacgaaactctgcgaagacgctgggttagagcggaaagatgttgatcttgagggatgtgtgtttgtgggtgatgcgggaggaagaatggcgggtaagggcaaagccaaagatttcagttgcagtgatcggaattttgcgcataatgttgggatctcttataagacgcctgaggagtacttttttaatgagccgccgagggactttgtcagagattttgacttcacggattaccccttccagaagaacgatgaagaggagaagtcgatggtgtttgagagaaaaggggacgagaaggatatcatactgttctgtgggccgcccggcgcgggtaaaagtacgttttactggagattcttgaaagagttggggtatgagagggtgaatcaggatttgttgaagagtagggctaagtgccttaagactgccggggatctgcttgagcgtgggaagtcggttgttgttgtgacagacaatacgaatcccgacactgacgttcggaaagagtggattgagctcgcgaagaaacatggcgtggagatacgttgtgtttggttcaaggttccgaaggggttgtgtgagcataacgatgttgtgagggcgttgaatgcgaagatgaacccagaatcccgcgaagcactaccaggcatggcatggaacggatatttctcacgactctcggaaccgaagaccaaggaggggttcaaagatgtcacgtctgtcgagttcaagttccggggcacgagggaggaatatgagatttggggcaagtactggacttag

SEQ ID NO: 34739 - protein, 494 aa, Muscodor strobelii
  misc_feature: SGI Peptide ID NO. 572014
  misc_feature (106)..(295): Pfam Id: PF08645 Pfam Desc: Polynucleotide kinase 3 phosphatase
  misc_feature (130)..(295): Pfam Id: PF08645 Pfam Desc: Polynucleotide kinase 3 phosphatase
  misc_feature (8)..(493): NCBI GI: 261354419 Blast Desc: bifunctional polynucleotide phosphatase/kinase [Verticillium albo-atrum VaMs.102]
  misc_feature (11)..(494): NCBI GI: 256734926 Blast Desc: NECHADRAFT_90529 [Nectria haematococca mpVI 77-13-4]
  misc_feature (6)..(494): NCBI GI: 46137935 Blast Desc: FG10482.1 [Gibberella zeae PH-1]
  misc_feature (5)..(494): NCBI GI: 171678243 Blast Desc: protein product [Podospora anserina] gi|170937191|emb|CAP61848.1| protein product [Podospora anserina]
  misc_feature (50)..(493): NCBI GI: 145608018 Blast Desc: MGG_09734 [Magnaporthe grisea 70-15] gi|145015485|gb|EDK00022.1| MGG_09734 [Magnaporthe grisea 70-15]
  misc_feature (50)..(493): NCBI GI: 164423605 Blast Desc: NCU08151 [Neurospora crassa OR74A] gi|157070164|gb|EAA30326.2| conserved [Neurospora crassa OR74A]
  misc_feature (7)..(483): NCBI GI: 189196656 Blast Desc: DNA kinase/phosphatase Pnk1 [Pyrenophora tritici-repentis Pt-1C-BFP] gi|187980545|gb|EDU47171.1| DNA kinase/phosphatase Pnk1 [Pyrenophora tritici-repentis Pt-1C-BFP]
  misc_feature (11)..(493): NCBI GI: 225560572 Blast Desc: polynucleotide kinase [Ajellomyces capsulatus G186AR]
  misc_feature (10)..(493): NCBI GI: 225683633 Blast Desc: DNA kinase/phosphatase Pnk1 [Paracoccidioides brasiliensis Pb03]
  misc_feature (11)..(493): NCBI GI: 240280135 Blast Desc: polynucleotide kinase [Ajellomyces capsulatus H143]
  misc_feature (130)..(493): SWISSPROT Homolog: EC 3.1.3.32 Polynucleotide 3'-phosphatase
  misc_feature (130)..(493): SWISSPROT Homolog: EC 2.7.1.78 Polynucleotide 5'-hydroxyl-kinase
MDAPPSPSRSKRKPANEPISPPPIKRKAQSTISSPSNYPPSSHLLNNMTEGSVASFFTPTSQKPKDRTLWSERAASDTPATLLVGKYEPESKPESESEPSSAKRRKIAAFDLVLPPSPNPNKGLLMQLQDSTLILTASGKKFSTDPRDWKWWDACVPSTLRTLHKEGYLVVILSNQAGLTLQPPTNPKAPKGNWKQKLSNFKLKVGLILQDLDIPTTVYAATSKDMFRKPRTGMWTKLCEDAGLERKDVDLEGCVFVGDAGGRMAGKGKAKDFSCSDRNFAHNVGISYKTPEEYFFNEPPRDFVRDFDFTDYPFQKNDEEEKSMVFERKGDEKDIILFCGPPGAGKSTFYWRFLKELGYERVNQDLLKSRAKCLKTAGDLLERGKSVVVVTDNTNPDTDVRKEWIELAKKHGVEIRCVWFKVPKGLCEHNDVVRALNAKMNPESREALPGMAWNGYFSRLSEPKTKEGFKDVTSVEFKFRGTREEYEIWGKYWT

SEQ ID NO: 34740 - DNA, 1694 bp, Muscodor strobelii; identical to SEQ ID NO: 34734
  misc_feature: SGI EST ID NO. CUFF.82538.0
  misc_feature: Variant of the nucleotide sequence at SEQ ID NO 34738

SEQ ID NO: 34741 - DNA, 3054 bp, Muscodor strobelii
  misc_feature: SGI cDNA ID NO. 572015
  misc_feature: Encodes the peptide sequence at SEQ ID NO 34742
atggagcctgttggcttagctgtgggaatcgttgggctcgctggtctattcagcacctgccttgatatcgtggaaagatgggatacctacagagatttcgaagttgaatcgaaagccttgattgctcgctttgaagctgacagagtcctttttcggcgatggggccagaccataggcatcgatggagcgaaacaggcagagccctgccacgaggatctcaaagacccgtctatccgatcggcaattaacaagattctacaaagtatcaaagatgtcgaccgtaatatacctgaatcgctggttccggccccgaataccctgtccagcacaagtagacagcttgaaaaaccacgaggccgagcctcgcagagtcgtagaataatatggacgctgagaggcaaaatgcgcttttgtacactagttgagcgattcgacgtcttggtccaaaagttgtatagcctcattcctgtgacccctgcgtcctatgcaggccagatgaaacccggcgatcttatctctcctaacggagaagcttcgtgggggtttgagattcagacgctcttaattgagatgaagagacaaatagacagtgagaaccccttcgcttttggctggattgtactaaaccgtgcagatgagatcaggatagatttgcaggattggctcgatacgcatgattccaaaagcgtgtatgaggctttcgttctcaagagacagaatggtacttgcgactggattttggatcggtctgagttcttacagtggaaatcgtctgtttcagaacacacgccgccgctgtggattaatggccctcctggctatggaaaaactgttctttgtgcaagaatcattcaagatttgttgcaagattcggaagcgcctttggcatacttcttcttttcttcagaattggaaagtcgggcggatccattcattgtgatgagatcctggatctctcaagttatgatgcaagatcaacgggcgttcgatctcgcacgagagaaaaaatatgctaccatcgaacgcgtagcatcacaaacagatgttgaagacctttttgcgtcaataactctaaaaattccgaaatgcacatttattgttgatgggcttgacgagtgcaccacgcgagagtatagcaccgggacacgttttaaggcctctttgcttcagtttctaaatggcctgaggcgtctagtctcgcgaacatcatcgcgccttttgattgttagtcgcgatgaccaagagattcggaaaggcttggttgggcggaagcgcgacgaatatgactcggagtcgattgagatacagatccatgaaaaagacgtcaaaccagatgcgaccttgctagcagaaaacattgtgaaaaccaatcttttcaacaagagcgaagcacagcagaaggatcttacacacaaaatagtcgatcgctgccagtcaatgttcctggggatcaaactgctagaaccggatctcaaggggggcaaaaatatgaagcaactccaacgagttattgatgatgcaccaaacaagctcgatcatatttatgaccgggactggaaaacaatagaaagtctcgagcggacaagcaaatgccgtgcgctcgcaattctgagatgggtaacatttgccgtgcgcccaatcacagttttggaaataacggaaattcttcttcttgcggacgacgagcgcgatgaactcgactacaccgagcttccagattccattgacgaggtttacattcagacggagatatctgagctttgtggatcgctgattgaggttcgggaagcacaaccatcttccaacttaggtcacgcgactattcatctccgtcatttctcagtcagagaatatattttgcaccacatcgtggtttcaccccgcgaaatagccgcgagtcacgagcttcgatcggcaaacgagttaatacaaagcaacattcttgcgaaaacatgcattcggtacttagattgcgaagaggtatggggagaaaaattgcagaatgaagcgaatcacactatgattcaagcattccgagactatgcgacaacttcgtggtataagcatgtaaaagatggcattatcaactcagagtgtgtgttcgaccgaataaatgagtttttcaatccagtaaatgaaaattgggaagcgtggagaagacatcacgacagagcatttcgacaccagtttataaactttgagggggatatcgatacagcaagccgcttattctacgcatcactccttggcttttcgaggacagtcactcatcttttaacggaacttggattggacgtagaccacgtggactcatcgaaccgaacagcattgcttggtgcaagctatggaggaaggacggacgtcgtagagctgctgctgcaacatggtgccagggtaaacactgcggaagtaagacgaagaactcctttgtatgtggctgcagcgcgaggccatctcctggtggtgaaactccttctcgaaaacagagccgatttgacaatacccgattgtgatggatggacgccgcttcttgaagcctcatggcgtggttatatcgacgtggttaagtacttaatcgaaaggggggccgatctgaccgtatcttttcatgacggaaggacgccgcttcacctggcttcatcatttggtcgtgttgaggtggttaagtatttgctccaaaagggggccgatcaaaccgtactcaatgaggatgggcaaacaccacttgacagagcgtcgaatggaggccatatcgaagtggtcaaacatctactcgagaagagggtacatctaatcacggccagccaagacgggggggtactgcctagagccaatgccaacatcgagctggtcaaaatgaaagatgcaggcggagagacaccattgcaccacgctctatttcgaggccaagttgatgttgccaaattgcttcttggtagcggctgggatgtgttgacggaagacaatgcaggccgctggaggcaaatcccacagattgttttggcgcgagtgctttatcagttgctgcacgtttgggccgagagcacatggtaa

SEQ ID NO: 34742 - protein, 1017 aa, Muscodor strobelii
  misc_feature: SGI Peptide ID NO. 572015
  misc_feature (871)..(903): Pfam Id: PF00023 Pfam Desc: Ankyrin repeat
  misc_feature (838)..(870): Pfam Id: PF00023 Pfam Desc: Ankyrin repeat
  misc_feature (805)..(837): Pfam Id: PF00023 Pfam Desc: Ankyrin repeat
  misc_feature (957)..(989): Pfam Id: PF00023 Pfam Desc: Ankyrin repeat
  misc_feature (772)..(804): Pfam Id: PF00023 Pfam Desc: Ankyrin repeat
  misc_feature (838)..(867): Pfam Id: PF00023 Pfam Desc: Ankyrin repeat
  misc_feature (904)..(936): Pfam Id: PF00023 Pfam Desc: Ankyrin repeat
  misc_feature (1)..(991): NCBI GI: 255950182 Blast Desc: Pc22g19550 [Penicillium chrysogenum Wisconsin 54-1255] gi|211592875|emb|CAP99243.1| Pc22g19550 [Penicillium chrysogenum Wisconsin 54-1255]
  misc_feature (307)..(991): NCBI GI: 169766172 Blast Desc: [Aspergillus oryzae RIB40] gi|83765412|dbj|BAE55555.1| protein product [Aspergillus oryzae]
  misc_feature (27)..(984): NCBI GI: 46126459 Blast Desc: FG07607.1 [Gibberella zeae PH-1]
  misc_feature (1)..(991): NCBI GI: 46139775 Blast Desc: FG11402.1 [Gibberella zeae PH-1]
  misc_feature (1)..(992): NCBI GI: 261353217 Blast Desc: ankyrin-1 [Verticillium albo-atrum VaMs.102]
  misc_feature (307)..(991): NCBI GI: 238482849 Blast Desc: ankyrin, [Aspergillus flavus NRRL3357] gi|220700713|gb|EED57051.1| ankyrin, [Aspergillus flavus NRRL3357]
  misc_feature (213)..(921): NCBI GI: 46134013 Blast Desc: FG09146.1 [Gibberella zeae PH-1]
  misc_feature (215)..(984): NCBI GI: 238505400 Blast Desc: ankyrin repeat domain protein, [Aspergillus flavus NRRL3357] gi|220690043|gb|EED46393.1| ankyrin repeat domain protein, [Aspergillus flavus NRRL3357]
  misc_feature (215)..(991): NCBI GI: 169780448 Blast Desc: [Aspergillus oryzae RIB40] gi|83773428|dbj|BAE63555.1| protein product [Aspergillus oryzae]
  misc_feature (211)..(984): NCBI GI: 145603741 Blast Desc: MGG_05856 [Magnaporthe grisea 70-15] gi|145011903|gb|EDJ96559.1| MGG_05856 [Magnaporthe grisea 70-15]
MEPVGLAVGIVGLAGLFSTCLDIVERWDTYRDFEVESKALIARFEADRVLFRRWGQTIGIDGAKQAEPCHEDLKDPSIRSAINKILQSIKDVDRNIPESLVPAPNTLSSTSRQLEKPRGRASQSRRIIWTLRGKMRFCTLVERFDVLVQKLYSLIPVTPASYAGQMKPGDLISPNGEASWGFEIQTLLIEMKRQIDSENPFAFGWIVLNRADEIRIDLQDWLDTHDSKSVYEAFVLKRQNGTCDWILDRSEFLQWKSSVSEHTPPLWINGPPGYGKTVLCARIIQDLLQDSEAPLAYFFFSSELESRADPFIVMRSWISQVMMQDQRAFDLAREKKYATIERVASQTDVEDLFASITLKIPKCTFIVDGLDECTTREYSTGTRFKASLLQFLNGLRRLVSRTSSRLLIVSRDDQEIRKGLVGRKRDEYDSESIEIQIHEKDVKPDATLLAENIVKTNLFNKSEAQQKDLTHKIVDRCQSMFLGIKLLEPDLKGGKNMKQLQRVIDDAPNKLDHIYDRDWKTIESLERTSKCRALAILRWVTFAVRPITVLEITEILLLADDERDELDYTELPDSIDEVYIQTEISELCGSLIEVREAQPSSNLGHATIHLRHFSVREYILHHIVVSPREIAASHELRSANELIQSNILAKTCIRYLDCEEVWGEKLQNEANHTMIQAFRDYATTSWYKHVKDGIINSECVFDRINEFFNPVNENWEAWRRHHDRAFRHQFINFEGDIDTASRLFYASLLGFSRTVTHLLTELGLDVDHVDSSNRTALLGASYGGRTDVVELLLQHGARVNTAEVRRRTPLYVAAARGHLLVVKLLLENRADLTIPDCDGWTPLLEASWRGYIDVVKYLIERGADLTVSFHDGRTPLHLASSFGRVEVVKYLLQKGADQTVLNEDGQTPLDRASNGGHIEVVKHLLEKRVHLITASQDGGVLPRANANIELVKMKDAGGETPLHHALFRGQVDVAKLLLGSGWDVLTEDNAGRWRQIPQIVLARVLYQLLHVWAESTW

SEQ ID NO: 34743 - DNA, 1140 bp, Muscodor strobelii
  misc_feature: SGI cDNA ID NO. 572016
  misc_feature: Encodes the peptide sequence at SEQ ID NO 34744
atgcgttcattctcacttcttatctctgttctcatagctgtattatctctaatcgtctatcgcgaacaaacattcgaatttgtaaccgtgaatctcgcaaaagttaccgcgcatttcaacattgtgaccaacactaccagagtatcgagccctagtacttcggaggaatcaggcatccaatccaactctccattctataatccaacacaccggctcgtcgcgactgacatgtcaatcccacgcgcaattagcaaggttttccttgcggtcgagcaggccgagggggcaggtgctcgcgtccgccgctcaatcggcacgccacaacttcgtaacttctcgccctttctcatgctagatcacttcagcatcaagccacctgccggattcccagatcacccccatcgcggacaagaaactattacatacctcctcaatggtgcagtcgaacacgaagactttgctggcaatgctggcaaaatagaagccggcgatttgcagttcatgacagcagggcgtggcatcatacacgccgagatgccacagcgcgacccaaacccagatggcagcgctaacgtggggctccagctgtgggttgatctcccagcgcacttgaaaatgtgcgagccacgatatcgagatctgcgggcaaaagaaatcccgcaggttgatattgacgataaggtccacgtcaaggtcatttccggacaggcaggcggcgtcgacagcgtcaaagaccttgcctacacgccagtatggatcttggatgtcgagatcaaacccggcggcaaactcgcacaacctatccccgtcggctggaatgcgttttcgtaccagcttgaaggatctgccgtctttggatttggcgatgccaagcgcacggttgaacaataccacaactgtgtcttcgaacccaccggcgatgtcgtcaatgttgaggttcccgagaatgcgacctcgagtgcgcgttttgttctcgtcgctggccagatcctcgatcagaaagtcgtgcaatacggccctttcgttttgaataccccagaagaggtgcgacaagccctctttgactaccaatttcaaaccaatggattcgagagagcgaagggctgggccagtgagattggtaagggaatggtgcattag

SEQ ID NO: 34744 - protein, 379 aa, Muscodor strobelii
  misc_feature: SGI Peptide ID NO. 572016
  misc_feature (97)..(198): Pfam Id: PF02678 Pfam Desc: Pirin
  misc_feature (253)..(362): Pfam Id: PF05726 Pfam Desc: Pirin C-terminal cupin domain
  misc_feature (77)..(379): NCBI GI: 261352969 Blast Desc: pirin [Verticillium albo-atrum VaMs.102]
  misc_feature (1)..(379): NCBI GI: 28881146 Blast Desc: related to pirin [Neurospora crassa]
  misc_feature (70)..(378): NCBI GI: 46121579 Blast Desc: FG05168.1 [Gibberella zeae PH-1]
  misc_feature (1)..(379): NCBI GI: 256732977 Blast Desc: [Nectria haematococca mpVI 77-13-4]
  misc_feature (77)..(379): NCBI GI: 85079199 Blast Desc: NCU03369 [Neurospora crassa OR74A] gi|28917362|gb|EAA27068.1| NCU03369 [Neurospora crassa OR74A]
  misc_feature (4)..(379): NCBI GI: 119484194 Blast Desc: pirin [Neosartorya fischeri NRRL 181] gi|119410156|gb|EAW20103.1| pirin [Neosartorya fischeri NRRL 181]
  misc_feature (72)..(378): NCBI GI: 121719717 Blast Desc: pirin [Aspergillus clavatus NRRL 1] gi|119404769|gb|EAW15131.1| pirin [Aspergillus clavatus NRRL 1]
  misc_feature (77)..(379): NCBI GI: 70983462 Blast Desc: pirin [Aspergillus fumigatus Af293] gi|66844884|gb|EAL85220.1| pirin, [Aspergillus fumigatus Af293] gi|159123736|gb|EDP48855.1| pirin, [Aspergillus fumigatus A1163]
  misc_feature (77)..(377): NCBI GI: 115491071 Blast Desc: conserved [Aspergillus terreus NIH2624] gi|114197023|gb|EAU38723.1| conserved [Aspergillus terreus NIH2624]
  misc_feature (77)..(377): NCBI GI: 169772855 Blast Desc: [Aspergillus oryzae RIB40] gi|238490758|ref|XP_002376616.1| pirin, [Aspergillus flavus NRRL3357] gi|83768757|dbj|BAE58894.1| protein product oryzae]
MRSFSLLISVLIAVLSLIVYREQTFEFVTVNLAKVTAHFNIVTNTTRVSSPSTSEESGIQSNSPFYNPTHRLVATDMSIPRAISKVFLAVEQAEGAGARVRRSIGTPQLRNFSPFLMLDHFSIKPPAGFPDHPHRGQETITYLLNGAVEHEDFAGNAGKIEAGDLQFMTAGRGIIHAEMPQRDPNPDGSANVGLQLWVDLPAHLKMCEPRYRDLRAKEIPQVDIDDKVHVKVISGQAGGVDSVKDLAYTPVWILDVEIKPGGKLAQPIPVGWNAFSYQLEGSAVFGFGDAKRTVEQYHNCVFEPTGDVVNVEVPENATSSARFVLVAGQILDQKVVQYGPFVLNTPEEVRQALFDYQFQTNGFERAKGWASEIGKGMVH

SEQ ID NO: 34745 - DNA, 2389 bp, Muscodor strobelii
  misc_feature: SGI EST ID NO. CUFF.82681.0
  misc_feature: Variant of the nucleotide sequence at SEQ ID NO 34743
gccggatgcgctacaagctttgttccggtgccttggcttgcctagaagcaaggcggggtcttgatcgagggaatcgctgcatttctggtgatttgtcttccatcaccaagcagtgccgctaatgatttttctcgaattttctcgagttaaatctaacctactagtcggctgcaatccgttttgcttttgaaacatggtcctccaacagcgacctgcttggtgatgatgatgaagcatgtgccttatctagatctgcttgtccctgcatatgtccatcatcacaccttgcttgtatataagcctcacatcgcagccagtttgtcacgatgcgttcattctcacttcttatctctgttctcatagctgtattatctctaatcgtctatcgcgaacaaacattcgaatttgtaaccgtgaatctcgcaaaagttaccgcgcatttcaacattgtgaccaacactaccagagtatcgagccctagtacttcggaggaatcaggcatccaatccaactctccattctataatccaacacaccggctcgtcgcgactgacatgtcaatcccacgcgcaattagcaaggttttccttgcggtcgagcaggccgagggggcaggtgctcgcgtccgccgctcaatcggcacgccacaacttcgtaacttctcgccctttctcatgctagatcacttcagcatcaagccacctgccggattcccagatcacccccatcgcggacaagaaactattacatacctcctcaatggtgcagtcgaacacgaagactttgctggcaatgctggcaaaatagaagccggcgatttgcagttcatgacagcagggcgtggcatcatacacgccgagatgccacagcgcgacccaaacccagatggcagcgctaacgtggggctccagctgtgggttgatctcccagcgcacttgaaaatgtgcgagccacgatatcgagatctgcgggcaaaagaaatcccgcaggttgatattgacgataaggtccacgtcaaggtcatttccggacaggcaggcggcgtcgacagcgtcaaagaccttgcctacacgccagtatggatcttggatgtcgagatcaaacccggcggcaaactcgcacaacctatccccgtcggctggaatgcgttttcgtaccagcttgaaggatctgccgtctttggatttggcgatgccaagcgcacggttgaacaataccacaactgtgtcttcgaacccaccggcgatgtcgtcaatgttgaggttcccgagaatgcgacctcgagtgcgcgttttgttctcgtcgctggccagatcctcgatcagaaagtcgtgcaatacggccctttcgttttgaataccccagaagaggtgcgacaagccctctttgactaccaatttcaaaccaatggattcgagagagcgaagggctgggccagtgagattggtaagggaatggtgcattaggaatcggacttgttttcatgatattgccgtctccagaccggcactccttcgtgtatatactttcatttgacgactcattctcctgtcactaggagatcatacccactgcccactggcagaaagttcgcctgcattttggcgcatttgcgatgatttgacgaacaacacgactattagatagcgaaattgagtggggattgcaccatgagaacttttttcttcatttagaaatttccccgcgggcgctttctggggaatggctctggtagagttaccgcccacgccagtcggtacaactctgcaggaggtagttctctgtccgcccacaggctgactttcgctggcaaaagtcctgtaacctgctgcacacgtggatttttaaggatgtcctttgcctttagttttggcggttgcgggctcggccttgtagtagtcaagggcttgcgactggaagcattgctagaggtaggacgggactgcgatcttcgttttattgtttgcgcgggttgtaatcgtgaagttgtctgtaatctagaggaatctcgagacttgcggctgtgagactcttgtcgactactcggtttcagtgacagggatagtgactccaactctttactgatttcagcgtctaatgggacactttggcgcggcgctcgaggaggtgcatatctgaacggcatttttcctgcatctacttgattattcaatcctcaatacttcgaaaaggaaacgacgtagaagtctcacgatagaaactcaaggcagcgagcctgctatataccatcttcaaccccaccatccagaggtaaccagagaggttggacgcctcacctgtcatcccaccgtaccataagcctgggaccagcaatgatgtggcggtcttggcccgcggtcagagtcgcacggtacaagcaggctttcag

SEQ ID NO: 34746 - DNA, 969 bp, Muscodor strobelii
  misc_feature: SGI cDNA ID NO. 572017
  misc_feature: Encodes the peptide sequence at SEQ ID NO 34747
atggccgtcgttcaagttccttcagaaacggactcttcactcaaccagaccggtcacacagtttccctcgcccatgtcccctcgggtgctgattcttcttcgatcgattgcaccactgtcgacacaatgtccgtcagccaggttatttcagcaatgaactctcttgacctcaacgccccaaccttgctcacaattccgcttgagctccgccacattgtatatcgctacgtctttgatcatgacaagatcaatggtacaatccacgtcctcgaccgtcgccgcccgaagaaaggaaagaaacgtccgaacaagttgcctgtgccatctatcatgatcgtctgcaagcagattcgaggggaagccctgcaagtctactgggagaaccgcagagtctggctgaacaatgtcacctaccaattctactaccggccccgtgtatctttgtccgagattgagtgcaagattaatgaggatattcgtgccaacgtccgtcacatccgcggacagtgcatcgagaagtggggaacgatggcccaaggccatgctcgttcgctcttgcatagcttcccaaacttgaagacgtttcgtctacatggcttcagccatgtcgggaacttttggacaaatggcatcgatcaatatcaggatgtcatgggatgggctttgaaagcctgcggaggaaactttcagtccaccgacacccaggatatcatcgcggggttcgagatgaatccgaaagactgcagcattgaatttcagatggtcattgttgtcacagtcatggttcccgaagatcatgactactacctgttattcatcaacctgaatactggtaaacacttgttcattgacggtacggacgacatcaacgatcttacacttggtcattgggacgaggacgacgacgtttggcgtgaactacgcaaggaggacatacgcacagttggtgaagactcatcgcaatcgtga

SEQ ID NO: 34747 - protein, 322 aa, Muscodor strobelii
  misc_feature: SGI Peptide ID NO. 572017
MAVVQVPSETDSSLNQTGHTVSLAHVPSGADSSSIDCTTVDTMSVSQVISAMNSLDLNAPTLLTIPLELRHIVYRYVFDHDKINGTIHVLDRRRPKKGKKRPNKLPVPSIMIVCKQIRGEALQVYWENRRVWLNNVTYQFYYRPRVSLSEIECKINEDIRANVRHIRGQCIEKWGTMAQGHARSLLHSFPNLKTFRLHGFSHVGNFWTNGIDQYQDVMGWALKACGGNFQSTDTQDIIAGFEMNPKDCSIEFQMVIVVTVMVPEDHDYYLLFINLNTGKHLFIDGTDDINDLTLGHWDEDDDVWRELRKEDIRTVGEDSSQS

SEQ ID NO: 34748 - DNA, 162 bp, Muscodor strobelii
  misc_feature: SGI EST ID NO. CUFF.82567.0
  misc_feature: Variant of the nucleotide sequence at SEQ ID NO 34746
cccaggatatcatcgcggggttcgagatgaatccgaaagactgcagcattgaatttcagatggtcattgttgtcacagtcatggttcccgaagatcatgactactacctgttattcatcaacctgaatactggtaaacacttgttcattgacggtacggacg

SEQ ID NO: 34749 - DNA, 882 bp, Muscodor strobelii
  misc_feature: SGI cDNA ID NO. 572018
  misc_feature: Encodes the peptide sequence at SEQ ID NO 34750
atgaagtccatcgtcctgcagagccctgccagcttcatgaacctcccccttgagcttcgctgggagattcttcgccatgtcttccgtctcgaccaaaacaatgctgaagtcctcctctactacgctcgttatctcaagagaggaaaattgcccaagaagcagactgtgccacctatcttgctcacctgcaagcagatctatgaggaaggaatcaagatcttctgggaaaaccgacgcgtctggctcaatgttttgacttatcgatgggagccactgggcgtaaagctcgctgatgaagccatctcgctgtatcatctctggcgaaagatccctacgtctgttgccatgagtattcgtcacattcggggccagaaccttaagcaatggggccagatggataagggccgggctggaatccttctgaccgaattcccggatcttaggaccttcagattacatggcgccgctcacattggccctttctgggacggcgatgaacaatgggatgaaaattggaaggccatcatggggtgtgcactccgggatggcaatgaccaaaatcaggccatcatggagtatgccctccgaaactgtgatgccaaattcaacttcactaccacgcgcgacataattgccagctttccgctcaaccccaagacctgcaatatcgaattccaggttgtcattgtcattaccgcacgcatgctcgagcgctaccactacctgctctatgtcaatctgaacacagggaaacatcttttcgtgcccggcgatggtcatctcgattttctcacacttggctatcgggacgaggaggaggcaatctggaaagacttgcgcatcaagggcgcttcagccggcagccctacttttgggtcttga

SEQ ID NO: 34750 - protein, 293 aa, Muscodor strobelii
  misc_feature: SGI Peptide ID NO. 572018
MKSIVLQSPASFMNLPLELRWEILRHVFRLDQNNAEVLLYYARYLKRGKLPKKQTVPPILLTCKQIYEEGIKIFWENRRVWLNVLTYRWEPLGVKLADEAISLYHLWRKIPTSVAMSIRHIRGQNLKQWGQMDKGRAGILLTEFPDLRTFRLHGAAHIGPFWDGDEQWDENWKAIMGCALRDGNDQNQAIMEYALRNCDAKFNFTTTRDIIASFPLNPKTCNIEFQVVIVITARMLERYHYLLYVNLNTGKHLFVPGDGHLDFLTLGYRDEEEAIWKDLRIKGASAGSPTFGS

SEQ ID NO: 34751 - DNA, 328 bp, Muscodor strobelii
  misc_feature: SGI EST ID NO. CUFF.82570.0
  misc_feature: Variant of the nucleotide sequence at SEQ ID NO 34749
caagacctgcaatatcgaattccaggttgtcattgtcattaccgcacgcatgctcgagcgctaccactacctgctctatgtcaatctgaacacagggaaacatcttttcgtgcccggcgatggtcatctcgattttctcacacttggctatcgggacgaggaggaggcaatctggaaagacttgcgcatcaagggcgcttcagccggcagccctacttttgggtcttgaatcttcacgaaatgttacctcctactagggagaagatcctaaatgaactgcttttcaaagccgacgtacccagaaaattgccactaggtttggttcttg

SEQ ID NO: 34752 - DNA, 1125 bp, Muscodor strobelii
  misc_feature: SGI cDNA ID NO. 572019
  misc_feature: Encodes the peptide sequence at SEQ ID NO 34753
atggcaacaaactcacttccgcgaacacacaaggctttggtccaagaggtgtacgccggatcgctcattgtcaagaccgtcccaactcctcaaccaacaccaggttcagcgatcattaagatcatccatgttcctattatctcatacattcgagacgtttataatgggaagagaagatacccctatcctaacccgttggttcccggcacaagcgctatcggccgcgttgtagctacgggacccgatgctgttcttctgaaagaaggtgatctggtctacttcgatagcacgattcgcggccgggatgacagtgatgctatcttccttcacggaatctctgagggtgctggagaggggtcaagaaagttgatggcaggagagtggcgcgactcgacctacgcggagtatgctaaagtgccactagaaaacgtctttcaacttaatgagaggattctctgcggctcgcccgaggaaggtggcctgggttatgcaccagcgcaattgtgttggctcttgcaggcccttgtgccctatggtgggctgaggagcataggtctccaagctggcgagaccatcatcgtcgcaccagcgacgggaggctttggatcggccgcagttgtatgcgcgctcgcgttaggtgctagagtcattgctatgggtcgaaacgtcggcgcactagcacaactcaaggctcttggccccagggttgagactgtccaatttagtggcgacgaagagacggacctagccaacttgaagaatttcggcaaaatcgacgcatatttcgatatctcacctccagaagctacgggctcatcgcatgttaagacagccattcatagtcttggccaagatggcagagtcagcttgatgggtgggctgctgggtgatgtgcctctgccgcacaagtacatcatgagacatgacattacgatcaaggggaagtggatgtattccagggcagactctttagcaatgcttaaattgttcaacaccggtgcgttagacgtccgccacatttctaagatagtgggggacttcaaattggaggattgggaggaagccctgcagaccgctttcgagaaaggtggcaagctaggacagttagttgtgttcagtccatag

SEQ ID NO: 34753 - protein, 374 aa, Muscodor strobelii
  misc_feature: SGI Peptide ID NO. 572019
  misc_feature (34)..(147): Pfam Id: PF08240 Pfam Desc: Alcohol dehydrogenase GroES-like domain
  misc_feature (188)..(332): Pfam Id: PF00107 Pfam Desc: Zinc-binding dehydrogenase
  misc_feature (53)..(147): Pfam Id: PF08240 Pfam Desc: Alcohol dehydrogenase GroES-like domain
  misc_feature (6)..(374): NCBI GI: 212544364 Blast Desc: alcohol dehydrogenase, [Penicillium marneffei ATCC 18224] gi|210065305|gb|EEA19399.1| alcohol dehydrogenase, [Penicillium marneffei ATCC 18224]
  misc_feature (6)..(362): NCBI GI: 156061299 Blast Desc: SS1G_02792 [Sclerotinia sclerotiorum 1980] gi|154700196|gb|EDN99934.1| SS1G_02792 [Sclerotinia sclerotiorum 1980]
  misc_feature (6)..(372): NCBI GI: 154319662 Blast Desc: BC1G_02312 [Botryotinia fuckeliana B05.10] gi|150855970|gb|EDN31162.1| BC1G_02312 [Botryotinia fuckeliana B05.10]
  misc_feature (6)..(362): NCBI GI: 256726237 Blast Desc: NECHADRAFT_81942 [Nectria haematococca mpVI 77-13-4]
  misc_feature (2)..(374): NCBI GI: 242823919 Blast Desc: quinone oxidoreductase, [Talaromyces stipitatus ATCC 10500] gi|218713077|gb|EED12502.1| quinone oxidoreductase, [Talaromyces stipitatus ATCC 10500]
  misc_feature (5)..(374): NCBI GI: 256728770 Blast Desc: NECHADRAFT_86057 [Nectria haematococca mpVI 77-13-4]
  misc_feature (1)..(374): NCBI GI: 261198679 Blast Desc: isopropanol dehydrogenase [Ajellomyces dermatitidis SLH14081] gi|239594893|gb|EEQ77474.1| isopropanol dehydrogenase [Ajellomyces dermatitidis SLH14081] gi|239609983|gb|EEQ86970.1|
  misc_feature (6)..(373): NCBI GI: 255946325 Blast Desc: Pc20g14540 [Penicillium chrysogenum Wisconsin 54-1255] gi|211588665|emb|CAP86783.1| Pc20g14540 [Penicillium chrysogenum Wisconsin 54-1255]
  misc_feature (3)..(363): NCBI GI: 39960341 Blast Desc: MGG_09359 [Magnaporthe grisea 70-15] gi|145014309|gb|EDJ98877.1| MGG_09359 [Magnaporthe grisea 70-15]
  misc_feature (4)..(374): NCBI GI: 261358234 Blast Desc: alcohol dehydrogenase GroES domain-containing protein [Verticillium albo-atrum VaMs.102]
  misc_feature (5)..(371): SWISSPROT Homolog: EC 1.1.1.1 Alcohol dehydrogenase
MATNSLPRTHKALVQEVYAGSLIVKTVPTPQPTPGSAIIKIIHVPIISYIRDVYNGKRRYPYPNPLVPGTSAIGRVVATGPDAVLLKEGDLVYFDSTIRGRDDSDAIFLHGISEGAGEGSRKLMAGEWRDSTYAEYAKVPLENVFQLNERILCGSPEEGGLGYAPAQLCWLLQALVPYGGLRSIGLQAGETIIVAPATGGFGSAAVVCALALGARVIAMGRNVGALAQLKALGPRVETVQFSGDEETDLANLKNFGKIDAYFDISPPEATGSSHVKTAIHSLGQDGRVSLMGGLLGDVPLPHKYIMRHDITIKGKWMYSRADSLAMLKLFNTGALDVRHISKIVGDFKLEDWEEALQTAFEKGGKLGQLVVFSP

SEQ ID NO: 34754 - DNA, 180 bp, Muscodor strobelii
  misc_feature: SGI EST ID NO. CUFF.82587.0
  misc_feature: Variant of the nucleotide sequence at SEQ ID NO 34752
gcttgatgggtgggctgctgggtgatgtgcctctgccgcacaagtacatcatgagacatgacattacgatcaaggggaagtggatgtattccagggcagactctttagcaatgcttaaattgttcaacaccggtgcgttagacgtccgccacatttctaagatagtgggggacttcaaat

SEQ ID NO: 34755 - DNA, 1071 bp, Muscodor strobelii
  misc_feature: SGI cDNA ID NO. 572020
  misc_feature: Encodes the peptide sequence at SEQ ID NO 34756
atgaacggggaaacagcaggaaatacagactttattcccatccctgaacttgcgaaatcagatggagatctggtgcttatttttctttctggcaatggggtcgctttcgcccaacctctgaacgatgattggtatagagccatagtcccggatgtgctcctcggtagcgtggtcacgtcaggaaaggaacaatcatatcgaatgcagtatgcggcatctcctatggcttgtgttgaacaatggcaatggtgtaatttagccgcaccccaagaaaatcaatgtaggccgctagccagcttcgctgatgccattttcggggctgcgccactattcaatgtcacgaaggatgtgttgcttcaggagagaccctatactcctgaggtcatcggttctcagtttctttggtacgcaacatctcttggaaccttcctcatcgacatattgcaacaacaaggcgcgaaatccctgggatcgcaagatcgactctacaatggagttcagtggcctttgccagtcgatcaatggaaattggacgtccaatactggtggaatgtgattctctctcttaatcaagattcattcgtcaaactagtccaggggcctagtgatcctgagttcgacgacttgcggtggtcaccgcgtgatgcaaatgaggagagattttgcgatagtcagaaaattcggagcacggcgcatacctcatttagtgtctttggcattctcttcatggcggccacaggcttcctcattatatgcacatccttcgcccttgagccggctttgacatttcttcataaacgctataagtataagcaatatgcgcagctggaatggacctcgaactcgagtctccaactgcaccgactagcccatgaaatgccaggtctctggcatcgatgtgccgaccaagtcccaatatccaagcaccaggtacttctagagaaccttcacatcaccgacttgaaccatcctgtacttcaatcctcggcagcagacgtgttcacgcgaagaccggaaatagagctaggcgagcttgctcttattaatgcggtgggacactcgctagaataa

SEQ ID NO: 34756 - protein, 356 aa, Muscodor strobelii
  misc_feature: SGI Peptide ID NO. 572020
  misc_feature (13)..(327): NCBI GI: 189194015 Blast Desc: conserved [Pyrenophora tritici-repentis Pt-1C-BFP] gi|187978910|gb|EDU45536.1| conserved [Pyrenophora tritici-repentis Pt-1C-BFP]
  misc_feature (4)..(340): NCBI GI: 169615058 Blast Desc: SNOG_10683 [Phaeosphaeria nodorum SN15] gi|111060957|gb|EAT82077.1| SNOG_10683 [Phaeosphaeria nodorum SN15]
  misc_feature (11)..(302): NCBI GI: 169618215 Blast Desc: SNOG_12297 [Phaeosphaeria nodorum SN15] gi|160703576|gb|EAT80110.2| SNOG_12297 [Phaeosphaeria nodorum SN15]
  misc_feature (4)..(325): NCBI GI: 256723662 Blast Desc: NECHADRAFT_86728 [Nectria haematococca mpVI 77-13-4]
  misc_feature (13)..(308): NCBI GI: 169772941 Blast Desc: [Aspergillus oryzae RIB40] gi|83768800|dbj|BAE58937.1| protein product [Aspergillus oryzae]
  misc_feature (5)..(307): NCBI GI: 115399382 Blast Desc: [Aspergillus terreus NIH2624] gi|114192163|gb|EAU33863.1| [Aspergillus terreus NIH2624]
  misc_feature (9)..(320): NCBI GI: 121699395 Blast Desc: ACLA_082720 [Aspergillus clavatus NRRL 1] gi|119396149|gb|EAW06581.1| ACLA_082720 [Aspergillus clavatus NRRL 1]
  misc_feature (13)..(307): NCBI GI: 119474227 Blast Desc: NFIA_004500 [Neosartorya fischeri NRRL 181] gi|119407142|gb|EAW17092.1| conserved [Neosartorya fischeri NRRL 181]
  misc_feature (13)..(307): NCBI GI: 159128250 Blast Desc: conserved [Aspergillus fumigatus A1163]
  misc_feature (13)..(307): NCBI GI: 70986226 Blast Desc: conserved [Aspergillus fumigatus Af293] gi|66846236|gb|EAL86569.1| conserved [Aspergillus fumigatus Af293]
MNGETAGNTDFIPIPELAKSDGDLVLIFLSGNGVAFAQPLNDDWYRAIVPDVLLGSVVTSGKEQSYRMQYAASPMACVEQWQWCNLAAPQENQCRPLASFADAIFGAAPLFNVTKDVLLQERPYTPEVIGSQFLWYATSLGTFLIDILQQQGAKSLGSQDRLYNGVQWPLPVDQWKLDVQYWWNVILSLNQDSFVKLVQGPSDPEFDDLRWSPRDANEERFCDSQKIRSTAHTSFSVFGILFMAATGFLIICTSFALEPALTFLHKRYKYKQYAQLEWTSNSSLQLHRLAHEMPGLWHRCADQVPISKHQVLLENLHITDLNHPVLQSSAADVFTRRPEIELGELALINAVGHSLE

SEQ ID NO: 34757 - DNA, 954 bp, Muscodor strobelii
  misc_feature: SGI EST ID NO. CUFF.82593.0
  misc_feature: Variant of the nucleotide sequence at SEQ ID NO 34755
cgaccatgaacggggaaacagcaggaaatacagactttattcccatccctgaacttgcgaaatcagatggagatctggtgcttatttttctttctggcaatggggtcgctttcgcccaacctctgaacgatgattggtatagagccatagtcccggatgtgctcctcggtagcgtggtcacgtcaggaaaggaacaatcatatcgaatgcagtatgcggcatctcctatggcttgtgttgaacaatggcaatggtgtaatttagccgcaccccaagaaaatcaatgtaggccgctagccagcttcgctgatgccattttcggggctgcgccactattcaatgtcacgaaggatgtgttgcttcaggagagaccctatactcctgaggtcatcggttctcagtttctttggtacgcaacatctcttggaaccttcctcatcgacatattgcaacaacaaggcgcgaaatccctgggatcgcaagatcgactctacaatggagttcagtggcctttgccagtcgatcaatggaaattggacgtccaatactggtggaatgtgattctctctcttaatcaagattcattcgtcaaactagtccaggggcctagtgatcctgagttcgacgacttgcggtggtcaccgcgtgatgcaaatgaggagagattttgcgatagtcagaaaattcggagcacggcgcatacctcatttagtgtctttggcattctcttcatggcggccacaggcttcctcattatatgcacatccttcgcccttgagccggctttgacatttcttcataaacgctataagtataagcaatatgcgcagctggaatggacctcgaactcgagtctccaactgcaccgactagcccatgaaatgccaggtctctggcatcgatgtgccgaccaagtcccaatatccaagcaccaggtacttctagagaaccttc

SEQ ID NO: 34758 - DNA, 729 bp, Muscodor strobelii
  misc_feature: SGI cDNA ID NO. 572021
  misc_feature: Encodes the peptide sequence at SEQ ID NO 34759
atggtttcgtatacactgagcaagtatagtggcgatagcagtaaagtgtttgtcacgggcacttcttcaggagctatgatgacgaacgtgctggccgcaacataccccgacgtcttcaaagcaggaatagcctacgcaggagtcccagcaggttgtttctacactggcacagtcgacggatggaattcaacgtgctctcaaggacaaatcaatcagtcgcaaacgtattgggcgaatgtcgctaagaacatgtatcccggatatactggtgctcgtccaaagatgagaattcatcatggatccgctgatacgacactgtacccgcagaattacaatgagacaatcaagcagtggacaggaatctttggatatactactacgcctacggcgacgtatgtcaatgatcctgcgagcccgtatacgagatacgtttatggacctaacgttgaaggcgtttatggaacgggtattacgcataatatcaatatctttggagatgctgatatgcaatggtttggattctcggcctcaagcacaacaactacgatagccagcgccactagtacaaaaaccactacgtctgcgaccgcaacgagcacttccggcagtggtagtggtagtgcggctcattatgcgcagtgcggcggcatcggatggacaggcgcaaccgcgtgtgcgagcccctacacatgcactaaaatgaatgattattactctcaatgtctttaa

SEQ ID NO: 34759 - protein, 242 aa, Muscodor strobelii
  misc_feature: SGI Peptide ID NO. 572021
  misc_feature (210)..(238): Pfam Id: PF00734 Pfam Desc: Fungal cellulose binding domain
  misc_feature (1)..(242): NCBI GI: 171695530 Blast Desc: protein product [Podospora anserina] gi|170948007|emb|CAP60171.1| protein product [Podospora anserina]
  misc_feature (1)..(242): NCBI GI: 116181368 Blast Desc: CHGG_01312 [Chaetomium globosum CBS 148.51] gi|88185609|gb|EAQ93077.1| CHGG_01312 [Chaetomium globosum CBS 148.51]
  misc_feature (1)..(242): NCBI GI: 85113565 Blast Desc: NCU00710 [Neurospora crassa OR74A] gi|28926330|gb|EAA35308.1| NCU00710 [Neurospora crassa OR74A]
  misc_feature (1)..(242): NCBI GI: 70983864 Blast Desc: acetyl xylan esterase [Aspergillus fumigatus Af293] gi|66845084|gb|EAL85420.1| acetyl xylan esterase, [Aspergillus fumigatus Af293]
  misc_feature (1)..(242): NCBI GI: 119485504 Blast Desc: acetyl xylan esterase, [Neosartorya fischeri NRRL 181] gi|119410342|gb|EAW20289.1| acetyl xylan esterase, [Neosartorya fischeri NRRL 181]
  misc_feature (1)..(242): NCBI GI: 74697396 Blast Desc: AXE1_PENPU RecName: Full=Acetylxylan esterase 1; AltName: Full=AXE I; Flags: Precursor gi|22135562|gb|AAM93261.1| acetyl xylan esterase [Penicillium purpurogenum]
  misc_feature (1)..(175): NCBI GI: 242762506 Blast Desc: acetyl xylan esterase, [Talaromyces stipitatus ATCC 10500] gi|218723587|gb|EED23004.1| acetyl xylan esterase, [Talaromyces stipitatus ATCC 10500]
  misc_feature (1)..(175): NCBI GI: 238493565 Blast Desc: acetyl xylan esterase, [Aspergillus flavus NRRL3357] gi|220696513|gb|EED52855.1| acetyl xylan esterase, [Aspergillus flavus NRRL3357]
  misc_feature (1)..(174): NCBI GI: 46139069 Blast Desc: FG11049.1 [Gibberella zeae PH-1]
  misc_feature (1)..(175): NCBI GI: 169783734 Blast Desc: [Aspergillus oryzae RIB40] gi|45581605|dbj|BAD12626.1| acetyl xylan esterase [Aspergillus oryzae] gi|83775073|dbj|BAE65196.1| protein product [Aspergillus oryzae]
  misc_feature (1)..(242): SWISSPROT Homolog: EC 3.1.1.72 Acetylxylan esterase
MVSYTLSKYSGDSSKVFVTGTSSGAMMTNVLAATYPDVFKAGIAYAGVPAGCFYTGTVDGWNSTCSQGQINQSQTYWANVAKNMYPGYTGARPKMRIHHGSADTTLYPQNYNETIKQWTGIFGYTTTPTATYVNDPASPYTRYVYGPNVEGVYGTGITHNINIFGDADMQWFGFSASSTTTTIASATSTKTTTSATATSTSGSGSGSAAHYAQCGGIGWTGATACASPYTCTKMNDYYSQCL

SEQ ID NO: 34760 - DNA, 625 bp, Muscodor strobelii
  misc_feature: SGI EST ID NO. CUFF.82603.0
  misc_feature: Variant of the nucleotide sequence at SEQ ID NO 34758
acagcaactcgattgcgaacatggtttcgtatacactgagcaagtatagtggcgatagcagtaaagtgtttgtcacgggcacttcttcaggagctatgatgacgaacgtgctggccgcaacataccccgacgtcttcaaagcaggaatagcctacgcaggagtcccagcaggttgtttctacactggcacagtcgacggatggaattcaacgtgctctcaaggacaaatcaatcagtcgcaaacgtattgggcgaatgtcgctaagaacatgtatcccggatatactggtgctcgtccaaagatgagaattcatcatggatccgctgatacgacactgtacccgcagaattacaatgagacaatcaagcagtggacaggaatctttggatatactactacgcctacggcgacgtatgtcaatgatcctgcgagcccgtatacgagatacgtttatggacctaacgttgaaggcgtttatggaacgggtattacgcataatatcaatatctttggagatgctgatatgcaatggtttggattctcggtaagagccgcctcgtactgtttgcattctgaatagcgtcactcattgaaatacaatacaggcctcaagcacaacaacta

SEQ ID NO: 34761 - DNA, 1848 bp, Muscodor strobelii
  misc_feature: SGI cDNA ID NO. 572022
  misc_feature: Reduced expression when VOC is produced
  misc_feature: Encodes the peptide sequence at SEQ ID NO 34762
atgtcggcgacgggcgaaaaagtcgccgatctcgagagagacggtggcttaaatgccgatcactccaacttgaacgagaaatctattacggcaacatcaagcgacgacgacaatgcgacgagccacagcagtgacagtccagcatcgaacacaaataaggaagaaagagttgctgctccagactcaggttcaaaagaagcacaaaatggccatgcgcagggtcctccgaacgagccaccgcactcgagcgagcgtacaagaacagagatggcgttgattatggcagcgctgtgctctgcgctttttctcgctgctctcgatattaccattattacgactgccattccgtcgattgttggcgaattcaaatcaccctctggttatacgtgggtgggagccgcatataccttggccaattcggcatctgtcccgtcatggggtaaaatcagcgatatttgggggcgtaagccggtgcttctagttgccgttgctgtattctggatcggatctttgatctcggcacttgcaaagaacattggacaactaatcgctggacgcgctattcagggtaccggcggcggtggtattgttgtccttatcaatattgccgtttccgacttggtatctgtccggtctcgcggtacatattatggtatctttggtggtgtctgggctcttgcgtccgctattggtccggttctcggcggtgtcttcacgtccaaggtcacatggcgatggtgtttctacatcaacttgccgatttcaggtctcggattcttcgttttattgtttgtgcttaagctacacaaccccaagacgtcagtacgagaaggtctggctgccatcgattggctaggaagcttgctgctcatcggtgcaactctacttctcttattcggtctggaatttggcggtgttacttacccctggaagtcggctactgtcatctccctgatagtgttcagtgtcgtcacgtttgcattagcattcgtcgtcgagagatatgtcgcgaagttccccgtcattccgctcaagctcttcaagtcgagaaagaatgtcgctgcatttggctgctgcttcattcatggatttgtctttatctccggctcatattacctccccttgtatttccaggcggttgttggagcatcgtctttgctgtccggtgtctacctcctggcaaatgccttggccgtatcctttttctcggccggcgttggtatttggatgaagaagactggaaagtacttgcctcctatcattttcggcatgttcttcatgactcttggatttggactgttcatcgactttggccctagagtcaactgggctaagcttatcatctaccagatcattgctggtattggtattggaccgaattttcagtctcccctcattgcgctgcaatctggactcgcccccaaggatatcggtgctgcaacaagtaccttccagttcatccgccaacttgccacctcgatctccatcgtcattggtggtgtcgttttccagaatggtatgcagaagcaataccccaagctcctggctgagctcggccccgagatcgcaaaccagttgtctggcagcagtgccggggccagtgttggtctagttcactcgctcacaggagagcaaagtctcattgcgagaactgcatactcgatgtctctgcgcgatatgtggatcgtctacactgcattctccggtctgggtctcatcattgcgccatttgtgggacaaagaaagctcagcaaggagcacacagaacacaagaccggtctccagaacttggccaagaacgagttcaaggagggtgagcaacaacctgaggaaaagactgcgagctag

SEQ ID NO: 34762 - protein, 615 aa, Muscodor strobelii
  misc_feature: SGI Peptide ID NO. 572022
  misc_feature (97)..(496): Pfam Id: PF07690 Pfam Desc: Major Facilitator Superfamily
  misc_feature (97)..(308): Pfam Id: PF07690 Pfam Desc: Major Facilitator Superfamily
  misc_feature (310)..(496): Pfam Id: PF07690 Pfam Desc: Major Facilitator Superfamily
  misc_feature (147)..(265): Pfam Id: PF00083 Pfam Desc: Sugar (and other) transporter
  misc_feature (4)..(614): NCBI GI: 46107656 Blast Desc: FG00711.1 [Gibberella zeae PH-1]
  misc_feature (29)..(611): NCBI GI: 171695528 Blast Desc: protein product [Podospora anserina] gi|170948006|emb|CAP60170.1| protein product [Podospora anserina]
  misc_feature (48)..(601): NCBI GI: 256734760 Blast Desc: [Nectria haematococca mpVI 77-13-4]
  misc_feature (19)..(611): NCBI GI: 261361344 Blast Desc: conserved [Verticillium albo-atrum VaMs.102]
  misc_feature (16)..(612): NCBI GI: 116181366 Blast Desc: CHGG_01311 [Chaetomium globosum CBS 148.51] gi|88185608|gb|EAQ93076.1| CHGG_01311 [Chaetomium globosum CBS 148.51]
  misc_feature (20)..(615): NCBI GI: 164428545 Blast Desc: NCU00711 [Neurospora crassa OR74A] gi|157072188|gb|EAA35309.2| conserved [Neurospora crassa OR74A]
  misc_feature (25)..(606): NCBI GI: 156040225 Blast Desc: SS1G_12128 [Sclerotinia sclerotiorum 1980] gi|154696185|gb|EDN95923.1| SS1G_12128 [Sclerotinia sclerotiorum 1980]
  misc_feature (31)..(611): NCBI GI: 39969719 Blast Desc: MGG_10469 [Magnaporthe grisea 70-15] gi|145012107|gb|EDJ96763.1| MGG_10469 [Magnaporthe grisea 70-15]
  misc_feature (30)..(595): NCBI GI: 169602761 Blast Desc: SNOG_04383 [Phaeosphaeria nodorum SN15] gi|111067023|gb|EAT88143.1| SNOG_04383 [Phaeosphaeria nodorum SN15]
  misc_feature (17)..(595): NCBI GI: 189203997 Blast Desc: multidrug resistance protein fnx1 [Pyrenophora tritici-repentis Pt-1C-BFP] gi|187985433|gb|EDU50921.1| multidrug resistance protein fnx1 [Pyrenophora tritici-repentis Pt-1C-BFP]
  misc_feature: Useful for introducing or modulating the production of volatile compounds
MSATGEKVADLERDGGLNADHSNLNEKSITATSSDDDNATSHSSDSPASNTNKEERVAAPDSGSKEAQNGHAQGPPNEPPHSSERTRTEMALIMAALCSALFLAALDITIITTAIPSIVGEFKSPSGYTWVGAAYTLANSASVPSWGKISDIWGRKPVLLVAVAVFWIGSLISALAKNIGQLIAGRAIQGTGGGGIVVLINIAVSDLVSVRSRGTYYGIFGGVWALASAIGPVLGGVFTSKVTWRWCFYINLPISGLGFFVLLFVLKLHNPKTSVREGLAAIDWLGSLLLIGATLLLLFGLEFGGVTYPWKSATVISLIVFSVVTFALAFVVERYVAKFPVIPLKLFKSRKNVAAFGCCFIHGFVFISGSYYLPLYFQAVVGASSLLSGVYLLANALAVSFFSAGVGIWMKKTGKYLPPIIFGMFFMTLGFGLFIDFGPRVNWAKLIIYQIIAGIGIGPNFQSPLIALQSGLAPKDIGAATSTFQFIRQLATSISIVIGGVVFQNGMQKQYPKLLAELGPEIANQLSGSSAGASVGLVHSLTGEQSLIARTAYSMSLRDMWIVYTAFSGLGLIIAPFVGQRKLSKEHTEHKTGLQNLAKNEFKEGEQQPEEKTAS

SEQ ID NO: 34763 - DNA, 2432 bp, Muscodor strobelii
  misc_feature: SGI EST ID NO. CUFF.82694.0
  misc_feature: Variant of the nucleotide sequence at SEQ ID NO 34761
cttaattctactgtgtcatcgataccgcaagcgggtttgagacggttgcatccgaaggagaacgaagggaaaactgcagaaaataatggagctccccgctgcgtggatcaagtcggcattctcagtcgtccgagttgctcgctctcgccttgccttccctggcgatgtaggcgtaatagttaccttactaattgatcattgagcccaccatgatatatatattttcatgacatcccatcagggccccagttcgtgttttggagctactgcttttgtattctataccaccatttcattgattcgccgtttatttcgttcttcaagaagtttcccctggcaggcttgtatcacattccccgcgccgttcgcatttcctaaggagaggaggcgcattccagaaaaaatgtcggcgacgggcgaaaaagtcgccgatctcgagagagacggtggcttaaatgccgatcactccaacttgaacgagaaatctattacggcaacatcaagcgacgacgacaatgcgacgagccacagcagtgacagtccagcatcgaacacaaataaggaagaaagagttgctgctccagactcaggttcaaaagaagcacaaaatggccatgcgcagggtcctccgaacgagccaccgcactcgagcgagcgtacaagaacagagatggcgttgattatggcagcgctgtgctctgcgctttttctcgctgctctcgatattaccattattacgactgccattccgtcgattgttggcgaattcaaatcaccctctggttatacgtgggtgggagccgcatataccttggccaattcggcatctgtcccgtcatggggtaaaatcagcgatatttgggggcgtaagccggtgcttctagttgccgttgctgtattctggatcggatctttgatctcggcacttgcaaagaacattggacaactaatcgctggacgcgctattcagggtaccggcggcggtggtattgttgtccttatcaatattgccgtttccgacttggtatctgtccggtctcgcggtacatattatggtatctttggtggtgtctgggctcttgcgtccgctattggtccggttctcggcggtgtcttcacgtccaaggtcacatggcgatggtgtttctacatcaacttgccgatttcaggtctcggattcttcgttttattgtttgtgcttaagctacacaaccccaagacgtcagtacgagaaggtctggctgccatcgattggctaggaagcttgctgctcatcggtgcaactctacttctcttattcggtctggaatttggcggtgttacttacccctggaagtcggctactgtcatctccctgatagtgttcagtgtcgtcacgtttgcattagcattcgtcgtcgagagatatgtcgcgaagttccccgtcattccgctcaagctcttcaagtcgagaaagaatgtcgctgcatttggctgctgcttcattcatggatttgtctttatctccggctcatattacctccccttgtatttccaggcggttgttggagcatcgtctttgctgtccggtgtctacctcctggcaaatgccttggccgtatcctttttctcggccggcgttggtatttggatgaagaagactggaaagtacttgcctcctatcattttcggcatgttcttcatgactcttggatttggactgttcatcgactttggccctagagtcaactgggctaagcttatcatctaccagatcattgctggtattggtattggaccgaattttcagtctcccctcattgcgctgcaatctggactcgcccccaaggatatcggtgctgcaacaagtaccttccagttcatccgccaacttgccacctcgatctccatcgtcattggtggtgtcgttttccagaatggtatgcagaagcaataccccaagctcctggctgagctcggccccgagatcgcaaaccagttgtctggcagcagtgccggggccagtgttggtctagttcactcgctcacaggagagcaaagtctcattgcgagaactgcatactcgatgtctctgcgcgatatgtggatcgtctacactgcattctccggtctgggtctcatcattgcgccatttgtgggacaaagaaagctcagcaaggagcacacagaacacaagaccggtctccagaacttggccaagaacgagttcaaggagggtgagcaacaacctgaggaaaagactgcgagctagagcatgtgtataaaagcattcttggagcatatagattgtaatggataataatagaacagaataaattcttctcgatttaatgtacatcttacgtattctatatccgacacgtggctgcatgtattgctgatctctttcgcccttctttcagctccgaaaatatgcatttctaagattctca

SEQ ID NO: 34764 - DNA, 492 bp, Muscodor strobelii
  misc_feature: SGI cDNA ID NO. 572023
  misc_feature: Encodes the peptide sequence at SEQ ID NO 34765
atgtactctttcgttggcttcgtggctctagcaaccacctttaacgcactcgtcgtgtcgggcataccctctctttaccaatcttctaagcctctcaacagtttagatccgctcttctctgggtttgagaccagctgcaaaagcaacttcgactttgcagaaggacccggcaatgtctggctccgggccacttgcctcagccgtggtcaagtcgagactttcactgtcctcaatctaaaccactgcgttgccaacgccaggggtttcatggtgaagcagcccgaggggaactttgcccagacttgccagtgtaaggacttaattgcccctagcgaactctactgcaactgtgattacggcggcaaaccgaataataacgtcgacgctattacgctttcggattttgtgggaaatgacgatggacagcttcgctgcttcgacgcacgtggctgcacacccactaatgatgactacagagattaccctcagtga

SEQ ID NO: 34765 - protein, 163 aa, Muscodor strobelii
  misc_feature: SGI Peptide ID NO. 572023
  misc_feature (43)..(145): Pfam Id: PF08881 Pfam Desc: CVNH domain
MYSFVGFVALATTFNALVVSGIPSLYQSSKPLNSLDPLFSGFETSCKSNFDFAEGPGNVWLRATCLSRGQVETFTVLNLNHCVANARGFMVKQPEGNFAQTCQCKDLIAPSELYCNCDYGGKPNNNVDAITLSDFVGNDDGQLRCFDARGCTPTNDDYRDYPQ

SEQ ID NO: 34766 - DNA, 2886 bp, Muscodor strobelii
  misc_feature: SGI cDNA ID NO. 572024
  misc_feature: Reduced expression when VOC is produced
  misc_feature: Encodes the peptide sequence at SEQ ID NO 34767
atgtcgaaaacatggaccaacaccatcaagctgccaaaatccaccttccctccacgaccccttcccgcagctcgtgaccagtacatacagcgatgcgccgaccaattctacaaatggcagtccgagaaccgaccagctcaagaccccttcatactccatgatggccctccttacgccaatggcaacctccacgttggccatgcgctcaacaaaatcttgaaggacattatcatacggaggaaggtgcaggaaggcagacgagtggaatacattccaggatgggactgccacggcctccctatcgagctcaaggctctcgagaaagccgacggagcaaagctcacccctcttcagattcgcaagtccgcccgtaacttggccgccaaaaccgtcgccaagcaggagaggagctttcgttcctacggtgtcatgagcgactgggacaagaaatggactacaatggaagctgcctacgagatgaggcaactgcgtctatttcagaaaatggtgaaacagggcctcatctaccgcaagttcaagcccgtctactggtctccatcctcgcagactgctctcgccgaggcagaactcgagtacaaggacgaccatgtctccaactcggcttggattaggtttcccatcaccaattggagagactctccagaacttcaggaattgcattctaagatccaaggtaatctctatgccgccatctggacaaccacgccctggacactgcctgccaatcaggctattgctatacacaatgacttgaaatactgtatcgtgtcttatggtgaagatgctatcatagttgcagaagagcgtgttggcgaggtcatggcgaaactgccagagcttcagaaaggcgatgtcctcggtgtctacgaaggaaaggacatcgtgggtcttcgatatgtcaacagactgaaaagcaagtccagcccaaaccagcctatcattcacgcagactttgtatctgccgaatcaggaacaggtctcgtgcatatggcacctggacatgggttcgacgactatgaagtttgtaactctcacaacatctcagtagccgcgcctatagatgatttagggagattcaccaaggatgcgtttcctgatgcgccggaattgttagagtcagcaccttctatcatcgaaggtggtggccaaaatgtcctagacatcctccaggaacgctacggtgatgttttactcattgagaaatatcagcacaagtatccgtatgactggagaacgaagaagcccgtagtcatccgagctactgaacaatggtttgcagatgtgggttcgatcaagcaagacgctcttggcgctttagataacgttgagttctttcccccgtcaggaaagaagcggctggaaagctttgtccaaggccggagcgaatggtgtatatcacgacaacgtgcctggggcgtacctattccggctttgtacaacgaagctggggaggtcattgtggacgagcaagtcgtcgaacacatcatttctgtcatgctagaaagaggcacgtcagcctggtggtctgacgcacccgatgatcccgcatggatcccagagtccttgaaggggaaaacacttagacgaggcacagacaccatggatgtatggttcgacagtggaagcagttggaccatgatgaacggtcaagcagatgtctacctagaaggatccgaccaacaccgcggttggttccagtccagtttgctcacccgcatcgccgcgcaagccaatacaagcaccacatcagaaacaaaagccgctcctttcaaacaactcattacccacggcttcaccctagaccaagacggcaagaaaatgtccaagtcgatcggaaacatcatctcgcccgagcaagtcatagacgcatacgacgccctaggacccgatgctttgcgcctctgggccgcgagcagcgactatgtccgcgatgtctccatcggtgtcaacaaactacagaccgtgcacacagaactcatcaagtaccgcgtaatcctcaagatgctccttggctccatgcataaacccgctcgctccgcacccctcacgacaatagatcacatagctttgatccatctcaaagatactatggcagaagtgggcaaggcatatgaggagcacaaattctacaagggagttagtatcctgaatacatgggtgcacacacatctctcagcattctacctcgaggcacgaaaagatcggctgtattgtggggatggaggggggttaatcgaaccgattttctttgcgttcctaagaatgttggcccctattacgcccctattggtggaggaggcttgggatcatcgaccgcagtggatgaaggaaccagcagaggagaaagatttgattcatccgctaaagcagttgtatgatgtcgagattgtgcctgagaggatcacgcaggatcttgatgccctgagaggggaaatggaggtcttgctaaagatccatacgagcgtgaagagcgtcctggagcaagctaggtcgaaggggcatcttgggtcgtctcttgagtgtggtgttaggatcatcgtcaacagcaaccaaacccctgaattacagactaataaagttctgaaggcgctagataaacatagggaggaacttgcggatatgtttgttgtcagcgatgttgaggtttggcgcaaggacgccggggacgtgtttggaggggaggggaacgaggcgagagaggagtttgattgtgttgcgaatgtggaggttgatggggttatgctggatattagggtgttgaggccgagatatgagaaatgtcctcggtgctggagatttgttgctgaggagaaggataggctttgtggacggtgtgaggatgttgtgaagaagttgggtgagtga

SEQ ID NO: 34767 - protein, 961 aa, Muscodor strobelii
  misc_feature: SGI Peptide ID NO. 572024
  misc_feature (931)..(955): Pfam Id: PF06827 Pfam Desc: Zinc finger found in FPG and IleRS
  misc_feature (693)..(853): Pfam Id: PF08264 Pfam Desc: Anticodon-binding domain
  misc_feature (27)..(655): Pfam Id: PF00133 Pfam Desc: tRNA synthetases class I (I, L, M and V)
  misc_feature (57)..(672): Pfam Id: PF09334 Pfam Desc: tRNA synthetases class I (M)
  misc_feature (693)..(793): Pfam Id: PF08264 Pfam Desc: Anticodon-binding domain
  misc_feature (36)..(370): Pfam Id: PF00133 Pfam Desc: tRNA synthetases class I (I, L, M and V)
  misc_feature (404)..(655): Pfam Id: PF00133 Pfam Desc: tRNA synthetases class I (I, L, M and V)
  misc_feature (610)..(640): Pfam Id: PF09334 Pfam Desc: tRNA synthetases class I (M)
  misc_feature (57)..(107): Pfam Id: PF09334 Pfam Desc: tRNA synthetases class I (M)
  misc_feature (1)..(944): NCBI GI: 116182640 Blast Desc: CHGG_01948 [Chaetomium globosum CBS 148.51] gi|88186245|gb|EAQ93713.1| CHGG_01948 [Chaetomium globosum CBS 148.51]
  misc_feature (1)..(956): NCBI GI: 164428683 Blast Desc: NCU00920 [Neurospora crassa OR74A] gi|157072240|gb|EAA35510.2| NCU00920 [Neurospora crassa OR74A]
  misc_feature (1)..(960): NCBI GI: 46107614 Blast Desc: FG00690.1 [Gibberella zeae PH-1]
  misc_feature (1)..(956): NCBI GI: 38567295 Blast Desc: related to isoleucine--tRNA ligase [Neurospora crassa]
  misc_feature (1)..(957): NCBI GI: 171694870 Blast Desc: protein product [Podospora anserina] gi|170947677|emb|CAP59839.1| protein product [Podospora anserina]
  misc_feature (3)..(956): NCBI GI: 156035535 Blast Desc: SS1G_12971 [Sclerotinia sclerotiorum 1980] gi|154698376|gb|EDN98114.1| SS1G_12971 [Sclerotinia sclerotiorum 1980]
  misc_feature (3)..(956): NCBI GI: 154312483 Blast Desc: BC1G_05844 [Botryotinia fuckeliana B05.10] gi|150849945|gb|EDN25138.1| BC1G_05844 [Botryotinia fuckeliana B05.10]
  misc_feature (1)..(960): NCBI GI: 39949929 Blast Desc: MGG_01165 [Magnaporthe grisea 70-15] gi|145021046|gb|EDK05175.1| MGG_01165 [Magnaporthe grisea 70-15]
  misc_feature (1)..(960): NCBI GI: 259485657 Blast Desc: TPA: similar to isoleucine/valine tRNA synthetase (Broad) [Aspergillus nidulans FGSC A4]
  misc_feature (1)..(959): NCBI GI: 67525809 Blast Desc: AN3362.2 [Aspergillus nidulans FGSC A4] gi|40744150|gb|EAA63330.1| AN3362.2 [Aspergillus nidulans FGSC A4]
  misc_feature (5)..(959): SWISSPROT Homolog: EC 6.1.1.5 Isoleucine--tRNA ligase
  misc_feature: Useful for introducing or modulating the production of volatile compounds
MSKTWTNTIKLPKSTFPPRPLPAARDQYIQRCADQFYKWQSENRPAQDPFILHDGPPYANGNLHVGHALNKILKDIIIRRKVQEGRRVEYIPGWDCHGLPIELKALEKADGAKLTPLQIRKSARNLAAKTVAKQERSFRSYGVMSDWDKKWTTMEAAYEMRQLRLFQKMVKQGLIYRKFKPVYWSPSSQTALAEAELEYKDDHVSNSAWIRFPITNWRDSPELQELHSKIQGNLYAAIWTTTPWTLPANQAIAIHNDLKYCIVSYGEDAIIVAEERVGEVMAKLPELQKGDVLGVYEGKDIVGLRYVNRLKSKSSPNQPIIHADFVSAESGTGLVHMAPGHGFDDYEVCNSHNISVAAPIDDLGRFTKDAFPDAPELLESAPSIIEGGGQNVLDILQERYGDVLLIEKYQHKYPYDWRTKKPVVIRATEQWFADVGSIKQDALGALDNVEFFPPSGKKRLESFVQGRSEWCISRQRAWGVPIPALYNEAGEVIVDEQVVEHIISVMLERGTSAWWSDAPDDPAWIPESLKGKTLRRGTDTMDVWFDSGSSWTMMNGQADVYLEGSDQHRGWFQSSLLTRIAAQANTSTTSETKAAPFKQLITHGFTLDQDGKKMSKSIGNIISPEQVIDAYDALGPDALRLWAASSDYVRDVSIGVNKLQTVHTELIKYRVILKMLLGSMHKPARSAPLTTIDHIALIHLKDTMAEVGKAYEEHKFYKGVSILNTWVHTHLSAFYLEARKDRLYCGDGGGLIEPIFFAFLRMLAPITPLLVEEAWDHRPQWMKEPAEEKDLIHPLKQLYDVEIVPERITQDLDALRGEMEVLLKIHTSVKSVLEQARSKGHLGSSLECGVRIIVNSNQTPELQTNKVLKALDKHREELADMFVVSDVEVWRKDAGDVFGGEGNEAREEFDCVANVEVDGVMLDIRVLRPRYEKCPRCWRFVAEEKDRLCGRCEDVVKKLGE

SEQ ID NO: 34768 - DNA, 4306 bp, Muscodor strobelii
  misc_feature: SGI EST ID NO. CUFF.82791.1
  misc_feature: Variant of the nucleotide sequence at SEQ ID NO 34766
tcacgggggcgtcatttgtctcagcgattaggcggccggagttggacttgagcttggtctgggtggtatcgtggaagtgcttgtgtttcgtgacgatggagtggcgcgtgcttgtctcggtgaggaagatggaaacttcgaattcatctgcgcagtgttacatgaggcgtcaatattgaactccatgatccacatgggtcgatgcaatgcagtggtctgctgcaaaggcgggctgcagagggccgcgaggctggccatgtacagtacttgctgtccagctaatgtgcgatagagaggtacttgtcggacgaaaacacacatacataccttggacgacgacatccttgatgcccttcttcttgccgctgcgcttgttccgactccgctcacgctcctctcgcagcttgggtaagacgtagggccgcacgctctcgatgactcggggcaggatgttcttgcgcgggttgagcagccaggtgtgcaccagggcgggattgtcgaggtagatgcggcattccagaacagaatacttgctaatgcggaggtatcgacggatgggcgccatggtagcagtggcacggatatgctaccatcacgttcctcgtcctatcccatctcgtctcatcatcaaatggaactaaagtatatgaaagcgacatggatgcaatgacgaaatgccattcggaaagtcaattgcagggtagctctatctgataacacgagaacttgttggggctaggccagatatagttagtctcatcacccagactgctccgtaattggtttagatacctctatcgagttttatcttgtccatctgagtcgcgatttccagctctgcgtttcgcgatggtgaagtgcaggtcgaattgttgggagtagaagtctagacgggaagagcgttgtagaatagagttggcagccaccaacatgtgttctagacgcagaaatgtcgaaaacatggaccaacaccatcaagctgccaaaatccaccttccctccacgaccccttcccgcagctcgtgaccagtacatacagcgatgcgccgaccaattctacaaatggcagtccgagaaccgaccagctcaagaccccttcatactccatgatggccctccttacgccaatggcaacctccacgttggccatgcgctcaacaaaatcttgaaggacattatcatacggaggaaggtgcaggaaggcagacgagtggaatacattccaggatgggactgccacggcctccctatcgagctcaaggctctcgagaaagccgacggagcaaagctcacccctcttcagattcgcaagtccgcccgtaacttggccgccaaaaccgtcgccaagcaggagaggagctttcgttcctacggtgtcatgagcgactgggacaagaaatggactacaatggaagctgcctacgagatgaggcaactgcgtctatttcagaaaatggtgaaacagggcctcatctaccgcaagttcaagcccgtctactggtctccatcctcgcagactgctctcgccgaggcagaactcgagtacaaggacgaccatgtctccaactcggcttggattaggtttcccatcaccaattggagagactctccagaacttcaggaattgcattctaagatccaaggtaatctctatgccgccatctggacaaccacgccctggacactgcctgccaatcaggctattgctatacacaatgacttgaaatactgtatcgtgtcttatggtgaagatgctatcatagttgcagaagagcgtgttggcgaggtcatggcgaaactgccagagcttcagaaaggcgatgtcctcggtgtctacgaaggaaaggacatcgtgggtcttcgatatgtcaacagactgaaaagcaagtccagcccaaaccagcctatcattcacgcagactttgtatctgccgaatcaggaacaggtctcgtgcatatggcacctggacatgggttcgacgactatgaagtttgtaactctcacaacatctcagtagccgcgcctatagatgatttagggagattcaccaaggatgcgtttcctgatgcgccggaattgttagagtcagcaccttctatcatcgaaggtggtggccaaaatgtcctagacatcctccaggaacgctacggtgatgttttactcattgagaaatatcagcacaagtatccgtatgactggagaacgaagaagcccgtagtcatccgagctactgaacaatggtttgcagatgtgggttcgatcaagcaagacgctcttggcgctttagataacgttgagttctttcccccgtcaggaaagaagcggctggaaagctttgtccaaggccggagcgaatggtgtatatcacgacaacgtgcctggggcgtacctattccggctttgtacaacgaagctggggaggtcattgtggacgagcaagtcgtcgaacacatcatttctgtcatgctagaaagaggcacgtcagcctggtggtctgacgcacccgatgatcccgcatggatcccagagtccttgaaggggaaaacacttagacgaggcacagacaccatggatgtatggttcgacagtggaagcagttggaccatgatgaacggtcaagcagatgtctacctagaaggatccgaccaacaccgcggttggttccagtccagtttgctcacccgcatcgccgcgcaagccaatacaagcaccacatcagaaacaaaagccgctcctttcaaacaactcattacccacggcttcaccctagaccaagacggcaagaaaatgtccaagtcgatcggaaacatcatctcgcccgagcaagtcatagacggtaccctcctcccacccatgaagcgcaaagaaaagcagccaacggccccccagcatacgacgccctaggacccgatgctttgcgcctctgggccgcgagcagcgactatgtccgcgatgtctccatcggtgtcaacaaactacagaccgtgcacacagaactcatcaagtaccgcgtaatcctcaagatgctccttggctccatgcataaacccgctcgctccgcacccctcacgacaatagatcacatagctttgatccatctcaaagatactatggcagaagtgggcaaggcatatgaggagcacaaattctacaagggagttagtatcctgaatacatgggtgcacacacatctctcagcattctacctcgaggcacgaaaagatcggctgtattgtggggatggaggggggttaatcgaaccgattttctttgcgttcctaagaatgttggcccctattacgcccctattggtggaggaggcttgggatcatcgaccgcagtggatgaaggaaccagcagaggagaaagatttgattcatccgctaaagcagttgtatgatgtcgagattgtgcctgagaggatcacgcaggatcttgatgccctgagaggggaaatggaggtcttgctaaagatccatacgagcgtgaagagcgtcctggagcaagctaggtcgaaggggcatcttgggtcgtctcttgagtgtggtgttaggatcatcgtcaacagcaaccaaacccctgaattacagactaataaagttctgaaggcgctagataaacatagggaggaacttgcggatatgtttgttgtcagcgatgttgaggtttggcgcaaggacgccggggacgtgtttggaggggaggggaacgaggcgagagaggagtttgattgtgttgcgaatgtggaggttgatggggttatgctggatattagggtgttgaggccgagatatgagaaatgtcctcggtgctggagatttgttgctgaggagaaggataggctttgtggacggtgtgaggatgttgtgaagaagttgggtgagtgaggggggatgggtgtatagtatgaatagggggatgggatttcggagagggctgtaatatgagatgtagataagggtgtatgatagggtgttagatatagatttgtgtacatctctgctatattcgctcttctgtgtctttttgtcctggttgtccgtttcagtgagaggttcaggagctgatggagggatactcgaattgatctttatggtgctctgtgagttgctgttttgattgtcaaacaaaatagctctcatggtgtttctcttgcgatatgttgtactgtcgtcctttggattttggaagcctgagaagcgaatgacggtcttttgtgtatgtctacgtaccattgccagctgattcgggttatcccctatatgtcaaacatgggtgttagtcgcacctctatccgaaagtcta

SEQ ID NO: 34769 - DNA, 1107 bp, Muscodor strobelii
  misc_feature: SGI cDNA ID NO. 572025
  misc_feature: Elevated expression when VOC is produced
  misc_feature: Encodes the peptide sequence at SEQ ID NO 34770
atggatgcccaacagaaggaggcaaacaggttcatcacggaggtctggggcctccaaggaactgcttacttgatcatcttcatgcgatactatgccaaaatcaccttgtttggctttcgtggcctagcttgggatgacgctttcatgtttttagcaacgctgacatataccgccgagtctgtcgccgcatatctcgtcgtggcgtactggcagggtttcgccaacaatgacatgacggatgagcagcgggccgccctcagcccgaactcgcgagaatacttcctccgtcagagcggcagcaagacgcacgtctgcggtctgttgctctacacgactcttctatggctcttgaagtcctgctggctggtctactatacccgtctgacagatggcttagaccaaccccgccgaaagattatacgggggacctgcatcattgcggtgacgtatatatcctgtctcctcgtcgccatcttcaagtgcgtcccctttcagaaacagtggcagatcagtccgtatcctggcaataactgtacacctgctgtctcgattctccaaacggtcttcgtcctcgtgatgaacgcggtcaccgacatctatctcatgtggatccctcttccggtcatctggggatctcaattgccccggagaaaaaaggccactcttctcgtcctctttagtggtgggcttctggagctggcgttcagtattgtccgtgcggtgtccatcctcaccctcggaagcacagatcccgcacagtccggattttggtccgttagagaatctttcgtctcgaccgtcctcaccaacctgcccgtcgtatacccgctgctcgcccagatcattgaaaaatgcggaggaaaaatattgaaaatcaaaccgactaacaaccccgtcagctcacggggatacagtcttagtcgtctgagggacacgggtagaagcagcgtaaccagaaaacaacagtttagcatgctcacgacacagtcggctcattctgaggaacatatcgtaccgcacaagaaaagccatgacattagtgatgaggagaccgccaacttccccaagcgcccacagaccattgctagacacacagtttgcacatag

SEQ ID NO: 34770 - protein, 368 aa, Muscodor strobelii
  misc_feature: SGI Peptide ID NO. 572025
  misc_feature (5)..(284): NCBI GI: 85106482 Blast Desc: NCU05189 [Neurospora crassa OR74A] gi|28923787|gb|EAA32952.1| [Neurospora crassa OR74A] gi|40882277|emb|CAF06101.1| related to integral membrane protein
  misc_feature (4)..(338): NCBI GI: 256724513 Blast Desc: NECHADRAFT_11038 [Nectria haematococca mpVI 77-13-4]
  misc_feature (11)..(339): NCBI GI: 46114716 Blast Desc: FG03200.1 [Gibberella zeae PH-1]
  misc_feature (8)..(341): NCBI GI: 115386838 Blast Desc: conserved [Aspergillus terreus NIH2624] gi|114190958|gb|EAU32658.1| conserved [Aspergillus terreus NIH2624]
  misc_feature (8)..(349): NCBI GI: 121704170 Blast Desc: conserved [Aspergillus clavatus NRRL 1] gi|119398493|gb|EAW08923.1| conserved [Aspergillus clavatus NRRL 1]
  misc_feature (8)..(368): NCBI GI: 169764983 Blast Desc: [Aspergillus oryzae RIB40] gi|83764817|dbj|BAE54961.1| protein product [Aspergillus oryzae]
  misc_feature (11)..(278): NCBI GI: 256726137 Blast Desc: NECHADRAFT_25451 [Nectria haematococca mpVI 77-13-4]
  misc_feature (8)..(350): NCBI GI: 145247458 Blast Desc: An12g09260 [Aspergillus niger] gi|134080716|emb|CAK41356.1| protein product [Aspergillus niger]
  misc_feature (10)..(362): NCBI GI: 67903348 Blast Desc: AN8661.2 [Aspergillus nidulans FGSC A4] gi|40741505|gb|EAA60695.1| AN8661.2 [Aspergillus nidulans FGSC A4] gi|259483120|tpe|CBF78232.1| TPA: conserved [Aspergillus FGSC
  misc_feature (54)..(310): NCBI GI: 40882279 Blast Desc: [Neurospora crassa]
  misc_feature: Useful for introducing or modulating the production of volatile compounds
MDAQQKEANRFITEVWGLQGTAYLIIFMRYYAKITLFGFRGLAWDDAFMFLATLTYTAESVAAYLVVAYWQGFANNDMTDEQRAALSPNSREYFLRQSGSKTHVCGLLLYTTLLWLLKSCWLVYYTRLTDGLDQPRRKIIRGTCIIAVTYISCLLVAIFKCVPFQKQWQISPYPGNNCTPAVSILQTVFVLVMNAVTDIYLMWIPLPVIWGSQLPRRKKATLLVLFSGGLLELAFSIVRAVSILTLGSTDPAQSGFWSVRESFVSTVLTNLPVVYPLLAQIIEKCGGKILKIKPTNNPVSSRGYSLSRLRDTGRSSVTRKQQFSMLTTQSAHSEEHIVPHKKSHDISDEETANFPKRPQTIARHTVCT

SEQ ID NO: 34771 - DNA, 1593 bp, Muscodor strobelii
  misc_feature: SGI EST ID NO. CUFF.82652.0
  misc_feature: Variant of the nucleotide sequence at SEQ ID NO 34769
ccgctcgcgtagagaagacgactggacacaatggatgcccaacagaaggaggcaaacaggttcatcacggaggtctggggcctccaaggaactgcttacttgatcatcttcatgcgatactatgccaaaatcaccttgtttggctttcgtggcctagcttgggatgacgctttcatgtttttagcaacgctgacatataccgccgagtctgtcgccgcatatctcgtcgtggcgtactggcagggtttcgccaacaatgacatgacggatgagcagcgggccgccctcagcccgaactcgcgagaatacttcctccgtcagagcggcagcaagacgcacgtctgcggtctgttgctctacacgactcttctatggctcttgaagtcctgctggctggtctactatacccgtctgacagatggcttagaccaaccccgccgaaagattatacgggggacctgcatcattgcggtgacgtatatatcctgtctcctcgtcgccatcttcaagtgcgtcccctttcagaaacagtggcagatcagtccgtatcctggcaataactgtacacctgctgtctcgattctccaaacggtcttcgtcctcgtgatgaacgcggtcaccgacatctatctcatgtggatccctcttccggtcatctggggatctcaattgccccggagaaaaaaggccactcttctcgtcctctttagtggtgggcttctggagctggcgttcagtattgtccgtgcggtgtccatcctcaccctcggaagcacagatcccgcacagtccggattttggtccgttagagaatctttcgtctcgaccgtcctcaccaacctgcccgtcgtatacccgctgctcgcccagatcattgaaaaatgcggaggaaaaatattgaaaatcaaaccgactaacaaccccgtcagctcacggggatacagtcttagtcgtctgagggacacgggtagaagcagcgtaaccagaaaacaacagtttagcatgctcacgacacagtcggctcattctgaggaacatatcgtaccgcacaagaaaagccatgacattagtgatgaggagaccgccaacttccccaagcgcccacagaccattgctagacacacagtttgcacatagggcctagtttctactgggccacgggatcgtgaaggaattacgcattggtaatcagatcgtcgtcgtgcgtccgtacaacttcacaaacacaagtggagatgccgaatctgcttgctcattatgagcagaaagccggcttttgttgtctggtgggcaggcttgaatcattgtcctaacacgacgtgtattttccttgaattttcattgtcttctgaaatattctatttttatattctatataactaaatactgagtaactgttggaggtcaggtggtgctagttcaggccttccgcatgtttggcagcaatagcagagcctagcttgtagaaaacaacagccatcaaggtctgcttcacactgctaatggtaactatctaattttcttgccttgaagtataaaataatcattttgacagaaaatgtaacaacttcgacgccgtcgtcacaaggcggg

SEQ ID NO: 34772 - DNA, 858 bp, Muscodor strobelii
  misc_feature: SGI cDNA ID NO. 572026
  misc_feature: Encodes the peptide sequence at SEQ ID NO 34773
gttgtcttcgaagaccactatgactattggtgcaaagagctcggcattgatcgttcgtcttggaactggggccattggggagaaaacctgacagtccgatttaaagatgaggtgagacttgaagatcagattcatataggtgatatctggagaatagggaaggcggtacgattacaggtctgcggtgtgcgcgttccgtgcatgaagttatcttggcgatgtggtcagaaagattcatggcttccaaccctagtcaacagtggacgatcgggagtgtacttgcgagtgttatcaggaggaaaggttcatcctggagacgacgtatcatacgaattatcgactggcgatccactgaacgtcgcggccatcgttaaaatcgcctttgacatgtcgctgaaaactcgagatacaatgaacctgattatggatcatcctctgatgatgagaatgaacaagtggcactttggtcgcatgctgacctctatggaagacaaagagcaggaaggaaagaatgcgtggaaaggctttcgagacttatgtgttcgccgcgttgtggacgaaggtggcggcatcaagtctttctacttatctgctgtcgacgggctaccgctcgccaactatttcccggggcagttcctcaccattcgtcttcctaacgatgtaactcgaagttggactatttccgactaccagacgcgagacggccctgaatactaccgtgttagcgttaagaaagtcggtatcgcatcaacgtggatgcatgaaaaatgcgcgccgggctcagtcctgtcagctcgctcgccggcgggacgtttgttcatcgaccgatcgtcgatacttcgagttgtttgtaagtga

SEQ ID NO: 34773 - protein, 285 aa, Muscodor strobelii
  misc_feature: SGI Peptide ID NO. 572026
  misc_feature (178)..(274): Pfam Id: PF00970 Pfam Desc: Oxidoreductase FAD-binding domain
  misc_feature (41)..(110): Pfam Id: PF03473 Pfam Desc: MOSC domain
  misc_feature (1)..(164): NCBI GI: 46111475 Blast Desc: FG02619.1 [Gibberella zeae PH-1]
  misc_feature (5)..(282): NCBI GI: 148554354 Blast Desc: nitric oxide dioxygenase [Sphingomonas wittichii RW1] gi|148499544|gb|ABQ67798.1| Nitric oxide dioxygenase [Sphingomonas wittichii RW1]
  misc_feature (7)..(274): NCBI GI: 159460262 Blast Desc: MOSC ferredoxin--oxidoreductase [Streptomyces spiroverticillatus]
  misc_feature (7)..(274): NCBI GI: 111017496 Blast Desc: phthalate 4,5-dioxygenase [Rhodococcus jostii RHA1] gi|110817026|gb|ABG92310.1| phthalate 4,5-dioxygenase [Rhodococcus jostii RHA1]
  misc_feature (5)..(274): NCBI GI: 260459375 Blast Desc: MOSC domain containing protein [Mesorhizobium opportunistum WSM2075] gi|259034929|gb|EEW36185.1| MOSC domain containing protein [Mesorhizobium opportunistum WSM2075]
  misc_feature (5)..(270): NCBI GI: 254818418 Blast Desc: phthalate 4,5-dioxygenase [Mycobacterium intracellulare ATCC 13950]
  misc_feature (7)..(278): NCBI GI: 280964598 Blast Desc: MOSC domain containing protein [Frankia sp. EuI1c] gi|270731306|gb|EFA59542.1| MOSC domain containing protein [Frankia sp. EuI1c]
  misc_feature (5)..(274): NCBI GI: 241666573 Blast Desc: MOSC domain containing protein [Rhizobium leguminosarum bv. trifolii WSM1325] gi|240862030|gb|ACS59695.1| MOSC domain containing protein [Rhizobium leguminosarum bv.
  misc_feature (2)..(274): NCBI GI: 27378877 Blast Desc: flavohemoprotein [Bradyrhizobium japonicum USDA 110] gi|27352026|dbj|BAC49031.1| bll3766 [Bradyrhizobium japonicum USDA 110]
  misc_feature (5)..(274): NCBI GI: 116255672 Blast Desc: flavoprotein/ferredoxin [Rhizobium leguminosarum bv. viciae 3841] gi|115260320|emb|CAK03424.1| flavoprotein/ferredoxin [Rhizobium leguminosarum bv. viciae 3841]
VVFEDHYDYWCKELGIDRSSWNWGHWGENLTVRFKDEVRLEDQIHIGDIWRIGKAVRLQVCGVRVPCMKLSWRCGQKDSWLPTLVNSGRSGVYLRVLSGGKVHPGDDVSYELSTGDPLNVAAIVKIAFDMSLKTRDTMNLIMDHPLMMRMNKWHFGRMLTSMEDKEQEGKNAWKGFRDLCVRRVVDEGGGIKSFYLSAVDGLPLANYFPGQFLTIRLPNDVTRSWTISDYQTRDGPEYYRVSVKKVGIASTWMHEKCAPGSVLSARSPAGRLFIDRSSILRVVCK

SEQ ID NO: 34774 - DNA, 896 bp, Muscodor strobelii
  misc_feature: SGI EST ID NO. CUFF.82654.0
  misc_feature: Variant of the nucleotide sequence at SEQ ID NO 34772
gaaacatcgtgaaaaataactaacgcgacacctttctggctaccaggttgtcttcgaagaccactatgactattggtgcaaagagctcggcattgatcgttcgtcttggaactggggccattggggagaaaacctgacagtccgatttaaagatgaggtgagacttgaagatcagattcatataggtgatatctggagaatagggaaggcggtacgattacaggtctgcggtgtgcgcgttccgtgcatgaagttatcttggcgatgtggtcagaaagattcatggcttccaaccctagtcaacagtggacgatcgggagtgtacttgcgagtgttatcaggaggaaaggttcatcctggagacgacgtatcatacgaattatcgactggcgatccactgaacgtcgcggccatcgttaaaatcgcctttgacatgtcgctgaaaactcgagatacaatgaacctgattatggatcatcctctgatgatgagaatgaacaagtggcactttggtcgcatgctgacctctatggaagacaaagagcaggaaggaaagaatgcgtggaaaggctttcgagacttatgtgttcgccgcgttgtggacgaaggtggcggcatcaagtctttctacttatctgctgtcgacgggctaccgctcgccaactatttcccggggcagttcctcaccattcgtcttcctaacgatgtaactcgaagttggactatttccgactaccagacgcgagacggccctgaatactaccgtgttagcgttaagaaagtcggtatcgcatcaacgtggatgcatgaaaaatgcgcgccgggctcagtcctgtcagctcgctcgccggcgggacgtttgttcatcgaccgatcgtcgatacttcgagttgttt

SEQ ID NO: 34775 - DNA, 672 bp, Muscodor strobelii
  misc_feature: SGI cDNA ID NO. 572027
  misc_feature: Encodes the peptide sequence at SEQ ID NO 34776
atgatgaaggggctcgctgaccacccgaatatgaattgccagcccgtcgtatggatacacgttgcgcgggatggcgagagtttcccgttccaagacgagatcccgtccttcgagaagagtccagcgtttagtagatttatctttttcaccaacccacggccccatgacgttaagggattgcattacgatcgcgagggccgtccggataaagcagcgcttgaagagattcttggcgcaccattcacgtggtcccctttaggtgcgggcagtatggagtctgaagccaatttttccacagtatatatgtgtggccctacccaattcgaaaccgatatcagaggcacgcttaaaaagtttggatttctcgaacccctcatccggagcgagtcattctccgcctcgggggcggcactaggcgaagtcaagcgggcgacagtacgcttctctaagtcaaaagtgaccggaacatggacgaaagagaagcccatgtccattctagaattggccgagtctctgggtctgacccctgacttcggctgtcgctcgggagcttgtgggagctgtgcgacaaaattgacgtgcgggtctgtatctagtgggatgcaagctgatggaacagttttaacgtgttctgcggctcccgcatcagaagaggttgagctagagctatga

SEQ ID NO: 34776 - protein, 223 aa, Muscodor strobelii
  misc_feature: SGI Peptide ID NO. 572027
  misc_feature (151)..(216): Pfam Id: PF00111 Pfam Desc: 2Fe-2S iron-sulfur cluster binding domain
  misc_feature (1)..(223): NCBI GI: 46111475 Blast Desc: FG02619.1 [Gibberella zeae PH-1]
  misc_feature (12)..(223): NCBI GI: 148554354 Blast Desc: nitric oxide dioxygenase [Sphingomonas wittichii RW1] gi|148499544|gb|ABQ67798.1| Nitric oxide dioxygenase [Sphingomonas wittichii RW1]
  misc_feature (17)..(223): NCBI GI: 163793415 Blast Desc: pyridoxamine 5'-phosphate oxidase-related, FMN-binding protein [alpha proteobacterium BAL199] gi|159181217|gb|EDP65732.1| pyridoxamine 5'-phosphate FMN-binding
  misc_feature (12)..(216): NCBI GI: 149909842 Blast Desc: oxidoreductase, FAD-binding [Moritella sp. PE36] gi|149807174|gb|EDM67130.1| oxidoreductase, FAD-binding [Moritella sp. PE36]
  misc_feature (14)..(221): NCBI GI: 90023074 Blast Desc: oxidoreductase, FAD-binding [Saccharophagus degradans 2-40] gi|89952674|gb|ABD82689.1| pyridoxamine 5'-phosphate oxidase-related, FMN-binding [Saccharophagus degradans 2-40]
  misc_feature (12)..(223): NCBI GI: 254467518 Blast Desc: oxidoreductase, FAD-binding [Rhodobacterales bacterium Y4I] gi|206684519|gb|EDZ45002.1| oxidoreductase, FAD-binding [Rhodobacterales bacterium Y4I]
  misc_feature (16)..(219): NCBI GI: 254818418 Blast Desc: phthalate 4,5-dioxygenase [Mycobacterium intracellulare ATCC 13950]
  misc_feature (14)..(223): NCBI GI: 170751074 Blast Desc: pyridoxamine 5'-phosphate oxidase-related FMN-binding [Methylobacterium radiotolerans JCM 2831] gi|170657596|gb|ACB26651.1| pyridoxamine 5'-phosphate FMN-binding
  misc_feature (16)..(223): NCBI GI: 94969687 Blast Desc: MOSC ferredoxin--oxidoreductase [Candidatus Koribacter versatilis Ellin345] gi|94551737|gb|ABF41661.1| MOSC ferredoxin--Oxidoreductase [Candidatus Koribacter versatilis
  misc_feature (10)..(223): NCBI GI: 220909801 Blast Desc: oxidoreductase FAD/NAD(P)-binding domain protein [Cyanothece sp. PCC 7425] gi|219866412|gb|ACL46751.1| oxidoreductase FAD/NAD(P)-binding domain protein [Cyanothece sp.
MMKGLADHPNMNCQPVVWIHVARDGESFPFQDEIPSFEKSPAFSRFIFFTNPRPHDVKGLHYDREGRPDKAALEEILGAPFTWSPLGAGSMESEANFSTVYMCGPTQFETDIRGTLKKFGFLEPLIRSESFSASGAALGEVKRATVRFSKSKVTGTWTKEKPMSILELAESLGLTPDFGCRSGACGSCATKLTCGSVSSGMQADGTVLTCSAAPASEEVELEL

SEQ ID NO: 34777 - DNA, 1129 bp, Muscodor strobelii
  misc_feature: SGI EST ID NO. CUFF.82657.0
  misc_feature: Variant of the nucleotide sequence at SEQ ID NO 34775
caccaattctcgccatgatgaaggggctcgctgaccacccgaatatgaattgccagcccgtcgtatggatacacgttgcgcgggatggcgagagtttcccgttccaagacgagatcccgtccttcgagaagagtccagcgtttagtagatttatctttttcaccaacccacggccccatgacgttaagggattgcattacgatcgcgagggccgtccggataaagcagcgcttgaagagattcttggcgcaccattcacgtggtcccctttaggtgcgggcagtatggagtctgaagccaatttttccacagtatatatgtgtggccctacccaattcgaaaccgatatcagaggcacgcttaaaaagtttggatttctcgaacccctcatccggagcgagtcattctccgcctcgggggcggcactaggcgaagtcaagcgggcgacagtacgcttctctaagtcaaaagtgaccggaacatggacgaaagagaagcccatgtccattctagaattggccgagtctctgggtctgacccctgacttcggctgtcgctcgggagcttgtgggagctgtgcgacaaaattgacgtgcgggtctgtatctagtgggatgcaagctgatggaacagttttaacgtgttctgcggctcccgcatcagaagaggttgagctagagctatgatatgccaatgagtatgcgcaagatgatatttatgtatctgcaagtcatcagcaaatatccactatacctcaatatgtggtctaaatcgaacgttgggcaagattaggatattgcatttctcatcataggatatgagcgtcgttgaaggggactgtaattgtggatacagagacatcggtcgtcctagggtgaaaaacgttcaagtcatgtataatatgactacaaacatgaattcatccaacaagcatataaatgtcaggcaagggtggaaacttgtatcctgtaatggtttgaaccaatacaagttatttagtatggcaggatatagcccgctattataactcccatatcatcctctgggtcacaagcccaactaggcttaaatgttttaacttcggactataaatcgacatcatcttcttgtagtacgtcttataattgag

SEQ ID NO: 34778 - DNA, 1050 bp, Muscodor strobelii
  misc_feature: SGI cDNA ID NO. 572028
  misc_feature: Reduced expression when VOC is produced
  misc_feature: Encodes the peptide sequence at SEQ ID NO 34779
atgagcctcagatctacggtcgttgccttaggcactctctcggctacagccttggcgcacggctacatccctgggtttgtgactgacggtgcatggaaccaagggtttcttttggattactactacgagatccagaatggtatcaccccgccaagcattgcagcgtggtacgcagaggatctagattctgggttcgtggctcccgatgcgtatggcacggctgacatcaactgccacaaaaactcaaagccgggcgccctgaccaaaagcgtcaaggcaggaggcactgtcgaatttgaatggactctttggcctcacaacataggcccggtacttgcagcatgcaatggcgactgcgcggctgtcgacaagaccaagcttctttgggttaagatcgatgagtctggaattgattatagtgaaggatctttgctaatacgctttataacgcaaacctgggcttcacaagtgctcattgatcagaatagcacttggactacaaaggtgccatcgactctgaaggcaggcaattatgttttcagacacgagatcattgccctacacggagggtcaagtctagatggagctcagaattacccattctgttttaacatcgccatcacaggctctggaactgatcaacctgtcggaacacttggaacagacctgtacaaggaagacgaccccggcatctatttcaatccatcgttaactccaattagatactacgatcacgaattatattatacctggaccaactctgtacaccggaagctcaggaggttcaggtggcacaacgacaacgaagacgacgacaacgactgtgaaaacgacaactacgtcaaaagcctcctcaactacgtcgactacgcttaccaccaagacttcaacaaccagaactacagcctcaccaacggcaaccggatcgacaggtcagaccctttatggtcaatgcggtggtatcggctggactgggccgactacgtaagtgatttaacctgcgaaatatcggaaactagtcctctgccccaacccgtaggggattcgtga

SEQ ID NO: 34779 - protein, 349 aa, Muscodor strobelii
  misc_feature: SGI Peptide ID NO. 572028
  misc_feature (1)..(244): Pfam Id: PF03443 Pfam Desc: Glycosyl hydrolase family 61
  misc_feature (1)..(234): Pfam Id: PF03443 Pfam Desc: Glycosyl hydrolase family 61
  misc_feature (10)..(238): NCBI GI: 116204319 Blast Desc: CHGG_10043 [Chaetomium globosum CBS 148.51] gi|88176171|gb|EAQ83639.1| CHGG_10043 [Chaetomium globosum CBS 148.51]
  misc_feature (10)..(235): NCBI GI: 256722571 Blast Desc: NECHADRAFT_19032 [Nectria haematococca mpVI 77-13-4]
  misc_feature (1)..(242): NCBI GI: 187766736 Blast Desc: endoglucanase VII [Trichoderma viride]
  misc_feature (6)..(238): NCBI GI: 156061791 Blast Desc: SS1G_03041 [Sclerotinia sclerotiorum 1980] gi|154700442|gb|EDO00181.1| SS1G_03041 [Sclerotinia sclerotiorum 1980]
  misc_feature (1)..(242): NCBI GI: 74619304 Blast Desc: GUN7_TRIRE RecName: Full=Endoglucanase-7; AltName: Full=Endoglucanase VII; AltName: Full=Endo-1,4-beta-glucanase VII; Short=EGVII; AltName: Full=Endoglucanase-61B; AltName: Chain
  misc_feature (1)..(242): NCBI GI: 46119467 Blast Desc: FG04773.1 [Gibberella zeae PH-1]
  misc_feature (2)..(216): NCBI GI: 261360535 Blast Desc: endoglucanase-4 [Verticillium albo-atrum VaMs.102]
  misc_feature (8)..(234): NCBI GI: 169768592 Blast Desc: [Aspergillus oryzae RIB40] gi|83766624|dbj|BAE56764.1| protein product [Aspergillus oryzae]
  misc_feature (1)..(234): NCBI GI: 121701491 Blast Desc: endoglucanase, [Aspergillus clavatus NRRL 1] gi|119397153|gb|EAW07584.1| endoglucanase, [Aspergillus clavatus NRRL 1]
  misc_feature (1)..(234): NCBI GI: 119495445 Blast Desc: endoglucanase, [Neosartorya fischeri NRRL 181] gi|119412669|gb|EAW22610.1| endoglucanase, [Neosartorya fischeri NRRL 181]
  misc_feature (1)..(242): SWISSPROT Homolog: EC 3.2.1.4 Cellulase
  misc_feature: Useful for introducing or modulating the production of volatile compounds
MSLRSTVVALGTLSATALAHGYIPGFVTDGAWNQGFLLDYYYEIQNGITPPSIAAWYAEDLDSGFVAPDAYGTADINCHKNSKPGALTKSVKAGGTVEFEWTLWPHNIGPVLAACNGDCAAVDKTKLLWVKIDESGIDYSEGSLLIRFITQTWASQVLIDQNSTWTTKVPSTLKAGNYVFRHEIIALHGGSSLDGAQNYPFCFNIAITGSGTDQPVGTLGTDLYKEDDPGIYFNPSLTPIRYYDHELYYTWTNSVHRKLRRFRWHNDNEDDDNDCENDNYVKSLLNYVDYAYHQDFNNQNYSLTNGNRIDRSDPLWSMRWYRLDWADYVSDLTCEISETSPLPQPVGDS

SEQ ID NO: 34780 - DNA, 1938 bp, Muscodor strobelii
  misc_feature: SGI EST ID NO. CUFF.82663.1
  misc_feature: Variant of the nucleotide sequence at SEQ ID NO 34778
aagaaaggactaacatgttttgatgcaccagacgcaaacctgggcttcacaagtgctcattgatcagaatagcacttggactacaaaggtgccatcgactctgaaggcaggcaattatgttttcagacacgagatcattgccctacacggagggtcaagtctagatggagctcagaattacccattctgttttaacatcgccatcacaggctctggaactgatcaacctgtcggaacacttggaacagacctgtacaaggaagacgaccccggcatctatttcaatccatatactacgatcacgaattatattatacctggaccaactctgtacaccggaagctcaggaggttcaggtggcacaacgacaacgaagacgacgacaacgactgtgaaaacgacaactacgtcaaaagcctcctcaactacgtcgactacgcttaccaccaagacttcaacaaccagaactacagcctcaccaacggcaaccggatcgacaggtcagaccctttatggtcaatgcggtggtatcggctggactgggccgactacgtaagtgatttaacctgcgaaatatcggaaactagtcctctgccccaacccgtaggggattcgtgaaaattgactaacccaacacctctgcggctaccagatgcgcctcagggacctgtacctactcgaacgagtactattcacaatgcctttagccggctgacgggagttgtatcaggacatacttacactccaaaatcagatgctgagttgagtgcgtgtgtgtgctaggaaatgtctgtttttccaatggtaaacaacgcatgtttggacattcagatattcggcagatcgtatttagagctgcaagttggcgtattgtatcgctggtctgatcgtcgtgatgaatgtccacagattccgtctaatccacatactcacatactgcctggctccttcgtcttggtgtagggactttggtcgaaaaaccccgcgcgtgaaagtcgttgttgcaaattctatctcgaaaaaaaggagaacggacactgctgtgtgaaggcttggtacctattttgtagtcattggtggtatcgtatctccactgcaccttgtcaatttgtgactggggacgttacgagtacgagaccgactctctgtctaaagatagcatcgacatcaagggagagatccataatgaaaaccccacaaggtatggtaggacacaaaagcgtgcaacaacgtccgcgacctgggggatagacctttgcaatacattgtagcttcatcaacatcgtttgagccctttggcatagcagttatattgcaaattaaagtatcttgtaatgggatcatcggacattccgccagcagacgcgccggaatggctcgtcttagcgtcaactgcttgccttggcgtcggcatcctcttttgggacatgacatacatattgatggtccggcgagctctgcaaacaaagtcatactcggtccccatcctcggtctggcgatcaacgtgtcatgggaaattgtctacggattatatgttgccgaggagatttttgaaagagttgggtttaccgtttggctgttgctggaccttggtgttatctatacaacaattcgctttgctcctcaagattgggctaccactagcggattcgttgggcgcaatatgtcctggatacttggggttatgatcctcattggatgctggggtcatggtgcattcatcaactggtttttatcggagcctgatctcaacactaagactggaaaatggtggcgcggtagagaaggttatgatacaaccgagctagcattctggtccgctggcgttgcacaattggtaggcagtaccacgatgctagccatgctcatcgttcgaggtcactctggtggcacaagctattgtatctggtaagtcattactggtcgtatcatccctt

SEQ ID NO: 34781 - DNA, 822 bp, Muscodor strobelii
  misc_feature: SGI cDNA ID NO. 572029
  misc_feature: Encodes the peptide sequence at SEQ ID NO 34782
atgggatcatcggacattccgccagcagacgcgccggaatggctcgtcttagcgtcaactgcttgccttggcgtcggcatcctcttttgggacatgacatacatattgatggtccggcgagctctgcaaacaaagtcatactcggtccccatcctcggtctggcgatcaacgtgtcatgggaaattgtctacggattatatgttgccgaggagatttttgaaagagttgggtttaccgtttggctgttgctggaccttggtgttatctatacaacaattcgctttgctcctcaagattgggctaccactagcggattcgttgggcgcaatatgtcctggatacttggggttatgatcctcattggatgctggggtcatggtgcattcatcaactggtttttatcggagcctgatctcaacactaagactggaaaatggtggcgcggtagagaaggttatgatacaaccgagctagcattctggtccgctggcgttgcacaattggtaggcagtaccacgatgctagccatgctcatcgttcgaggtcactctggtggcacaagctattgtatctggatatttagattcattggttctatctttgggatggggttcgccaacggacttctgtggtggtattggcctgaaccacacacgttctgggttagtgaacttagcatcttcatttgcggtctctcattcgttagcgatgctgcatacggcttcgctctttggcaagtgcggaaaacagagattgttctccacgacggccgagttgttcggggtgacaccgggattggggagaaaagcaaaacaccatga

SEQ ID NO: 34782 - protein, 273 aa, Muscodor strobelii
  misc_feature: SGI Peptide ID NO. 572029
  misc_feature (1)..(265): NCBI GI: 85091113 Blast Desc: NCU09400 [Neurospora crassa OR74A] gi|28920126|gb|EAA29507.1| conserved [Neurospora crassa OR74A]
  misc_feature (1)..(269): NCBI GI: 39948289 Blast Desc: MGG_08671 [Magnaporthe grisea 70-15] gi|145023031|gb|EDK06662.1| MGG_08671 [Magnaporthe grisea 70-15]
  misc_feature (1)..(271): NCBI GI: 46117238 Blast Desc: FG04461.1 [Gibberella zeae PH-1]
  misc_feature (1)..(264): NCBI GI: 256729511 Blast Desc: [Nectria haematococca mpVI 77-13-4]
  misc_feature (1)..(270): NCBI GI: 145609179 Blast Desc: MGG_07412 [Magnaporthe grisea 70-15] gi|145016587|gb|EDK01017.1| MGG_07412 [Magnaporthe grisea 70-15]
  misc_feature (1)..(192): NCBI GI: 261354327 Blast Desc: integral membrane protein [Verticillium albo-atrum VaMs.102]
  misc_feature (8)..(263): NCBI GI: 169625658 Blast Desc: SNOG_16105 [Phaeosphaeria nodorum SN15] gi|160705700|gb|EAT76477.2| SNOG_16105 [Phaeosphaeria nodorum SN15]
  misc_feature (49)..(264): NCBI GI: 145604128 Blast Desc: MGG_10746 [Magnaporthe grisea 70-15] gi|145012197|gb|EDJ96853.1| MGG_10746 [Magnaporthe grisea 70-15]
  misc_feature (3)..(162): NCBI GI: 189207463 Blast Desc: conserved [Pyrenophora tritici-repentis Pt-1C-BFP] gi|187976158|gb|EDU42784.1| conserved [Pyrenophora tritici-repentis Pt-1C-BFP]
  misc_feature (13)..(240): NCBI GI: 154319283 Blast Desc: BC1G_02593 [Botryotinia fuckeliana B05.10] gi|150857024|gb|EDN32216.1| BC1G_02593 [Botryotinia fuckeliana B05.10]
MGSSDIPPADAPEWLVLASTACLGVGILFWDMTYILMVRRALQTKSYSVPILGLAINVSWEIVYGLYVAEEIFERVGFTVWLLLDLGVIYTTIRFAPQDWATTSGFVGRNMSWILGVMILIGCWGHGAFINWFLSEPDLNTKTGKWWRGREGYDTTELAFWSAGVAQLVGSTTMLAMLIVRGHSGGTSYCIWIFRFIGSIFGMGFANGLLWWYWPEPHTFWVSELSIFICGLSFVSDAAYGFALWQVRKTEIVLHDGRVVRGDTGIGEKSKTP

SEQ ID NO: 34783 - DNA, 2358 bp, Muscodor strobelii
  misc_feature: SGI EST ID NO. CUFF.82663.0
  misc_feature: Variant of the nucleotide sequence at SEQ ID NO 34781
aagaaaggactaacatgttttgatgcaccagacgcaaacctgggcttcacaagtgctcattgatcagaatagcacttggactacaaaggtgccatcgactctgaaggcaggcaattatgttttcagacacgagatcattgccctacacggagggtcaagtctagatggagctcagaattacccattctgttttaacatcgccatcacaggctctggaactgatcaacctgtcggaacacttggaacagacctgtacaaggaagacgaccccggcatctatttcaatccatatactacgatcacgaattatattatacctggaccaactctgtacaccggaagctcaggaggttcaggtggcacaacgacaacgaagacgacgacaacgactgtgaaaacgacaactacgtcaaaagcctcctcaactacgtcgactacgcttaccaccaagacttcaacaaccagaactacagcctcaccaacggcaaccggatcgacaggtcagaccctttatggtcaatgcggtggtatcggctggactgggccgactacgtaagtgatttaacctgcgaaatatcggaaactagtcctctgccccaacccgtaggggattcgtgaaaattgactaacccaacacctctgcggctaccagatgcgcctcagggacctgtacctactcgaacgagtactattcacaatgcctttagccggctgacgggagttgtatcaggacatacttacactccaaaatcagatgctgagttgagtgcgtgtgtgtgctaggaaatgtctgtttttccaatggtaaacaacgcatgtttggacattcagatattcggcagatcgtatttagagctgcaagttggcgtattgtatcgctggtctgatcgtcgtgatgaatgtccacagattccgtctaatccacatactcacatactgcctggctccttcgtcttggtgtagggactttggtcgaaaaaccccgcgcgtgaaagtcgttgttgcaaattctatctcgaaaaaaaggagaacggacactgctgtgtgaaggcttggtacctattttgtagtcattggtggtatcgtatctccactgcaccttgtcaatttgtgactggggacgttacgagtacgagaccgactctctgtctaaagatagcatcgacatcaagggagagatccataatgaaaaccccacaaggtatggtaggacacaaaagcgtgcaacaacgtccgcgacctgggggatagacctttgcaatacattgtagcttcatcaacatcgtttgagccctttggcatagcagttatattgcaaattaaagtatcttgtaatgggatcatcggacattccgccagcagacgcgccggaatggctcgtcttagcgtcaactgcttgccttggcgtcggcatcctcttttgggacatgacatacatattgatggtccggcgagctctgcaaacaaagtcatactcggtccccatcctcggtctggcgatcaacgtgtcatgggaaattgtctacggattatatgttgccgaggagatttttgaaagagttgggtttaccgtttggctgttgctggaccttggtgttatctatacaacaattcgctttgctcctcaagattgggctaccactagcggattcgttgggcgcaatatgtcctggatacttggggttatgatcctcattggatgctggggtcatggtgcattcatcaactggtttttatcggagcctgatctcaacactaagactggaaaatggtggcgcggtagagaaggttatgatacaaccgagctagcattctggtccgctggcgttgcacaattggtaggcagtaccacgatgctagccatgctcatcgttcgaggtcactctggtggcacaagctattgtatctggatatttagattcattggttctatctttgggatggggttcgccaacggacttctgtggtggtattggcctgaaccacacacgttctgggttagtgaacttagcatcttcatttgcggtctctcattcgttagcgatgctgcatacggcttcgctctttggcaagtgcggaaaacagagattgttctccacgacggccgagttgttcggggtgacaccgggattggggagaaaagcaaaacaccatgacgttagtaatcattagacataagtgtatggagaaacccagaagaatcaaaccccttgtagtaggggatacgtacgatgtacatgttctggcaaggctgaaaattttttcattcttttcgggaaattacaaatctggccgagtttgagcgctttgaaaggatactagtcgacccgagtggaatcaatcaattttcatacccag

SEQ ID NO: 34784 - DNA, 2340 bp, Muscodor strobelii
  misc_feature: SGI cDNA ID NO. 572030
  misc_feature: Encodes the peptide sequence at SEQ ID NO 34785
atgacagagattgtcattgataatgtagcaccagaggaaattccgtcatcggccatcaccattttgcgtgacgtggtcaagctgagaaagaagagcgcacgctttttctccaaggcggcaaagtcaaacgatggacagatgaaagaaaagatggactcgcatcagcatatcatcaaggtccttgagaaagtactgcatcgttttgacgaggcactctccaaaagtcggtgcccggcgccagcgtctgaatctacagccaaatctacagctaacggccagcttggcgtggacgacctttcaaatatgtatgaattgctcaaggtcgagcaagttcaagtagaggaaggccaagaagaggacgatgacgacctggacgaagatgccgagcccgacactggaagaagcaggaaggctaaaaagtcgggaaagaagaaagccggaagtaagggtaagggcaggaagcaaaggaaaccagtgaaatcgcaagcagtcgtcacacatgcaacagcagccccgcaagaaggatcgtgggttgataagtttcaatggtttgatgcagacgagggcgacgatgatgagtttgactactacatgctcatctattgcttttttcaggatttcaacgaaatccggactcatattaccgataaatggctggactacttttacaataaatcgatctcggtcgacactctcgcagtgatcaccaatgcggccttcgagctttttcacgagatggaagttgaactccggaagattctgcatagcacgcccgggttgaagactttcatgggtgactattcattcatgatgcagactctcttctttgactacggactagaacatgttgattatccggcgacagacggcctagaaggcgttgaactccacaataaaatatttgaagaagcagactggctgggctttcctgcgtacaccaacgtcgagatgttgttggagagaacgccgccaggtaaggtacccctactaccgccgtcgatgatgacagaggtcaaatatggtctctgcacagattctgaggggatggcgaagttccttcagagtgtggtaatggagatatatccggaagtatgccttataaaagcattgaagacgaatgggatagtgccgcctatcataccagcacaagacgaacttatgctagagttcgaaaatattttccgggttcactgttattcctcggcgatgatatttgatttgaccctctgggctgatgttcgttatatattggaagaagagatatcccagccatttgaactccttcaagcgacagccacgagctcaaaggcgatactgggtcaatatcttcctcaaatgaaggacagagcttacaaacaggaatgccaggacagattcaacgaactggaacatgccattattgccgacttcatggcggaagacaaacaacgaagatatgaccaggcaggtgtgacagaatcgttcgagagccacctgcttttgaaaaggaaccctgtctggtctggtctcttagatttccgttgccgacttgtgctcaacgatttgggatttagattcatcaaaaactcacctctaatcatctacgcggcctccgcctacgcgatggcacaatccaggaaaaatctcatcatggagtggccccggatggatatattcttgcgcgtccacgacaaggactcagtctttctcaaagcgatttccggtgcgacacctattgacctactcagaagattgtcggttggtaattaccagatcggacttgcaggcatttcagatttacccgaatcattctatgcattcatgggacgttatggatggacagacgtagagtcgcgctggcaagtgcagtatcttcgtgatatgctccgggacagcccacattttaagaatgagttcgctcgtgcctcaggacttttggagcaagctccttcgccatcgtcgtttcgaagtcaaagtaatctttttccaacaagagcggctaatcgggggcgaggccatcaccacgctcacgacgctcggcgtgtgtcacccgtgtctccgattcgacttcttgaaatattggaagagaccacatccggtttattagagaatgagctttcagtcgagtatttccagttgtatgacgagagcgttttgcttttcttggacatccttcaagagtttgaccaagagttagaagatggtgaaggatttacttatgagcaaggcgatgatagcgacaaacttgctatgatcctacccacgatatatcaggctgatgatacgtctgccatttcacagagactagaacaagtcgtttcggatttttgtcttgggttatcagaaaacgctgccaagtga

SEQ ID NO: 34785 - protein, 779 aa, Muscodor strobelii
  misc_feature: SGI Peptide ID NO. 572030
  misc_feature (5)..(775): NCBI GI: 164422914 Blast Desc: NCU09401 [Neurospora crassa OR74A] gi|157069870|gb|EAA29508.2| [Neurospora crassa OR74A]
  misc_feature (1)..(560): NCBI GI: 116204533 Blast Desc: CHGG_10150 [Chaetomium globosum CBS 148.51] gi|88176278|gb|EAQ83746.1| CHGG_10150 [Chaetomium globosum CBS 148.51]
  misc_feature (14)..(563): NCBI GI: 240111699 Blast Desc: CPC735_011620 [Coccidioides posadasii C735 delta SOWgp]
  misc_feature (14)..(563): NCBI GI: 119172852 Blast Desc: CIMG_09993 [Coccidioides immitis RS]
  misc_feature (14)..(593): NCBI GI: 225556801 Blast Desc: conserved [Ajellomyces capsulatus G186AR]
  misc_feature (14)..(593): NCBI GI: 67522242 Blast Desc: AN1578.2 [Aspergillus nidulans FGSC A4] gi|40745129|gb|EAA64285.1| AN1578.2 [Aspergillus nidulans FGSC A4] gi|259486908|tpe|CBF85149.1| TPA: conserved [Aspergillus FGSC
  misc_feature (185)..(563): NCBI GI: 145601678 Blast Desc: MGG_14324 [Magnaporthe grisea 70-15] gi|145010202|gb|EDJ94858.1| MGG_14324 [Magnaporthe grisea 70-15]
  misc_feature (197)..(591): NCBI GI: 115383658 Blast Desc: conserved [Aspergillus terreus NIH2624] gi|114196068|gb|EAU37768.1| conserved [Aspergillus terreus NIH2624]
  misc_feature (186)..(563): NCBI GI: 154275596 Blast Desc: conserved [Ajellomyces capsulatus NAm1] gi|150415089|gb|EDN10451.1| conserved [Ajellomyces capsulatus NAm1]
  misc_feature (195)..(581): NCBI GI: 238844174 Blast Desc: conserved [Microsporum canis CBS 113480]
MTEIVIDNVAPEEIPSSAITILRDVVKLRKKSARFFSKAAKSNDGQMKEKMDSHQHIIKVLEKVLHRFDEALSKSRCPAPASESTAKSTANGQLGVDDLSNMYELLKVEQVQVEEGQEEDDDDLDEDAEPDTGRSRKAKKSGKKKAGSKGKGRKQRKPVKSQAVVTHATAAPQEGSWVDKFQWFDADEGDDDEFDYYMLIYCFFQDFNEIRTHITDKWLDYFYNKSISVDTLAVITNAAFELFHEMEVELRKILHSTPGLKTFMGDYSFMMQTLFFDYGLEHVDYPATDGLEGVELHNKIFEEADWLGFPAYTNVEMLLERTPPGKVPLLPPSMMTEVKYGLCTDSEGMAKFLQSVVMEIYPEVCLIKALKTNGIVPPIIPAQDELMLEFENIFRVHCYSSAMIFDLTLWADVRYILEEEISQPFELLQATATSSKAILGQYLPQMKDRAYKQECQDRFNELEHAIIADFMAEDKQRRYDQAGVTESFESHLLLKRNPVWSGLLDFRCRLVLNDLGFRFIKNSPLIIYAASAYAMAQSRKNLIMEWPRMDIFLRVHDKDSVFLKAISGATPIDLLRRLSVGNYQIGLAGISDLPESFYAFMGRYGWTDVESRWQVQYLRDMLRDSPHFKNEFARASGLLEQAPSPSSFRSQSNLFPTRAANRGRGHHHAHDARRVSPVSPIRLLEILEETTSGLLENELSVEYFQLYDESVLLFLDILQEFDQELEDGEGFTYEQGDDSDKLAMILPTIYQADDTSAISQRLEQVVSDFCLGLSENAAK

SEQ ID NO: 34786 - DNA, 2732 bp, Muscodor strobelii
  misc_feature: SGI EST ID NO. CUFF.82691.0
  misc_feature: Variant of the nucleotide sequence at SEQ ID NO 34784
tgctgagctacctacgttcaatctatggataaccctcttcatggagactacgccctatggacacatcggggtctttaagtacctataaaaggtacaaattagggcaagcgcaattccagagatggcttcaacaaacctcagacaagttcaagtttacgtccaaaggcgatcagtccaaggcggcgacactggattgccatgaccatcagccgaccggccaccaggccagggcgaaaccgagcgcctcctcacacggcgccggcccgtcttcatcacttcattggacacaattggagtccatgacagagattgtcattgataatgtagcaccagaggaaattccgtcatcggccatcaccattttgcgtgacgtggtcaagctgagaaagaagagcgcacgctttttctccaaggcggcaaagtcaaacgatggacagatgaaagaaaagatggactcgcatcagcatatcatcaaggtccttgagaaagtactgcatcgttttgacgaggcactctccaaaagtcggtgcccggcgccagcgtctgaatctacagccaaatctacagctaacggccagcttggcgtggacgacctttcaaatatgtatgaattgctcaaggtcgagcaagttcaagtagaggaaggccaagaagaggacgatgacgacctggacgaagatgccgagcccgacactggaagaagcaggaaggctaaaaagtcgggaaagaagaaagccggaagtaagggtaagggcaggaagcaaaggaaaccagtgaaatcgcaagcagtcgtcacacatgcaacagcagccccgcaagaaggatcgtgggttgataagtttcaatggtttgatgcagacgagggcgacgatgatgagtttgactactacatgctcatctattgcttttttcaggatttcaacgaaatccggactcatattaccgataaatggctggactacttttacaataaatcgatctcggtcgacactctcgcagtgatcaccaatgcggccttcgagctttttcacgagatggaagttgaactccggaagattctgcatagcacgcccgggttgaagactttcatgggtgactattcattcatgatgcagactctcttctttgactacggactagaacatgttgattatccggcgacagacggcctagaaggcgttgaactccacaataaaatatttgaagaagcagactggctgggctttcctgcgtacaccaacgtcgagatgttgttggagagaacgccgccaggtaaggtacccctactaccgccgtcgatgatgacagaggtcaaatatggtctctgcacagattctgaggggatggcgaagttccttcagagtgtggtaatggagatatatccggaagtatgccttataaaagcattgaagacgaatgggatagtgccgcctatcataccagcacaagacgaacttatgctagagttcgaaaatattttccgggttcactgttattcctcggcgatgatatttgatttgaccctctgggctgatgttcgttatatattggaagaagagatatcccagccatttgaactccttcaagcgacagccacgagctcaaaggcgatactgggtcaatatcttcctcaaatgaaggacagagcttacaaacaggaatgccaggacagattcaacgaactggaacatgccattattgccgacttcatggcggaagacaaacaacgaagatatgaccaggcaggtgtgacagaatcgttcgagagccacctgcttttgaaaaggaaccctgtctggtctggtctcttagatttccgttgccgacttgtgctcaacgatttgggatttagattcatcaaaaactcacctctaatcatctacgcggcctccgcctacgcgatggcacaatccaggaaaaatctcatcatggagtggccccggatggatatattcttgcgcgtccacgacaaggactcagtctttctcaaagcgatttccggtgcgacacctattgacctactcagaagattgtcggttggtaattaccagatcggacttgcaggcatttcagatttacccgaatcattctatgcattcatgggacgttatggatggacagacgtagagtcgcgctggcaagtgcagtatcttcgtgatatgctccgggacagcccacattttaagaatgagttcgctcgtgcctcaggacttttggagcaagctccttcgccatcgtcgtttcgaagtcaaagtaatctttttccaacaagagcggctaatcgggggcgaggccatcaccacgctcacgacgctcggcgtgtgtcacccgtgtctccgattcgacttcttgaaatattggaagagaccacatccggtttattagagaatgagctttcagtcgagtatttccagttgtatgacgagagcgttttgcttttcttggacatccttcaagagtttgaccaagagttagaagatggtgaaggatttacttatgagcaaggcgatgatagcgacaaacttgctatgatcctacccacgatatatcaggctgatgatacgtctgccatttcacagagactagaacaagtcgtttcggatttttgtcttgggttatcagaaaacgctgccaagtgagaatactgctttgagcaggtcaacgtttgttatatttgtacgagaggataagtccttataaagaaatttatcgaaccgatagtattgtcaaca

SEQ ID NO: 34787 - DNA, 1377 bp, Muscodor strobelii
  misc_feature: SGI cDNA ID NO. 572031
  misc_feature: Encodes the peptide sequence at SEQ ID NO 34788
atggcaagcttggcagagaaatatgacgctttggtacaatggatccaacagtctggtgggcagcttcatcctgccgttgaaatttatcatgacgaactcacaaaaggctcgttccgagtcaagccatccaccgtccttggactgcatgagagtgtcgtgaatctccctctctcatgttctctttcatacctcaatgcaattgccgagcatcccagttatgccaatgtaacacctccagctattacaaagccgcaaggcagtaactatttctcggatgaattcctgagcaatacgccagctcatgttataggacgctttttcctcatgcaagaatatcggcgtggtcagagttcaacatggtggccatacattaggactcttcctcaacccgaacatgtggcgagcatgcttcccgtggcatggccgtcagatgacgtcgaatttctccaaggaaccaatgcatacatcgcaatcagggagataaggtctactctacgaaaagagcacaaacacgccatgagcctgcttccaagtatactcaagtctgagtacacgcggccgttatactattgggcctattgtattttcaccacgcggagtttccggccatcgctcattttccctcctgaagagcttcgcggtatcccgtgcactccagacgacttctctgtcttattaccgcttttcgatgtcggcaaccactcgcctttcgctaaagtctcatgggccaccgatggcgacgccagcacatgctctttgaataccggtcagacgcattcaggaggtcaacagatatacaacaattacggaacaaaaactaatgccgagctgcttcttggatatggattcattctgcccgagagtgaagagttccataatgattatgtgcacattaaaacgagagctaatcctgaagccggcgatctcaatgcttcacatatcatatcattgcgaccaatggctcacccaagttcagtgacaggccgatcaaggttgctcgacccgagtcacatctcttgcattcccccgtgggctcatttccaggattcgctcatcgccgctctgtacgaatcaatgacaagaggaaccgaggacgaatcagatcccagtctcacagacatcatgcaaggcaggatatcagacaagttgctcaaaagtatggtcgatgcattagaaacaaaaattagtattgatctcgaagagatggagattcacgaccctccatacgagccatcaaatgccaaccaaagactcgcgacacactatcgagaccagtgtaagaaggtcttgcgacacgctttggaaagcctatcagatcctaattcttcaggtcgagatattcaacgtgtagtacaggtgttagcgaaaagtaattag

SEQ ID NO: 34788 - protein, 458 aa, Muscodor strobelii
  misc_feature: SGI Peptide ID NO. 572031
  misc_feature (107)..(202): Pfam Id: PF00856 Pfam Desc: SET domain
  misc_feature (9)..(440): NCBI GI: 261354330 Blast Desc: SET domain-containing protein [Verticillium albo-atrum VaMs.102]
  misc_feature (7)..(438): NCBI GI: 171679805 Blast Desc: protein product [Podospora anserina] gi|170939528|emb|CAP64756.1| protein product [Podospora anserina]
  misc_feature (7)..(326): NCBI GI: 116206234 Blast Desc: CHGG_02410 [Chaetomium globosum CBS 148.51] gi|88183007|gb|EAQ90475.1| CHGG_02410 [Chaetomium globosum CBS 148.51]
  misc_feature (2)..(446): NCBI GI: 46117158 Blast Desc: FG04421.1 [Gibberella zeae PH-1]
  misc_feature (6)..(437): NCBI GI: 85093434 Blast Desc: NCU09581 [Neurospora crassa OR74A] gi|28921141|gb|EAA30456.1| [Neurospora crassa OR74A]
  misc_feature (6)..(357): NCBI GI: 39976669 Blast Desc: MGG_06237 [Magnaporthe grisea 70-15] gi|145016370|gb|EDK00860.1| MGG_06237 [Magnaporthe grisea 70-15]
  misc_feature (1)..(438): NCBI GI: 256729290 Blast Desc: NECHADRAFT_106330 [Nectria haematococca mpVI 77-13-4]
  misc_feature (4)..(313): NCBI GI: 156054286 Blast Desc: SS1G_05991 [Sclerotinia sclerotiorum 1980] gi|154703771|gb|EDO03510.1| SS1G_05991 [Sclerotinia sclerotiorum 1980]
  misc_feature (6)..(304): NCBI GI: 169771481 Blast Desc: [Aspergillus oryzae RIB40] gi|238485948|ref|XP_002374212.1| conserved [Aspergillus flavus NRRL3357] gi|83768069|dbj|BAE58208.1| protein product oryzae]
  misc_feature (12)..(304): NCBI GI: 121707885 Blast Desc: SET domain protein [Aspergillus clavatus NRRL 1] gi|119400116|gb|EAW10542.1| SET domain protein [Aspergillus clavatus NRRL 1]
MASLAEKYDALVQWIQQSGGQLHPAVEIYHDELTKGSFRVKPSTVLGLHESVVNLPLSCSLSYLNAIAEHPSYANVTPPAITKPQGSNYFSDEFLSNTPAHVIGRFFLMQEYRRGQSSTWWPYIRTLPQPEHVASMLPVAWPSDDVEFLQGTNAYIAIREIRSTLRKEHKHAMSLLPSILKSEYTRPLYYWAYCIFTTRSFRPSLIFPPEELRGIPCTPDDFSVLLPLFDVGNHSPFAKVSWATDGDASTCSLNTGQTHSGGQQIYNNYGTKTNAELLLGYGFILPESEEFHNDYVHIKTRANPEAGDLNASHIISLRPMAHPSSVTGRSRLLDPSHISCIPPWAHFQDSLIAALYESMTRGTEDESDPSLTDIMQGRISDKLLKSMVDALETKISIDLEEMEIHDPPYEPSNANQRLATHYRDQCKKVLRHALESLSDPNSSGRDIQRVVQVLAKSN

SEQ ID NO: 34789 - DNA, 3917 bp, Muscodor strobelii
  misc_feature: SGI EST ID NO. CUFF.82902.0
  misc_feature: Variant of the nucleotide sequence at SEQ ID NO 34787
tcccctctaaagctcttgagcagtctataaaataaaaatgttccccgacgaacaagccacgcaacagcgggagcgaacatcaatccgtctataccattcgcatacaacatactacctatggtcgaccgccctcatattgaatttattatccaagttagctctcgacaaaacagacgcggcgcatagacatatccggatgaagcgcaactgccgaatctgaaacccacacgctgatggcaccgtagtgtttatcccccacgtattagcaatctccttttttttaaaaaaaaatcatgcccgatcatggcaagcttggcagagaaatatgacgctttggtacaatggatccaacagtctggtgggcagcttcatcctgccgttgaaatttatcatgacgaactcacaaaaggctcgttccgagtcaagccatccaccgtccttggactgcatgagagtgtcgtgaatctccctctctcatgttctctttcatacctcaatgcaattgccgagcatcccagttatgccaatgtaacacctccagctattacaaagccgcaaggcagtaactatttctcggatgaattcctgagcaatacgccagctcatgttataggacgctttttcctcatgcaagaatatcggcgtggtcagagttcaacatggtggccatacattaggactcttcctcaacccgaacatgtggcgagcatgcttcccgtggcatggccgtcagatgacgtcgaatttctccaaggaaccaatgcatacatcgcaatcagggagataaggtctactctacgaaaagagcacaaacacgccatgagcctgcttccaagtatactcaagtctgagtacacgcggccgttatactattgggcctattgtattttcaccacgcggagtttccggccatcgctcattttccctcctgaagagcttcgcggtatcccgtgcactccagacgacttctctgtcttattaccgcttttcgatgtcggcaaccactcgcctttcgctaaagtctcatgggccaccgatggcgacgccagcacatgctctttgaataccggtcagacgcattcaggaggtcaacagatatacaacaattacggaacaaaaactaatgccgagctgcttcttggatatggattcattctgcccgagagtgaagagttccataatgattatgtgcacattaaaacgagagctaatcctgaagccggcgatctcaatgcttcacatatcatatcattgcgaccaatggctcacccaagttcagtgacaggccgatcaaggttgctcgacccgagtcacatctcttgcattcccccgtgggctcatttccaggattcgctcatcgccgctctgtacgaatcaatgacaagaggaaccgaggacgaatcagatcccagtctcacagacatcatgcaaggcaggatatcagacaagttgctcaaaagtatggtcgatgcattagaaacaaaaattagtattgatctcgaagagatggagattcacgaccctccatacgagccatcaaatgccaaccaaagactcgcgacacactatcgagaccagtgtaagaaggtcttgcgacacgctttggaaagcctatcagatcctaattcttcaggtcgagatattcaacgtgtagtacaggtgttagcgaaaagtaattagtacttagattttgactaaacctaggtgaatttgaaaatgtgtcattattacatcttgagcaacgatgagtgatcatcagctcaacatctcaggagatgtcattcagcatgtgttagaatatcacaatctgataccctaatataaatccataacctacactgggcgttcaaaactagatccaaacgccacatcgggtatcacaaaccattcctcgccgcctgcctagtagtcgcaaaagaaggttatgcactaccaattccaaatgattgatcagatgatcttacgccgtgtatttttcctgcttgattcctctccgaactccgcacatgcgtgaaagacaagaacccgctgaatagaaaatgtaataggaaatagtggtaactgagcacattattctcagctggatcgcgatccggagtcagagtcgcactcagattcgtctggtagctccatgtgttcgtttagtaggtcgagacatgccttcgaggctggattgtagtacagtcagtcttaacccgtcacaatgccgggcgtgatatgtgggaggcagtcaacttacgtcgcaagacactgatgtctccagagctaagtgcggcgctcattcgcgctgagttgtaacagcgatatctcctctgaagggccaacatccgtttccatagtctctcaggatcaccaccagtttcctcctctaatgctttgatagactctctccttcggccattgttttctcttatcgtgacgaatgaagagcagacggagcttggcgacgcagacctcgtggtgtgtatatcatctatcgatccaacggtggcatgtggcggcgcactagtctcaataggacaaggcgtgatagcgtcaatgtcatctaccactgtagacatggtgatttctccttgatactttcgaaatgttatgatgaaaagaggattgcgattaaagtagtaaggcttctgctgagatggaatctagagatccttgtctctggcgtagtgggatattgtaagtatgtccgacttttgttcgtggacccgagacgacgacgacgataggtttttatcttagtgggtggaggtccactactttctttgttgtgtcgaatttggccacaaaatctaacaaagggagctcgtgtttcagaaaaagtaaggccgcattggcatgatatttactcttgcaacttcattttagggaagaccaagtttagaaagtctctagaggcgaggtcaatgacggaggagccagcgcatagttatacccagtgcaaatcaatgcccaagccaaagaaagacacgaatgaaggcagaccaagcgcatgcagtcatgcacctgtctagagttacattagccctcacgtccctggaagaggtgggcacgatgatgatagcgcgtgtatgattgtacaaccctgtcgggacatccaatcatgagcaaattgtcgatattgcttttacaactaggttctagcatgcaggctcgctgagtcaagttcgaacggcatctgacgataaattttgtagggactttgggctcgggagtctgacatgctgcaacagctatgtagtgagacggcaaaaaccttttcctcgtctgattttctcaatgctttttggtattttcctatggcgctccttgatatttattacttagatggggttccttgcctgccgtaagctacctatgtttattaggatcggaatattatgtgagggccatgctgggaacgccacaatctaaattaaggtacaagcattccttaggtatgtaagtaccaagccgcctgcccaggccattttctgcagggcgtgatgatttaaagacatgaccgcatgtaatatcctaccatgacggtgtttcattcaaaaatatgccgctacgcacgcccttcgcaagaacccaactaaccgacggtggtgatgttctttgatgttcttctgacgtcttataactgttccgatcgggaactctattggcattggccaacaagcccggctggggtagactgggatgcccggttgaacacaccaacacctgcaccatcgcagatcctcaactaccggcacacaccaagacaacctcgagacctcgacgcccccaatgatagtcccgttgctggtcagggcccccgcgccccgttatcgggggcgtaccgtagatagcgaaaatagtcacagccttcttttcacgaggacacgctgcaaccctaaatattgcttcagtatctagtatcctttgcttcg

SEQ ID NO: 34790 - DNA, 861 bp, Muscodor strobelii
  misc_feature: SGI cDNA ID NO. 572032
  misc_feature: Encodes the peptide sequence at SEQ ID NO 34791
atgagcctgcttccaagtatactcaagtctgagtacacgcggccgttatactattgggcctattgtattttcaccacgcggagtttccggccatcgctcattttccctcctgaagagcttcgcggtatcccgtgcactccagacgacttctctgtcttattaccgcttttcgatgtcggcaaccactcgcctttcgctaaagtctcatgggccaccgatggcgacgccagcacatgctctttgaataccggtcagacgcattcaggaggtcaacagatatacaacaattacggaacaaaaactaatgccgagctgcttcttggatatggattcattctgcccgagagtgaagagttccataatgattatgtgcacattaaaacgagagctaatcctgaagccggcgatctcaatgcttcacatatcatatcattgcgaccaatggctcacccaagttcagtgacaggccgatcaaggttgctcgacccgagtcacatctcttgcattcccccgtgggctcatttccaggattcgctcatcgccgctctgtacgaatcaatgacaagaggaaccgaggacgaatcagatcccagtctcacagacatcatgcaaggcaggatatcagacaagttgctcaaaagtatggtcgatgcattagaaacaaaaattagtattgatctcgaagagatggagattcacgaccctccatacgagccatcaaatgccaaccaaagactcgcgacacactatcgagaccagtgtaagaaggtcttgcgacacgctttggaaagcctatcagatcctaattcttcaggtcgagatattcaacgtgtagtacaggtgttagcgaaaagtaattag

SEQ ID NO: 34791 - protein, 286 aa, Muscodor strobelii
  misc_feature: SGI Peptide ID NO. 572032
  misc_feature (5)..(274): NCBI GI: 46117158 Blast Desc: FG04421.1 [Gibberella zeae PH-1]
  misc_feature (10)..(268): NCBI GI: 261354330 Blast Desc: SET domain-containing protein [Verticillium albo-atrum VaMs.102]
  misc_feature (8)..(266): NCBI GI: 256729290 Blast Desc: NECHADRAFT_106330 [Nectria haematococca mpVI 77-13-4]
  misc_feature (11)..(266): NCBI GI: 171679805 Blast Desc: protein product [Podospora anserina] gi|170939528|emb|CAP64756.1| protein product [Podospora anserina]
  misc_feature (11)..(185): NCBI GI: 39976669 Blast Desc: MGG_06237 [Magnaporthe grisea 70-15] gi|145016370|gb|EDK00860.1| MGG_06237 [Magnaporthe grisea 70-15]
  misc_feature (7)..(154): NCBI GI: 116206234 Blast Desc: CHGG_02410 [Chaetomium globosum CBS 148.51] gi|88183007|gb|EAQ90475.1| CHGG_02410 [Chaetomium globosum CBS 148.51]
  misc_feature (11)..(265): NCBI GI: 85093434 Blast Desc: NCU09581 [Neurospora crassa OR74A] gi|28921141|gb|EAA30456.1| [Neurospora crassa OR74A]
  misc_feature (10)..(141): NCBI GI: 156054286 Blast Desc: SS1G_05991 [Sclerotinia sclerotiorum 1980] gi|154703771|gb|EDO03510.1| SS1G_05991 [Sclerotinia sclerotiorum 1980]
  misc_feature (15)..(117): NCBI GI: 45188110 Blast Desc: ADR237Cp [Ashbya gossypii ATCC 10895] gi|44982927|gb|AAS52157.1| ADR237Cp [Ashbya gossypii ATCC 10895]
  misc_feature (11)..(132): NCBI GI: 121707885 Blast Desc: SET domain protein [Aspergillus clavatus NRRL 1] gi|119400116|gb|EAW10542.1| SET domain protein [Aspergillus clavatus NRRL 1]
MSLLPSILKSEYTRPLYYWAYCIFTTRSFRPSLIFPPEELRGIPCTPDDFSVLLPLFDVGNHSPFAKVSWATDGDASTCSLNTGQTHSGGQQIYNNYGTKTNAELLLGYGFILPESEEFHNDYVHIKTRANPEAGDLNASHIISLRPMAHPSSVTGRSRLLDPSHISCIPPWAHFQDSLIAALYESMTRGTEDESDPSLTDIMQGRISDKLLKSMVDALETKISIDLEEMEIHDPPYEPSNANQRLATHYRDQCKKVLRHALESLSDPNSSGRDIQRVVQVLAKSN

SEQ ID NO: 34792 - DNA, 3917 bp, Muscodor strobelii; identical to SEQ ID NO: 34789
  misc_feature: SGI EST ID NO. CUFF.82902.0
  misc_feature: Variant of the nucleotide sequence at SEQ ID NO 34790

SEQ ID NO: 34793 - DNA, 414 bp, Muscodor strobelii
  misc_feature: SGI cDNA ID NO. 572033
  misc_feature: Reduced expression when VOC is produced
  misc_feature: Encodes the peptide sequence at SEQ ID NO 34794
atgtctacagtggtagatgacattgacgctatcacgccttgtcctattgagactagtgcgccgccacatgccaccgttggatcgatagatgatatacacaccacgaggtctgcgtcgccaagctccgtctgctcttcattcgtcacgataagagaaaacaatggccgaaggagagagtctatcaaagcattagaggaggaaactggtggtgatcctgagagactatggaaacggatgttggcccttcagaggagatatcgctgttacaactcagcgcgaatgagcgccgcacttagctctggagacatcagtgtcttgcgaccctcgaaggcatgtctcgacctactaaacgaacacatggagctaccagacgaatctgagtgcgactctgactccggatcgcgatccagctga

SEQ ID NO: 34794 - protein, 137 aa, Muscodor strobelii
  misc_feature: SGI Peptide ID NO. 572033
  misc_feature (7)..(126): NCBI GI: 171678237 Blast Desc: protein product [Podospora anserina] gi|170937188|emb|CAP61845.1| protein product [Podospora anserina]
  misc_feature (71)..(125): NCBI GI: 85092830 Blast Desc: NCU08155 [Neurospora crassa OR74A] gi|28921007|gb|EAA30330.1| NCU08155 [Neurospora crassa OR74A]
  misc_feature (75)..(127): NCBI GI: 39942648 Blast Desc: MGG_03404 [Magnaporthe grisea 70-15] gi|145009197|gb|EDJ93908.1| [Magnaporthe grisea 70-15]
  misc_feature (55)..(121): NCBI GI: 154321339 Blast Desc: [Botryotinia fuckeliana B05.10] gi|150852082|gb|EDN27274.1| [Botryotinia fuckeliana B05.10]
  misc_feature (75)..(125): NCBI GI: 261360430 Blast Desc: VDBG_08968 [Verticillium albo-atrum VaMs.102]
  misc_feature (76)..(121): NCBI GI: 156053768 Blast Desc: SS1G_05731 [Sclerotinia sclerotiorum 1980] gi|154703512|gb|EDO03251.1| SS1G_05731 [Sclerotinia sclerotiorum 1980]
  misc_feature (75)..(125): NCBI GI: 46137963 Blast Desc: FG10496.1 [Gibberella zeae PH-1]
  misc_feature: Useful for introducing or modulating the production of volatile compounds
MSTVVDDIDAITPCPIETSAPPHATVGSIDDIHTTRSASPSSVCSSFVTIRENNGRRRESIKALEEETGGDPERLWKRMLALQRRYRCYNSARMSAALSSGDISVLRPSKACLDLLNEHMELPDESECDSDSGSRSS

SEQ ID NO: 34795 - DNA, 3883 bp, Muscodor strobelii
  misc_feature: SGI EST ID NO. CUFF.82903.1
  misc_feature: Variant of the nucleotide sequence at SEQ ID NO 34793
gcaatatttagggttgcagcgtgtcctcgtgaaaagaaggctgtgactattttcgctatctacggtacgcccccgataacggggcgcgggggccctgaccagcaacgggactatcattgggggcgtcgaggtctcgaggttgtcttggtgtgtgccggtagttgaggatctgcgatggtgcaggtgttggtgtgttcaaccgggcatcccagtctaccccagccgggcttgttggccaatgccaatagagttcccgatcggaacagttataagacgtcagaagaacatcaaagaacatcaccaccgtcggttagttgggttcttgcgaagggcgtgcgtagcgctgaaagacgatgtacttagattttgcgctcttgcgtgacatctacagagctggattgcttacgcatatttttgaatgaaacaccgtcatggtaggatattacatgcggtcatgtctttaaatcatcacgccctgcagaaaatggcctgggcaggcggcttggtacttacatacctaaggaatgcttgtaccttaatttagattgtggcgttcccagcatggccctcacataatattccgatcctaataaacataggtagcttacggcaggcaaggaaccccatctaagtaataaatatcaaggagcgccataggaaaataccaaaaagcattgagaaaatcagacgaggaaaaggtttttgccgtctcactacatagctgttgcagcatgtcagactcccgagcccaaagtccctacaaaatttatcgtcagatgccgttcgaacttgactcagcgagcctgcatgctagaacctagttgtaaaagcaatatcgacaatttgctcatgattggatgtcccgacagggttgtacaatcatacacgcgctatcatcatcgtgcccacctcttccagggacgtgagggctaatgtaactctagacaggtgcatgactgcatgcgcttggtctgccttcattcgtgtctttctttggcttgggcattgatttgcactgggtataactatgcgctggctcctccgtcattgacctcgcctctagagactttctaaacttggtcttccctaaaatgaagttgcaagagtaaatatcatgccaatgcggccttactttttctgaaacacgagctccctttgttagattttgtggccaaattcgacacaacaaagaaagtagtggacctccacccactaagataaaaacctatcgtcgtcgtcgtctcgggtccacgaacaaaagtcggacatacttacaatatcccactacgccagagacaaggatctctagattccatctcagcagaagccttactactttaatcgcaatcctcttttcatcataacatttcgaaagtatcaaggagaaatcaccatgtctacagtggtagatgacattgacgctatcacgccttgtcctattgagactagtgcgccgccacatgccaccgttggatcgatagatgatatacacaccacgaggtctgcgtcgccaagctccgtctgctcttcattcgtcacgataagagaaaacaatggccgaaggagagagtctatcaaagcattagaggaggaaactggtggtgatcctgagagactatggaaacggatgttggcccttcagaggagatatcgctgttacaactcagcgcgaatgagcgccgcacttagctctggagacatcagtgtcttgcgaccctcgaaggcatgtctcgacctactaaacgaacacatggagctaccagacgaatctgagtgcgactctgactccggatcgcgatccagctgagaataatgtgctcagttaccactatttcctattacattttctattcagcgggttcttgtctttcacgcatgtgcggagttcggagaggaatcaagcaggaaaaatacacggcgtaagatcatctgatcaatcatttggaattggtagtgcataaccttcttttgcgactactaggcaggcggcgaggaatggtttgtgatacccgatgtggcgtttggatctagttttgaacgcccagtgtaggttatggatttatattagggtatcagattgtgatattctaacacatgctgaatgacatctcctgagatgttgagctgatgatcactcatcgttgctcaagatgtaataatgacacattttcaaattcacctaggtttagtcaaaatctaagtactaattacttttcgctaacacctgtactacacgttgaatatctcgacctgaagaattaggatctgataggctttccaaagcgtgtcgcaagaccttcttacactggtctcgatagtgtgtcgcgagtctttggttggcatttgatggctcgtatggagggtcgtgaatctccatctcttcgagatcaatactaatttttgtttctaatgcatcgaccatacttttgagcaacttgtctgatatcctgccttgcatgatgtctgtgagactgggatctgattcgtcctcggttcctcttgtcattgattcgtacagagcggcgatgagcgaatcctggaaatgagcccacgggggaatgcaagagatgtgactcgggtcgagcaaccttgatcggcctgtcactgaacttgggtgagccattggtcgcaatgatatgatatgtgaagcattgagatcgccggcttcaggattagctctcgttttaatgtgcacataatcattatggaactcttcactctcgggcagaatgaatccatatccaagaagcagctcggcattagtttttgttccgtaattgttgtatatctgttgacctcctgaatgcgtctgaccggtattcaaagagcatgtgctggcgtcgccatcggtggcccatgagactttagcgaaaggcgagtggttgccgacatcgaaaagcggtaataagacagagaagtcgtctggagtgcacgggataccgcgaagctcttcaggagggaaaatgagcgatggccggaaactccgcgtggtgaaaatacaataggcccaatagtataacggccgcgtgtactcagacttgagtatacttggaagcaggctcatggcgtgtttgtgctcttttcgtagagtagaccttatctccctgattgcgatgtatgcattggttccttggagaaattcgacgtcatctgacggccatgccacgggaagcatgctcgccacatgttcgggttgaggaagagtcctaatgtatggccaccatgttgaactctgaccacgccgatattcttgcatgaggaaaaagcgtcctataacatgagctggcgtattgctcaggaattcatccgagaaatagttactgccttgcggctttgtaatagctggaggtgttacattggcataactgggatgctcggcaattgcattgaggtatgaaagagaacatgagagagggagattcacgacactctcatgcagtccaaggacggtggatggcttgactcggaacgagccttttgtgagttcgtcatgataaatttcaacggcaggatgaagctgcccaccagactgttggatccattgtaccaaagcgtcatatttctctgccaagcttgccatgatcgggcatgatttttttttaaaaaaaaggagattgctaatacgtgggggataaacactacggtgccatcagcgtgtgggtttcagattcggcagttgcgcttcatccggatatgtctatgcgccgcgtctgttttgtcgagagctaacttggataataaattcaatatgagggcggtcgaccataggtagtatgttgtatgcgaatggtatagacggattgatgttcgctcccgctgttgcgtggcttgttcgtcggggaacatttttattttatagactgctcaagagctttagagggga

SEQ ID NO: 34796 - DNA, 867 bp, Muscodor strobelii
  misc_feature: SGI cDNA ID NO. 572034
  misc_feature: Encodes the peptide sequence at SEQ ID NO 34797
atgtttgccaaattcattagcagctatctcctgctggcagtaggcaaggctaccattacacctctagacggctttcgtgttgtctggggcgatgactttaacggtgcttcgggtagtctcccgaatagtaataattgggaaaccgtcacgactgcgacgcggcccaactgcaacaacgaaattcagctatacactgacctcgcaagtaacgctcatctaaacggggacggttcgctaaacattgtcgccatccaccgaggcaacagctggacctcggggcgactggagtcacgcggggagtggaactgcccggctgggaagaccatgattttccgagcggagatcctcgcaccagacttcaccggcagcccggagaagttccggggactctggcccgccttctgggcgctggggaagtcgaagcgcggcctgttgcagtgcgatcaagggtggcctgagtgcggcgagtgggacatctttgagacttgggacagccgcggtagcttaaacggcgctgtgcttcactttgcggatgctagcggtaatcacgcgtctatcggaacttccgttcctttcgtcggcgggcagtatcactcgtggtccttcaaagtagaccgcactaattccgactggacgaagcagacaatgatctggtctatggatgggaaggagtacttccgtgtgatagggtcgcagttgacattcgcgcagtgggagaagcttgcctacaagtcgttttacatcgtcctgaacggtttggcagtgggtggtgctgctcccggtaacccaggcagtcagaccgtgagtgggctggagcaaggggcttttctacggtttaagaatgttgctgtgtacgagtcggtttaa

SEQ ID NO: 34797 - protein, 288 aa, Muscodor strobelii
  misc_feature: SGI Peptide ID NO. 572034
  misc_feature (2)..(288): NCBI GI: 256725844 Blast Desc: NECHADRAFT_44066 [Nectria haematococca mpVI 77-13-4]
  misc_feature (4)..(285): NCBI GI: 154305259 Blast Desc: BC1G_08924 [Botryotinia fuckeliana B05.10] gi|150853666|gb|EDN28858.1| BC1G_08924 [Botryotinia fuckeliana B05.10]
  misc_feature (23)..(287): NCBI GI: 145602919 Blast Desc: MGG_13777 [Magnaporthe grisea 70-15] gi|145011271|gb|EDJ95927.1| MGG_13777 [Magnaporthe grisea 70-15]
  misc_feature (21)..(288): NCBI GI: 46111539 Blast Desc: FG02651.1 [Gibberella zeae PH-1]
  misc_feature (1)..(287): NCBI GI: 119473375 Blast Desc: secreted glucosidase [Neosartorya fischeri NRRL 181] gi|119406739|gb|EAW16690.1| secreted glucosidase [Neosartorya fischeri NRRL 181]
  misc_feature (2)..(287): NCBI GI: 116194890 Blast Desc: CHGG_04043 [Chaetomium globosum CBS 148.51] gi|88179956|gb|EAQ87424.1| CHGG_04043 [Chaetomium globosum CBS 148.51]
  misc_feature (24)..(287): NCBI GI: 119474307 Blast Desc: secreted glucosidase [Neosartorya fischeri NRRL 181] gi|119407182|gb|EAW17132.1| secreted glucosidase [Neosartorya fischeri NRRL 181]
  misc_feature (24)..(287): NCBI GI: 70992959 Blast Desc: endo-1,3(4)-beta-glucanase [Aspergillus fumigatus Af293] gi|66848961|gb|EAL89290.1| endo-1,3(4)-beta-glucanase, [Aspergillus fumigatus Af293] gi|159130220|gb|EDP55333.1| A1163]
  misc_feature (24)..(287): NCBI GI: 70986272 Blast Desc: endo-1,3(4)-beta-glucanase [Aspergillus fumigatus Af293] gi|66846259|gb|EAL86592.1| endo-1,3(4)-beta-glucanase, [Aspergillus fumigatus Af293] gi|159128225|gb|EDP53340.1| A1163]
  misc_feature (8)..(287): NCBI GI: 256723067 Blast Desc: NECHADRAFT_94110 [Nectria haematococca mpVI 77-13-4]
  misc_feature (12)..(278): SWISSPROT Homolog: EC 3.2.1.39 Glucan endo-1,3-beta-D-glucosidase
MFAKFISSYLLLAVGKATITPLDGFRVVWGDDFNGASGSLPNSNNWETVTTATRPNCNNEIQLYTDLASNAHLNGDGSLNIVAIHRGNSWTSGRLESRGEWNCPAGKTMIFRAEILAPDFTGSPEKFRGLWPAFWALGKSKRGLLQCDQGWPECGEWDIFETWDSRGSLNGAVLHFADASGNHASIGTSVPFVGGQYHSWSFKVDRTNSDWTKQTMIWSMDGKEYFRVIGSQLTFAQWEKLAYKSFYIVLNGLAVGGAAPGNPGSQTVSGLEQGAFLRFKNVAVYESV

SEQ ID NO: 34798 - DNA, 209 bp, Muscodor strobelii
  misc_feature: SGI EST ID NO. CUFF.82701.0
  misc_feature: Variant of the nucleotide sequence at SEQ ID NO 34796
tgcttcgggtagtctcccgaatagtaataattgggaaaccgtcacgactgcgacgcggcccaactgcaacaacgaaattcagctatacactgacctcgcaagtaacgctcatctaaacggggacggttcgctaaacattgtcgccatccaccgaggcaacagctggacctcggggcgactggagtcacgcggggagtggaactgcccgg

SEQ ID NO: 34799 - DNA, 2226 bp, Muscodor strobelii
  misc_feature: SGI cDNA ID NO. 572035
  misc_feature: Encodes the peptide sequence at SEQ ID NO 34800
atggccgaggaccattctatgactgatgtgccaacaaacggcatcaataatcatcacagcgctattcaggacgacgaagactcatacgacgaagacgaacccatgggagatgacgagaactctactacctcaagcgaagaggtcatcaaatctatgcggaaaagcgggcgtctgccaactggctgctgctacgatgacaggatgaagttacatgccaacgctgattttgggccgacgcctcatcacccagaggacccactccggatagagagaataatgaagaaattcaagaacgccggtctcatctttacgggtcttgacacggagcttctggatattttaagagataaccccaccaagtatatgtggcggataccagctcggttcgccagcaagcaggaaatttgcaccgtacatacaacgagtcatcacgactgggtcagaaacctctcgcacatgagtactcgagatcttcgtcatcttagcttgagccttgaccagggtcgggagtcgctgtacgtgggaggaatgtcatacgaggctgctttgctcgcggctgggggcgccatcgagtcgtgcaagaatgtggttgcgggcgaagtgaagaatgcttttgccgtgatccgcccgccaggacaccacgcggaatacgatgaaagcatgggattctgtctcttcaacaacgttccgatcgctgccaaggtgtgccaaaatgagtacccgaatacatgccgcaaagtgtttatcctcgactgggacgtccatcacggcaacggaatccaaaacatgttttacgaagatgcgaacatcttgtacatctcgcttcatgtttacgataacggccagttctatccggggcagcccaagaatccaatgatccccgatggaaacctagacaaagtgggtggtagtaagggcaagggcaagaatgtcaacattccgtggccgtcgcaaggcatgggagacggcgagtattttgcggccttccagaagatcgtgatgcctatcgcgcaggaattcaaccccgacctcgtcatcatctcggcgggcttcgacgctgccaatggggatgagctgggcggttgtttcgtcacgcctggctgttacgcgcacatgacgcacatgctgatgtctctggcgggaggcaaggtagccgtgtgcttggaaggcggatacaacctggaggccatctccgactcggccttggccgtggcacagacgctcatgggcgatcagccgccgaagatggagatcccgccggtcagcagagaggcggccaaggtgctagctcgggtccaagcagtgcaggcaccgtattgggagtgcatgagaccgggcatcatcgacacgcagagccgactaggcgactcggcccttcgtctccacgatgtcattcgaggctaccaaagacaggtgttggcgcagaggcataccatgatcccgatgtacattcagcgtgaagtgctgttcaagtcgtacgaaaatcaggttctgtttacgcctaatatttactcagagaagaagatactattcattatccatgacccccctgagctcgtggcgatgccagatctcatcgacaacactattgagcctcacaatggattcattctagatggggtgtccgggtacatcgactgggcgcgcaagaacgggttcggggtcatcgatgccaacgtgccgcactacattacgcaccccgaggacatggatgcctttcagcctcgggcgagcgagaagacgctacagcagcagatccaggaacttgtgtgctacatatgggacaaccagctgcagatctaccaagatgtcgaggaaatcttcctgctcggcgttggcaatgcctacctgggggtcaagctcctcctgacgaatcgcgaatgccgaaagaacatctcgggagtggtcaacttcgtgacgggcaacctgcggccggtcaagtcggagacggacccgaagctgagcagctggtacaagaacaactcgctggtgttcgtggcagcagaccacgcgtgctggacggacgaggacctggcgaagaaagtgcagaagaagcggttcggcggggtgcggaagagcgagcaggtgggactcaaccggatgatggaggcgcacgcgggagacgtgcaaaaatggatccgggaacggctacgggagggcgaaggggccgaggagggggcagacgcagggcaggacggggaggcggagccattgaacaaaccatag

SEQ ID NO: 34800 - protein, 741 aa, Muscodor strobelii
  misc_feature: SGI Peptide ID NO. 572035
  misc_feature (67)..(410): Pfam Id: PF00850 Pfam Desc: Histone deacetylase domain
  misc_feature (26)..(731): NCBI GI: 256729420 Blast Desc: histone deacetylase [Nectria haematococca mpVI 77-13-4]
  misc_feature (4)..(724): NCBI GI: 46116964 Blast Desc: FG04324.1 [Gibberella zeae PH-1]
  misc_feature (8)..(717): NCBI GI: 18376165 Blast Desc: related to histone deacetylase A [Neurospora crassa]
  misc_feature (52)..(730): NCBI GI: 171688714 Blast Desc: protein product [Podospora anserina] gi|170944319|emb|CAP70429.1| protein product [Podospora anserina]
  misc_feature (8)..(717): NCBI GI: 164427989 Blast Desc: NCU01525 [Neurospora crassa OR74A] gi|157071964|gb|EAA27738.2| conserved [Neurospora crassa OR74A]
  misc_feature (14)..(732): NCBI GI: 39973555 Blast Desc: MGG_01076 [Magnaporthe grisea 70-15] gi|145017965|gb|EDK02244.1| MGG_01076 [Magnaporthe grisea 70-15]
  misc_feature (21)..(725): NCBI GI: 156050425 Blast Desc: SS1G_07799 [Sclerotinia sclerotiorum 1980] gi|154692200|gb|EDN91938.1| SS1G_07799 [Sclerotinia sclerotiorum 1980]
  misc_feature (38)..(593): NCBI GI: 116199645 Blast Desc: CHGG_07978 [Chaetomium globosum CBS 148.51] gi|88179257|gb|EAQ86725.1| CHGG_07978 [Chaetomium globosum CBS 148.51]
  misc_feature (20)..(719): NCBI GI: 154298249 Blast Desc: BC1G_11969 [Botryotinia fuckeliana B05.10] gi|150858155|gb|EDN33347.1| BC1G_11969 [Botryotinia fuckeliana B05.10]
  misc_feature (4)..(713): NCBI GI: 239614851 Blast Desc: histone deacetylase [Ajellomyces dermatitidis ER-3]
  misc_feature (32)..(718): SWISSPROT Homolog: EC 3.5.1.98 Histone deacetylase
MAEDHSMTDVPTNGINNHHSAIQDDEDSYDEDEPMGDDENSTTSSEEVIKSMRKSGRLPTGCCYDDRMKLHANADFGPTPHHPEDPLRIERIMKKFKNAGLIFTGLDTELLDILRDNPTKYMWRIPARFASKQEICTVHTTSHHDWVRNLSHMSTRDLRHLSLSLDQGRESLYVGGMSYEAALLAAGGAIESCKNVVAGEVKNAFAVIRPPGHHAEYDESMGFCLFNNVPIAAKVCQNEYPNTCRKVFILDWDVHHGNGIQNMFYEDANILYISLHVYDNGQFYPGQPKNPMIPDGNLDKVGGSKGKGKNVNIPWPSQGMGDGEYFAAFQKIVMPIAQEFNPDLVIISAGFDAANGDELGGCFVTPGCYAHMTHMLMSLAGGKVAVCLEGGYNLEAISDSALAVAQTLMGDQPPKMEIPPVSREAAKVLARVQAVQAPYWECMRPGIIDTQSRLGDSALRLHDVIRGYQRQVLAQRHTMIPMYIQREVLFKSYENQVLFTPNIYSEKKILFIIHDPPELVAMPDLIDNTIEPHNGFILDGVSGYIDWARKNGFGVIDANVPHYITHPEDMDAFQPRASEKTLQQQIQELVCYIWDNQLQIYQDVEEIFLLGVGNAYLGVKLLLTNRECRKNISGVVNFVTGNLRPVKSETDPKLSSWYKNNSLVFVAADHACWTDEDLAKKVQKKRFGGVRKSEQVGLNRMMEAHAGDVQKWIRERLREGEGAEEGADAGQDGEAEPLNKP

SEQ ID NO: 34801 - DNA, 3382 bp, Muscodor strobelii
  misc_feature: SGI EST ID NO. CUFF.82801.0
  misc_feature: Variant of the nucleotide sequence at SEQ ID NO 34799
ctaagctccaccgcaatacgtcctcgatttggcaatgctatcatttcgcgtgcctcgttttaatcacgaccgcgcaacaggcaacgaaccaatgactacagtctattgatgcaacacagcagctgacagcaggaacaactgctacttacctcggtgaccttagcgactgctagttttgcatggcttgtaggctctactgcttgcctctttgccctcaaaacctttggcctgacctgccgcgccttgcatgtgttgtgtattgtgtcccaggtgtaggaggaaatcacgatcttcgggcaattagactatcaagttgctcgctgtagacttgcacttatagcgtgccttgaaactacgcatttcattcaagttcctgccagggtactaaattctatacattgttcgagccttcccttctttgatcaggctgttcgggcaactgcaggaggcagcaagaaatggccaccataaatcctaggcccatgatggccgaggaccattctatgactgatgtgccaacaaacggcatcaataatcatcacagcgctattcaggacgacgaagactcatacgacgaagacgaacccatgggagatgacgagaactctactacctcaagcgaagaggtcatcaaatctatgcggaaaagcgggcgtctgccaactggctgctgctacgatgacaggatgaagttacatgccaacgctgattttgggccgacgcctcatcacccagaggacccactccggatagagagaataatgaagaaattcaagaacgccggtctcatctttacgggtcttgacacggagcttctggatattttaagagataaccccaccaagtatatgtggcggataccagctcggttcgccagcaagcaggaaatttgcaccgtacatacaacgagtcatcacgactgggtcagaaacctctcgcacatgagtactcgagatcttcgtcatcttagcttgagccttgaccagggtcgggagtcgctgtacgtgggaggaatgtcatacgaggctgctttgctcgcggctgggggcgccatcgagtcgtgcaagaatgtggttgcgggcgaagtgaagaatgcttttgccgtgatccgcccgccaggacaccacgcggaatacgatgaaagcatgggattctgtctcttcaacaacgttccgatcgctgccaaggtgtgccaaaatgagtacccgaatacatgccgcaaagtgtttatcctcgactgggacgtccatcacggcaacggaatccaaaacatgttttacgaagatgcgaacatcttgtacatctcgcttcatgtttacgataacggccagttctatccggggcagcccaagaatccaatgatccccgatggaaacctagacaaagtgggtggtagtaagggcaagggcaagaatgtcaacattccgtggccgtcgcaaggcatgggagacggcgagtattttgcggccttccagaagatcgtgatgcctatcgcgcaggaattcaaccccgacctcgtcatcatctcggcgggcttcgacgctgccaatggggatgagctgggcggttgtttcgtcacgcctggctgttacgcgcacatgacgcacatgctgatgtctctggcgggaggcaaggtagccgtgtgcttggaaggcggatacaacctggaggccatctccgactcggccttggccgtggcacagacgctcatgggcgatcagccgccgaagatggagatcccgccggtcagcagagaggcggccaaggtgctagctcgggtccaagcagtgcaggcaccgtattgggagtgcatgagaccgggcatcatcgacacgcagagccgactaggcgactcggcccttcgtctccacgatgtcattcgaggctaccaaagacaggtgttggcgcagaggcataccatgatcccgatgtacattcagcgtgaagtgctgttcaagtcgtacgaaaatcaggttctgtttacgcctaatatttactcagagaagaagatactattcattatccatgacccgtaggtttcccagcagaaccgcacttcctcgttggttgctaacttggtggcagccctgagctcgtggcgatgccagatctcatcgacaacactattgagcctcacaatggattcattgtacgtatcaaatcacgtcttcctactcattcagcgaccccacgcgtcaacattcaagacatgtactgacaaggtgcgatgggtgcagctagatggggtgtccgggtacatcgactgggcgcgcaagaacgggttcggggtcatcgatgccaacgtgccgcactacattacgcaccccgaggacatggatgcctttcagcctcgggcgagcgagaagacgctacagcagcagatccaggaacttgtgtgctacatatgggacaaccagctgcagatctaccaagatgtcgaggaaatcttcctgctcggcgttggcaatgcctacctgggggtcaagctcctcctgacgaatcgcgaatgccgaaagaacatctcgggagtggtcaacttcgtgacgggcaacctgcggccggtcaagtcggagacggacccgaagctgagcagctggtacaagaacaactcgctggtgttcgtggcagcagaccacgcgtgctggacggacgaggacctggcgaagaaagtgcagaagaagcggttcggcggggtgcggaagagcgagcaggtgggactcaaccggatgatggaggcgcacgcgggagacgtgcaaaaatggatccgggaacggctacgggagggcgaaggggccgaggagggggcagacgcagggcaggacggggaggcggagccattgaacaaaccataggaagggagggttcggcaacgcgatcgcgccttcaagtacacgaaatgagatacttggacagctcgacatgctatccagatacatgtcgcgagaggaggggcgacatgtcacttgggccgctatgcctctgtgaggactggctgggaagatggaagcagaccgtgcggcatgttaagatgccttagcctcatggtgcgagggattgtacgtgatgtcacatgatgagcatctgtgttgtaatggcccaagtcggaaaggacgcagcattgagcagagggacgggtggacgtatgcgacagcaggcgatgtggaagtgagttctcaagtgtcaggcgggaagccgagtgggagaaataccaagggcactcactacctaagatgatcaatggtaagttagtgtcctgtattgtgttagcttgagtagctgatgttatatgcatccatttggcattagacacaacggtatcgacgttacagcaatgtcagtaacaacagtgaggcaagatcaataaggtatatgtagtggccgg

SEQ ID NO: 34802 - DNA, 2073 bp, Muscodor strobelii
  misc_feature: SGI cDNA ID NO. 572036
  misc_feature: Encodes the peptide sequence at SEQ ID NO 34803
atgaaagagaacaatcaacagcagactctcacccgacgccaatatcgcaatcgctcagccctacttgcaattcttctagctgtcgtactgtttctctcgcttggcactagtctcggcctcacctatgcgccatgctatgcgacgttctgttcggagaagtattttccgtatgagacaagattgcacatatcatcatactacgcgctcctcgccagcacagggctcgttctctttctgatcaatatcgcacaaataccaaagctgcagtatgtgctctcgcagcctattactcagtcgcctatctctgttccaggtctatttcgattgcaaatcacagcgggcggtttactgttgacggtgtggattcgaggcgtgacgcttgctacaacaccaatatggctgtatacagagctcgcattctggggacgtcgtgcagcccctttcaatttgtctgccgcaaaagtccgactcacagtgacgggcattgtagggcatcatgcagatgcgcttgttggcctactattggtgccagttggacgaaatagtatcgtcgggcgtgtttgcggtgctcatcagagtacgctcctgacggctcaccagttgttggcatatgtcactttgattgcggctgcggtccatggaggcgcctactttgcatttgttgcatcatatcgagcctcctcagacgttagcaaagcagcgttccacatcgacaatcctggcctcactgctggagaaggcgagtcgggcaatccctggttcctagcctgtctagcatttggcctacttgcttttcttgggatgcttctacttgctggaacatcattggcacctgttcgtcggcaatcctacaatctcttttactacacgcatgtcatcggcgctactgttgtattcttccttgtgtgcgcccacgctagcactaatttctacttcttacttcctggcttgatgttgtggattgcagactggattctgcggtttgttggtactcgtcgtctttctccattcgcctacgaaggcgaagaggctaaaccagtcagcagtggtcttagtagattagccactgccattattgaagatgccggtggtggatggattcgaatcacaattcaacagaattcagacgcatcaaacctgaaccatgatgagaatgagacaactgccgtcgacagtgctcttaggcacgagaaagaggatacattagtaaacaatcgatggaccagtgcgactcctatacagtcgttctacatcaatttcccaagcataagcaagctacagaatcatgcattcactgcagccgcggcatctacctcaagtcccatatttctcttgcaacgtagtgcacagagagaaaaagaacccgaaaaggaatggacttggaagcttgcggccatggtaactactcaggaacaaacacacgaagatgcgtctgccaatcgcttgaaaactgacaatgttgatattgcggaaacatcaaccgtagatggcaaaatagtcaagattcctgtccgcctcgagggtccgtacacaccttcatgggatggtttccatagcgcgcgtcgagtcatatgcatcgttggcgggactggtattacaggcgctctgagtctagctatgtggtgggccaattaccgcacgcttcaaagagcagaagatgcccagttttgcttaatctggactgtccgacacaaggacgtggcaacctcgctacaagaatggcgagaccttgaagatgcctgccgctcaaattcagcgctcaatatgcgtatgcagctgcacattagttcagagagcggacgacttaatactctggacactttgaggaactgtctatttgtgagcagaagcaatacggggaaccggaggagggcaggaagtaatgacgaagcgcatggatataatgagagtagggcagagatttacgtatccggacccagcggactattgaacgacgccgaaactgcttgtctcaacttacagcgtgaattatgggcgacaaggaaatcaagagaacagagcccatacaccgtggatcagttgggcttttatgttgcagaatgggaattgtga

SEQ ID NO: 34803 - protein, 690 aa, Muscodor strobelii
  misc_feature: SGI Peptide ID NO. 572036
  misc_feature (160)..(302): Pfam Id: PF01794 Pfam Desc: Ferric reductase like transmembrane component
  misc_feature (22)..(690): NCBI GI: 256729992 Blast Desc: NECHADRAFT_82537 [Nectria haematococca mpVI 77-13-4]
  misc_feature (163)..(660): NCBI GI: 71412102 Blast Desc: ferric reductase [Trypanosoma cruzi strain CL Brener] gi|70872419|gb|EAN86400.1| ferric reductase, [Trypanosoma cruzi]
  misc_feature (149)..(538): NCBI GI: 8920594 Blast Desc: ferric reductase [Trypanosoma cruzi strain CL Brener] gi|70872419|gb|EAN86400.1| ferric reductase, [Trypanosoma cruzi]
  misc_feature (149)..(538): NCBI GI: 15223434 Blast Desc: FRO2 (FERRIC REDUCTION OXIDASE 2); ferric-chelate reductase [Arabidopsis thaliana] gi|4049399|emb|CAA70770.1| FRO2 [Arabidopsis thaliana] gi|31580811|gb|AAP51420.1| ferric-chelate
  misc_feature (163)..(660): NCBI GI: 261334393 Blast Desc: ferric reductase transmembrane component, ; ferric reductase, [Trypanosoma brucei gambiense DAL972]
  misc_feature (149)..(539): NCBI GI: 15223435 Blast Desc: FRO1 (FERRIC REDUCTION OXIDASE 1); ferric-chelate reductase [Arabidopsis thaliana] gi|8920595|gb|AAF81317.1|AC061957_13 Identical to a FRO1 protein
  misc_feature (96)..(538): NCBI GI: 225464557 Blast Desc: [Vitis vinifera]
  misc_feature (161)..(538): NCBI GI: 225464555 Blast Desc: [Vitis vinifera]
  misc_feature (161)..(538): NCBI GI: 270234062 Blast Desc: protein product [Vitis vinifera]
  misc_feature (96)..(621): NCBI GI: 147769316 Blast Desc: [Vitis vinifera]
MKENNQQQTLTRRQYRNRSALLAILLAVVLFLSLGTSLGLTYAPCYATFCSEKYFPYETRLHISSYYALLASTGLVLFLINIAQIPKLQYVLSQPITQSPISVPGLFRLQITAGGLLLTVWIRGVTLATTPIWLYTELAFWGRRAAPFNLSAAKVRLTVTGIVGHHADALVGLLLVPVGRNSIVGRVCGAHQSTLLTAHQLLAYVTLIAAAVHGGAYFAFVASYRASSDVSKAAFHIDNPGLTAGEGESGNPWFLACLAFGLLAFLGMLLLAGTSLAPVRRQSYNLFYYTHVIGATVVFFLVCAHASTNFYFLLPGLMLWIADWILRFVGTRRLSPFAYEGEEAKPVSSGLSRLATAIIEDAGGGWIRITIQQNSDASNLNHDENETTAVDSALRHEKEDTLVNNRWTSATPIQSFYINFPSISKLQNHAFTAAAASTSSPIFLLQRSAQREKEPEKEWTWKLAAMVTTQEQTHEDASANRLKTDNVDIAETSTVDGKIVKIPVRLEGPYTPSWDGFHSARRVICIVGGTGITGALSLAMWWANYRTLQRAEDAQFCLIWTVRHKDVATSLQEWRDLEDACRSNSALNMRMQLHISSESGRLNTLDTLRNCLFVSRSNTGNRRRAGSNDEAHGYNESRAEIYVSGPSGLLNDAETACLNLQRELWATRKSREQSPYTVDQLGFYVAEWEL
